(19) United States
(12) Patent Application Publication
(10) Pub. No.: US 2007/0015271 A1
(43) Pub. Date: Jan. 18, 2007

(54) Human secreted proteins

(76) Inventors: Craig A. Rosen, Laytonsville, MD (US); Steven M. Ruben, Brookeville, MD (US)

Correspondence Address: HUMAN GENOME SCIENCES INC, 9410 KEY WEST AVENUE, ROCKVILLE, MD, 20850, US

(21) Appl. No.: 10/405,027

(22) Filed: Apr. 2, 2003

Related U.S. Application Data
(60) Provisional application No. 60/369,608, filed on Apr. 4, 2002.
(60) Provisional application No. 60/376,175, filed on Apr. 30, 2002.

(51) Int. Cl. C12N 1/12; C12N 1/20

(52) U.S. Cl. 435/252.1

(57) ABSTRACT

The present invention relates to human secreted polypeptides, and isolated nucleic acid molecules encoding said polypeptides, useful for diagnosing and treating diseases, disorders, and/or conditions related to said human secreted proteins. Antibodies that bind these polypeptides are also encompassed by the present invention. Also encompassed by the invention are vectors, host cells, and recombinant and synthetic methods for producing said polynucleotides, polypeptides, and/or antibodies. The invention further encompasses screening methods for identifying agonists and antagonists of polynucleotides and polypeptides of the invention. The present invention further encompasses methods and compositions for inhibiting or enhancing the production and function of the polypeptides of the present invention.

[0001] This application claims benefit under 35 U.S.C. § 119(e) of U.S. Provisional Application No. 60/369,608, filed on Apr. 4, 2002, and U.S. Provisional Application No. 60/376,175, filed Apr. 30, 2002; each of which is hereby incorporated by reference in its entirety.

### FIELD OF THE INVENTION

[0002] The present invention relates to human secreted proteins/polypeptides, and isolated nucleic acid molecules encoding said proteins/polypeptides, useful for detecting, preventing, diagnosing, prognosticating, treating, and/or ameliorating diseases and disorders related to said proteins/polypeptides (relatedness may be by direct or indirect association, by cause, by consequence, or by effect on said diseases and disorders). Antibodies that bind these polypeptides are also encompassed by the present invention. Also encompassed by the invention are vectors, host cells, and recombinant and synthetic methods for producing said polynucleotides, polypeptides, and/or antibodies. The invention further encompasses screening methods for identifying agonists and antagonists of polynucleotides and polypeptides of the invention. The present invention further encompasses methods and compositions for inhibiting or enhancing the production and function of the polypeptides of the present invention.

### BACKGROUND OF THE INVENTION

[0003] Unlike bacterium, which exist as a single compartment surrounded by a membrane, human cells and other eukaryotes are subdivided by membranes into many functionally distinct compartments. Each membrane-bounded compartment, or organelle, contains different proteins essential for the function of the organelle. The cell uses “sorting signals,” which are amino acid motifs located within the protein, to target proteins to particular cellular organelles.

[0004] One type of sorting signal, called a signal sequence, a signal peptide, or a leader sequence, directs a class of proteins to an organelle called the endoplasmic reticulum (ER). The ER separates the membrane-bounded proteins from all other types of proteins. Once localized to the ER, both groups of proteins can be further directed to another organelle called the Golgi apparatus. Here, the Golgi distributes the proteins to vesicles, including secretory vesicles, the cell membrane, lysosomes, and the other organelles.

[0005] Proteins targeted to the ER by a signal sequence can be released into the extracellular space as a secreted protein. For example, vesicles containing secreted proteins can fuse with the cell membrane and release their contents into the extracellular space—a process called exocytosis. Exocytosis can occur constitutively or after receipt of a triggering signal. In the latter case, the proteins are stored in secretory vesicles (or secretory granules) until exocytosis is triggered. Similarly, proteins residing on the cell membrane can also be secreted into the extracellular space by proteolytic cleavage of a “linker” holding the protein to the membrane.

[0006] Thus there exists a clear need for identifying and using novel secreted polynucleotides and polypeptides. Identification and sequencing of human genes is a major goal of modern scientific research. For example, by identifying genes and determining their sequences, scientists have been able to make large quantities of valuable human “gene products.” These include human insulin, interferon, Factor VIII, tumor necrosis factor, human growth hormone, tissue plasminogen activator, and numerous other compounds. Additionally, knowledge of gene sequences can provide the key to treatment or cure of genetic diseases (such as muscular dystrophy and cystic fibrosis).

### SUMMARY OF THE INVENTION

[0007] The present invention relates to human secreted proteins/polypeptides, and isolated nucleic acid molecules encoding said proteins/polypeptides, useful for detecting, preventing, diagnosing, prognosticating, treating, and/or ameliorating diseases and disorders related to said proteins/polypeptides (relatedness may be by direct or indirect association, or by cause, consequence, or effect on said diseases and disorders). Antibodies that bind these polypeptides are also encompassed by the present invention. Also encompassed by the invention are vectors, host cells, and recombinant and synthetic methods for producing said polynucleotides, polypeptides, and/or antibodies. The invention further encompasses screening methods for identifying agonists and antagonists of polynucleotides and polypeptides of the invention. The present invention further encompasses methods and compositions for inhibiting or enhancing the production and function of the polypeptides of the present invention.

### DETAILED DESCRIPTION

Polynucleotides and Polypeptides of the Invention

Description of Table 1A

[0008] Table 1A summarizes information concerning certain polypnucleotides and polypeptides of the invention. The first column provides the gene number in the application for each clone identifier. The second column provides a unique clone identifier, “Clone ID:”, for a cDNA clone related to each contig sequence disclosed in Table 1A. Third column, the cDNA Clones identified in the second column were deposited as indicated in the third column (i.e. by ATCC Deposit No:Z and deposit date). Some of the deposits contain multiple different clones corresponding to the same gene. In the fourth column, “Vector” refers to the type of vector contained in the corresponding cDNA Clone identified in the second column. In the fifth column, the nucleotide sequence identified as “NT SEQ ID NO:X” was assembled from partially homologous (“overlapping”) sequences obtained from the corresponding cDNA clone identified in the second column and, in some cases, from additional related cDNA clones. The overlapping sequences were assembled into a single contiguous sequence of high redundancy (usually three to five overlapping sequences at each nucleotide position), resulting in a final sequence identified as SEQ ID NO:X. In the sixth column, “Total NT Seq.” refers to the total number of nucleotides in the contig sequence identified as SEQ ID NO:X.” The deposited clone may contain all or most of these sequences, reflected by the nucleotide position indicated as “5′ NT of Clone Seq.” (seventh column) and the “3′ NT of Clone Seq.” (eighth column) of SEQ ID NO:X. In the ninth column, the nucleotide position of SEQ ID NO:X of the putative start codon (methionine) is identified as “5′ NT of Start Codon.” Similarly, in column ten, the nucleotide position of SEQ ID NO:X of the predicted signal sequence is identified as “5′ NT of First AA of Signal Pep.” In the eleventh column, the translated amino acid sequence, beginning with the methionine, is identified as “AA SEQ ID NO:Y,” although other reading frames can also be routinely translated using known molecular biology techniques. The polypeptides produced by these alternative open reading frames are specifically contemplated by the present invention.

[0009] In the twelfth and thirteenth columns of Table 1A, the first and last amino acid position of SEQ ID NO:Y of the predicted signal peptide is identified as “First AA of Sig Pep” and “Last AA of Sig Pep.” In the fourteenth column, the predicted first amino acid position of SEQ ID NO:Y of the secreted portion is identified as “Predicted First AA of Secreted Portion”. The amino acid position of SEQ ID NO:Y of the last amino acid encoded by the open reading frame is identified in the fifteenth column as “Last AA of ORF”.

[0010] SEQ ID NO:X (where X may be any of the polynucleotide sequences disclosed in the sequence listing) and the translated SEQ ID NO:Y (where Y may be any of the polypeptide sequences disclosed in the sequence listing) are sufficiently accurate and otherwise suitable for a variety of uses well known in the art and described further below. For instance, SEQ ID NO:X is useful for designing nucleic acid hybridization probes that will detect nucleic acid sequences contained in SEQ ID NO:X or the cDNA contained in the deposited clone. These probes will also hybridize to nucleic acid molecules in biological samples, thereby enabling a variety of forensic and diagnostic methods of the invention. Similarly, polypeptides identified from SEQ ID NO:Y may be used, for example, to generate antibodies which bind specifically to proteins containing the polypeptides and the secreted proteins encoded by the cDNA clones identified in Table 1A and/or elsewhere herein

[0011] Nevertheless, DNA sequences generated by sequencing reactions can contain sequencing errors. The errors exist as misidentified nucleotides, or as insertions or deletions of nucleotides in the generated DNA sequence. The erroneously inserted or deleted nucleotides cause frame shifts in the reading frames of the predicted amino acid sequence. In these cases, the predicted amino acid sequence diverges from the actual amino acid sequence, even though the generated DNA sequence may be greater than 99.9% identical to the actual DNA sequence (for example, one base insertion or deletion in an open reading frame of over 1000 bases).

[0012] Accordingly, for those applications requiring precision in the nucleotide sequence or the amino acid sequence, the present invention provides not only the generated nucleotide sequence identified as SEQ ID NO:X, and the predicted translated amino acid sequence identified as SEQ ID NO:Y, but also a sample of plasmid DNA containing a human cDNA of the invention deposited with the ATCC, as set forth in Table 1A. The nucleotide sequence of each deposited plasmid can readily be determined by sequencing the deposited plasmid in accordance with known methods

[0013] The predicted amino acid sequence can then be verified from such deposits. Moreover, the amino acid sequence of the protein encoded by a particular plasmid can also be directly determined by peptide sequencing or by expressing the protein in a suitable host cell containing the deposited human cDNA, collecting the protein, and determining its sequence.

[0014] Also provided in Table 1A is the name of the vector which contains the cDNA plasmid. Each vector is routinely used in the art. The following additional information is provided for convenience.

[0015] Vectors Lambda Zap (U.S. Pat. Nos. 5,128,256 and 5,286,636), Uni-Zap XR (U.S. Pat. Nos. 5,128,256 and 5,286,636), Zap Express (U.S. Pat. Nos. 5,128,256 and 5,286,636), pBluescript (pBS) (Short, J. M. et al., Nucleic Acids Res. 16:7583-7600 (1988); Alting-Mees, M. A. and Short, J. M., Nucleic Acids Res. 17:9494 (1989)) and pBK (Alting-Mees, M. A. et al., Strategies 5:58-61 (1992)) are commercially available from Stratagene Cloning Systems, Inc., 11011 N. Torrey Pines Road, La Jolla, Calif., 92037. pBS contains an ampicillin resistance gene and pBK contains a neomycin resistance gene. Phagemid pBS may be excised from the Lambda Zap and Uni-Zap XR vectors, and phagemid pBK may be excised from the Zap Express vector. Both phagemids may be transformed into E. coli strain XL-1 Blue, also available from Stratagene

[0016] Vectors pSport1, pCMVSport 1.0, pCMVSport 2.0 and pCMVSport 3.0, were obtained from Life Technologies, Inc., P.O. Box 6009, Gaithersburg, Md. 20897. All Sport vectors contain an ampicillin resistance gene and may be transformed into E. coli strain DH10B, also available from Life Technologies. See, for instance, Gruber, C. E., et al., Focus 15:59 (1993). Vector lafmid BA (Bento Soares, Columbia University, New York, N.Y.) contains an ampicillin resistance gene and can be transformed into E. coli strain XL-1 Blue. Vector pCR®2.1, which is available from Invitrogen, 1600 Faraday Avenue, Carlsbad, Calif. 92008, contains an ampicillin resistance gene and may be transformed into E. coli strain DH10B, available from Life Technologies. See, for instance, Clark, J. M., Nuc. Acids Res. 16:9677-9686 (1988) and Mead, D. et al., Bio/Technology 9: (1991).

[0017] The present invention also relates to the genes corresponding to SEQ ID NO:X, SEQ ID NO:Y, and/or a deposited cDNA (cDNA Clone ID). The corresponding gene can be isolated in accordance with known methods using the sequence information disclosed herein. Such methods include, but are not limited to, preparing probes or primers from the disclosed sequence and identifying or amplifying the corresponding gene from appropriate sources of genomic material.

[0018] Also provided in the present invention are allelic variants, orthologs, and/or species homologs. Procedures known in the art can be used to obtain full-length genes, allelic variants, splice variants, full-length coding portions, orthologs, and/or species homologs of genes corresponding to SEQ ID NO:X and SEQ ID NO:Y using information from the sequences disclosed herein or the clones deposited with the ATCC. For example, allelic variants and/or species homologs may be isolated and identified by making suitable probes or primers from the sequences provided herein and screening a suitable nucleic acid source for allelic variants and/or the desired homologue.

[0019] The present invention provides a polynucleotide comprising, or alternatively consisting of, the nucleic acid sequence of SEQ ID NO:X and/or a cDNA contained in ATCC Deposit No. Z. The present invention also provides a polypeptide comprising, or alternatively, consisting of, the polypeptide sequence of SEQ ID NO:Y, a polypeptide encoded by SEQ ID NO:X, and/or a polypeptide encoded by a cDNA contained in ATCC deposit No. Z. Polynucleotides encoding a polypeptide comprising, or alternatively consisting of the polypeptide sequence of SEQ ID NO:Y, a polypeptide encoded by SEQ ID NO:X and/or a polypeptide encoded by the cDNA contained in ATCC Deposit No. Z, are also encompassed by the invention. The present invention further encompasses a polynucleotide comprising, or alternatively consisting of the complement of the nucleic acid sequence of SEQ ID NO:X, and/or the complement of the coding strand of the cDNA contained in ATCC Deposit No. Z.

Description of Table 1B (Comprised of Tables 1B.1 and 1B.2)

[0020] Table 1B.1 and Table 1B.2 summarize some of the polynucleotides encompassed by the invention (including cDNA clones related to the sequences (Clone ID:), contig sequences (contig identifier (Contig ID:) and contig nucleotide sequence identifiers (SEQ ID NO:X)) and further summarizes certain characteristics of these polynucleotides and the polypeptides encoded thereby. The first column of Tables 1B.1 and 1B.2 provide the gene numbers in the application for each clone identifier. The second column of Tables 1B.1 and 1B.2 provide unique clone identifiers, “Clone ID:”, for cDNA clones related to each contig sequence disclosed in Table 1A and/or Table 1B. The third column of Tables 1B.1 and 1B.2 provide unique contig identifiers, “Contig ID:” for each of the contig sequences disclosed in these tables. The fourth column of Tables 1B.1 and 1B.2 provide the sequence identifiers, “SEQ ID NO:X”, for each of the contig sequences disclosed in Table 1A and/or 1B.

[0021] Table 1B.1

[0022] The fifth column of Table 1B.1, “ORF (From-To)”, provides the location (i.e., nucleotide position numbers) within the polynucleotide sequence of SEQ ID NO:X that delineates the preferred open reading frame (ORF) that encodes the amino acid sequence shown in the sequence listing and referenced in Table 1B.1 as SEQ ID NO:Y (column 6). Column 7 of Table 1B.1 lists residues comprising predicted epitopes contained in the polypeptides encoded by each of the preferred ORFs (SEQ ID NO:Y). Identification of potential immunogenic regions was performed according to the method of Jameson and Wolf (CABIOS, 4; 181-186 (1988)); specifically, the Genetics Computer Group (GCG) implementation of this algorithm, embodied in the program PEPTIDESTRUCTURE (Wisconsin Package v10.0, Genetics Computer Group (GCG), Madison, Wis.). This method returns a measure of the probability that a given residue is found on the surface of the protein. Regions where the antigenic index score is greater than 0.9 over at least 6 amino acids are indicated in Table 1B.1 as “Predicted Epitopes”. In particular embodiments, polypeptides of the invention comprise, or alternatively consist of, one, two, three, four, five or more of the predicted epitopes described in Table 1B.1. It will be appreciated that depending on the analytical criteria used to predict antigenic determinants, the exact address of the determinant may vary slightly. Column 8 of Table 1B.1 (“Cytologic Band”) provides the chromosomal location of polynucleotides corresponding to SEQ ID NO:X. Chromosomal location was determined by finding exact matches to EST and cDNA sequences contained in the NCBI (National Center for Biotechnology Information) UniGene database. Given a presumptive chromosomal location, disease locus association was determined by comparison with the Morbid Map, derived from Online Mendelian Inheritance in Man (Online Mendelian Inheritance in Man, OMIM™. McKusick-Nathans Institute for Genetic Medicine, Johns Hopkins University (Baltimore, Md.) and National Center for Biotechnology Information, National Library of Medicine (Bethesda, Md.) 2000. World Wide Web URL: http://www.ncbi.nlm.nih.gov/omim/). If the putative chromosomal location of the Query overlaps with the chromosomal location of a Morbid Map entry, an OMIM identification number is disclosed in Table 1B.1, column 9 labeled “OMIM Disease Reference(s)”. A key to the OMIM reference identification numbers is provided in Table 5.

[0023] Table 1B.2

[0024] Column 5 of Table 1B.2, “Tissue Distribution” shows the expression profile of tissue, cells, and/or cell line libraries which express the polynucleotides of the invention. The first code number shown in Table 1B.2 column 5 (preceding the colon), represents the tissue/cell source identifier code corresponding to the key provided in Table 4. Expression of these polynucleotides was not observed in the other tissues and/or cell libraries tested. The second number in column 5 (following the colon), represents the number of times a sequence corresponding to the reference polynucleotide sequence (e.g., SEQ ID NO:X) was identified in the corresponding tissue/cell source. Those tissue/cell source identifier codes in which the first two letters are “AR” designate information generated using DNA array technology. Utilizing this technology, cDNAs were amplified by PCR and then transferred, in duplicate, onto the array. Gene expression was assayed through hybridization of first strand cDNA probes to the DNA array. cDNA probes were generated from total RNA extracted from a variety of different tissues and cell lines. Probe synthesis was performed in the presence of ³³P dCTP, using oligo(dT) to prime reverse transcription. After hybridization, high stringency washing conditions were employed to remove non-specific hybrids from the array. The remaining signal, emanating from each gene target, was measured using a Phosphorimager. Gene expression was reported as Phosphor Stimulating Luminescence (PSL) which reflects the level of phosphor signal generated from the probe hybridized to each of the gene targets represented on the array. A local background signal subtraction was performed before the total signal generated from each array was used to normalize gene expression between the different hybridizations. The value presented after “[array code]:” represents the mean of the duplicate values, following background subtraction and probe normalization. One of skill in the art could routinely use this information to identify normal and/or diseased tissue(s) which show a predominant expression pattern of the corresponding polynucleotide of the invention or to identify polynucleotides which show predominant and/or specific tissue and/or cell expression.

Description of Table 1C

[0025] Table 1C summarizes additional polynucleotides encompassed by the invention (including cDNA clones related to the sequences (Clone ID:), contig sequences (contig identifier (Contig ID:) contig nucleotide sequence identifiers (SEQ ID NO:X)), and genomic sequences (SEQ ID NO:B). The first column provides a unique clone identifier, “Clone ID:”, for a cDNA clone related to each contig sequence. The second column provides the sequence identifier, “SEQ ID NO:X”, for each contig sequence. The third column provides a unique contig identifier, “Contig ID:” for each contig sequence. The fourth column, provides a BAC identifier “BAC ID NO:A” for the BAC clone referenced in the corresponding row of the table. The fifth column provides the nucleotide sequence identifier, “SEQ ID NO:B” for a fragment of the BAC clone identified in column four of the corresponding row of the table. The sixth column, “Exon From-To”, provides the location (i.e., nucleotide position numbers) within the polynucleotide sequence of SEQ ID NO:B which delineate certain polynucleotides of the invention that are also exemplary members of polynucleotide sequences that encode polypeptides of the invention (e.g., polypeptides containing amino acid sequences encoded by the polynucleotide sequences delineated in column six, and fragments and variants thereof).

Description of Table 1D

[0026] Table 1D: In preferred embodiments, the present invention encompasses a method of detecting, preventing, treating, and/or ameliorating a disease or disorder listed as listed in the “Preferred Indications” column of Table 1D (below); comprising administering to a patient (in which such detection, prevention, treatment, and/or amelioration is desired) a protein, nucleic acid, or antibody of the invention (or fragment or variant thereof) represented by Table 1A and Table 1D (in the same row as the disease or disorder to be treated is listed in the “Preferred Indications” column of Table 1D) in an amount effective to detect, prevent, treat, or ameliorate the disease or disorder.

[0027] As indicated in Table 1D, the polynucleotides, polypeptides, agonists, or antagonists of the present invention (including antibodies) can be used in assays to test for one or more biological activities. If these polynucleotides and polypeptides do exhibit activity in a particular assay, it is likely that these molecules may be involved in the diseases associated with the biological activity. Thus, the polynucleotides or polypeptides, or agonists or antagonists thereof (including antibodies) could be used to prevent, treat, or ameliorate the associated disease.

[0028] The present invention encompasses methods of detecting, preventing, diagnosing, prognosticating, treating, and/or ameliorating a disease or disorder. In preferred embodiments, the present invention encompasses a method of detecting, diagnosing, treating, preventing, or ameliorating a disease or disorder listed in the “Preferred Indications” column of Table 1D; comprising administering to a patient in which such treatment, prevention, or amelioration is desired a protein, nucleic acid, or antibody of the invention (or fragment or variant thereof) in an amount effective to treat, prevent, or ameliorate the disease or disorder. The first and seccond columns of Table 1D show the “Gene No.” and “cDNA Clone ID No.”, respectively, indicating certain nucleic acids and proteins (or antibodies against the same) of the invention (including polynucleotide, polypeptide, and antibody fragments or variants thereof) that may be used in detecting, preventing, diagnosing, prognosticating, treating, and/or ameliorating the disease(s) or disorder(s) indicated in the corresponding row in Column 3 of Table 1D.

[0029] In another embodiment, the present invention also encompasses methods of preventing, treating, diagnosing, or ameliorating a disease or disorder listed in the “Preferred Indications” column of Table 1D; comprising administering to a patient combinations of the proteins, nucleic acids, or antibodies of the invention (or fragments or variants thereof), sharing similar indications as shown in the corresponding rows in Column 3 of Table 1D.

[0030] The “Preferred Indication” column describes diseases, disorders, and/or conditions that may be treated, prevented, diagnosed, or ameliorated by a protein, nucleic acid, or antibody of the invention (or fragment or variant thereof).

[0031] The recitation of “Cancer” in the “Preferred Indication” column indicates that the corresponding nucleic acid and protein, or antibody against the same, of the invention (or fragment or variant thereof) may be used for example, to diagnose, treat, prevent, and/or ameliorate diseases and/or disorders relating to neoplastic diseases (e.g., leukemias, cancers, and/or as described below under “Hyperproliferative Disorders”).

[0032] In specific embodiments, a protein, nucleic acid, or antibody of the invention (or fragment or variant thereof) having a “Cancer” recitation in the “Preferred Indication” column of Table 1D may be used for example, to diagnose, treat, prevent, and/or ameliorate a neoplasm located in a tissue selected from the group consisting of: colon, abdomen, bone, breast, digestive system, liver, pancreas, prostate, peritoneum, lung, blood (e.g., leukemia), endocrine glands (adrenal, parathyroid, pituitary, testicles, ovary, thymus, thyroid), uterus, eye, head and neck, nervous (central and peripheral), lymphatic system, pelvic, skin, soft tissue, spleen, thoracic, and urogenital.

[0033] In specific embodiments, a protein, nucleic acid, or antibody of the invention (or fragment or variant thereof) having a “Cancer” recitation in the “Preferred Indication” column of Table 1D, may be used for example, to diagnose, treat, prevent, and/or ameliorate a pre-neoplastic condition, selected from the group consisting of: hyperplasia (e.g., endometrial hyperplasia and/or as described in the section entitled “Hyperproliferative Disorders”), metaplasia (e.g., connective tissue metaplasia, atypical metaplasia, and/or as described in the section entitled “Hyperproliferative Disorders”), and/or dysplasia (e.g., cervical dysplasia, and bronchopulmonary dysplasia).

[0034] In another specific embodiment, a protein, nucleic acid, or antibody of the invention (or fragment or variant thereof) having a “Cancer” recitation in the “Preferred Indication” column of Table 1D, may be used for example, to diagnose, treat, prevent, and/or ameliorate a benign dysproliferative disorder selected from the group consisting of: benign tumors, fibrocystic conditions, tissue hypertrophy, and/or as described in the section entitled “Hyperproliferative Disorders”.

[0035] The recitation of “Immune/Hematopoietic” in the “Preferred Indication” column indicates that the corresponding nucleic acid and protein, or antibody against the same, of the invention (or fragment or variant thereof), may be used for example, to diagnose, treat, prevent, and/or ameliorate diseases and/or disorders relating to neoplastic diseases (e.g., as described below under “Hyperproliferative Disorders”), blood disorders (e.g., as described below under “Immune Activity” “Cardiovascular Disorders” and/or “Blood-Related Disorders”), and infections (e.g., as described below under “Infectious Disease”).

[0036] In specific embodiments, a protein, nucleic acid, or antibody of the invention (or fragment or variant thereof) having the “Immune/Hematopoietic” recitation in the “Preferred Indication” column of Table 1D, may be used for example, to diagnose, treat, prevent, and/or ameliorate a disease or disorder selected from the group consisting of: anemia, pancytopenia, leukopenia, thrombocytopenia, leukemias, Hodgkin's disease, non-Hodgkin's lymphoma, acute lymphocytic anemia (ALL), plasmacytomas, multiple myeloma, Burkitt's lymphoma, arthritis, asthma, AIDS, autoimmune disease, rheumatoid arthritis, granulomatous disease, immune deficiency, inflammatory bowel disease, sepsis, neutropenia, neutrophilia, psoriasis, immune reactions to transplanted organs and tissues, systemic lupus erythematosis, hemophilia, hypercoagulation, diabetes mellitus, endocarditis, meningitis, Lyme Disease, and allergies.

[0037] The recitation of “Reproductive” in the “Preferred Indication” column indicates that the corresponding nucleic acid and protein, or antibody against the same, of the invention (or fragment or variant thereof), may be used for example, to diagnose, treat, prevent, and/or ameliorate diseases and/or disorders relating to neoplastic diseases (e.g., as described below under “Hyperproliferative Disorders”), and disorders of the reproductive system (e.g., as described below under “Reproductive System Disorders”).

[0038] In specific embodiments, a protein, nucleic acid, or antibody of the invention (or fragment or variant thereof) having a “Reproductive” recitation in the “Preferred Indication” column of Table 1D, may be used for example, to diagnose, treat, prevent, and/or ameliorate a disease or disorder selected from the group consisting of: cryptorchism, prostatitis, inguinal hernia, varicocele, leydig cell tumors, verrucous carcinoma, prostatitis, malacoplakia, Peyronie's disease, penile carcinoma, squamous cell hyperplasia, dysmenorrhea, ovarian adenocarcinoma, Turner's syndrome, mucopurulent cervicitis, Sertoli-leydig tumors, ovarian cancer, uterine cancer, pelvic inflammatory disease, testicular cancer, prostate cancer, Klinefelter's syndrome, Young's syndrome, premature ejaculation, diabetes mellitus, cystic fibrosis, Kartagener's syndrome, testicular atrophy, testicular feminization, anorchia, ectopic testis, epididymitis, orchitis, gonorrhea, syphilis, testicular torsion, vasitis nodosa, germ cell tumors, stromal tumors, dysmenorrhea, retroverted uterus, endometriosis, fibroids, adenomyosis, anovulatory bleeding, amenorrhea, Cushing's syndrome, hydatidiform moles, Asherman's syndrome, premature menopause, precocious puberty, uterine polyps, dysfunctional uterine bleeding, cervicitis, chronic cervicitis, mucopurulent cervicitis, cervical dysplasia, cervical polyps, Nabothian cysts, cervical erosion, cervical incompetence, cervical neoplasms, pseudohermaphroditism, and premenstrual syndrome.

[0039] The recitation of “Musculoskeletal” in the “Preferred Indication” column indicates that the corresponding nucleic acid and protein, or antibody against the same, of the invention (or fragment or variant thereof), may be used for example, to diagnose, treat, prevent, and/or ameliorate diseases and/or disorders relating to neoplastic diseases (e.g., as described below under “Hyperproliferative Disorders”), and disorders of the immune system (e.g., as described below under “Immune Activity”).

[0040] In specific embodiments, a protein, nucleic acid, or antibody of the invention (or fragment or variant thereof) having a “Musculoskeletal” recitation in the “Preferred Indication” column of Table 1D, may be used for example, to diagnose, treat, prevent, and/or ameliorate a disease or disorder selected from the group consisting of: bone cancers (e.g., osteochondromas, benign chondromas, chondroblastoma, chondromyxoid fibromas, osteoid osteomas, giant cell tumors, multiple myeloma, osteosarcomas), Paget's Disease, rheumatoid arthritis, systemic lupus erythematosus, osteomyelitis, Lyme Disease, gout, bursitis, tendonitis, osteoporosis, osteoarthritis, muscular dystrophy, mitochondrial myopathy, cachexia, and multiple sclerosis.

[0041] The recitation of “Cardiovascular” in the “Preferred Indication” column indicates that the corresponding nucleic acid and protein, or antibody against the same, of the invention (or fragment or variant thereof), may be used for example, to diagnose, treat, prevent, and/or ameliorate diseases and/or disorders relating to neoplastic diseases (e.g., as described below under “Hyperproliferative Disorders”), and disorders of the cardiovascular system (e.g., as described below under “Cardiovascular Disorders”).

[0042] In specific embodiments, a protein, nucleic acid, or antibody of the invention (or fragment or variant thereof) having a “Cardiovascular” recitation in the “Preferred Indication” column of Table 1D; may be used for example, to diagnose, treat, prevent, and/or ameliorate a disease or disorder selected from the group consisting of: myxomas, fibromas, rhabdomyomas, cardiovascular abnormalities (e.g., congenital heart defects, cerebral arteriovenous malformations, septal defects), heart disease (e.g., heart failure, congestive heart disease, arrhythmia, tachycardia, fibrillation, pericardial Disease, endocarditis), cardiac arrest, heart valve disease (e.g., stenosis, regurgitation, prolapse), vascular disease (e.g., hypertension, coronary artery disease, angina, aneurysm, arteriosclerosis, peripheral vascular disease), hyponatremia, hypernatremia, hypokalemia, and hyperkalemia.

[0043] The recitation of “Mixed Fetal” in the “Preferred Indication” column indicates that the corresponding nucleic acid and protein, or antibody against the same, of the invention (or fragment or variant thereof), may be used for example, to diagnose, treat, prevent, and/or ameliorate diseases and/or disorders relating to neoplastic diseases (e.g., as described below under “Hyperproliferative Disorders”).

[0044] In specific embodiments, a protein, nucleic acid, or antibody of the invention (or fragment or variant thereof) having a “Mixed Fetal” recitation in the “Preferred Indication” column of Table 1D, may be used for example, to diagnose, treat, prevent, and/or ameliorate a disease or disorder selected from the group consisting of: spina bifida, hydranencephaly, neurofibromatosis, fetal alcohol syndrome, diabetes mellitus, PKU, Down's syndrome, Patau syndrome, Edwards syndrome, Turner syndrome, Apert syndrome, Carpenter syndrome, Conradi syndrome, Crouzon syndrome, cutis laxa, Cornelia de Lange syndrome, Ellis-van Creveld syndrome, Holt-Oram syndrome, Kartagener syndrome, Meckel-Gruber syndrome, Noonan syndrome, Pallister-Hall syndrome, Rubinstein-Taybi syndrome, Scimitar syndrome, Smith-Lemli-Opitz syndrome, thromocytopenia-absent radius (TAR) syndrome, Treacher Collins syndrome, Williams syndrome, Hirschsprung's disease, Meckel's diverticulum, polycystic kidney disease, Turner's syndrome, and gonadal dysgenesis, Klippel-Feil syndrome, Ostogenesis imperfecta, muscular dystrophy, Tay-Sachs disease, Wilm's tumor, neuroblastoma, and retinoblastoma.

[0045] The recitation of “Excretory” in the “Preferred Indication” column indicates that the corresponding nucleic acid and protein, or antibody against the same, of the invention (or fragment or variant thereof), may be used for example, to diagnose, treat, prevent, and/or ameliorate diseases and/or disorders relating to neoplastic diseases (e.g., as described below under “Hyperproliferative Disorders”) and renal disorders (e.g., as described below under “Renal Disorders”).

[0046] In specific embodiments, a protein, nucleic acid, or antibody of the invention (or fragment or variant thereof) having a “Excretory” recitation in the “Preferred Indication” column of Table 1D, may be used for example, to diagnose, treat, prevent, and/or ameliorate a disease or disorder selected from the group consisting of: bladder cancer, prostate cancer, benign prostatic hyperplasia, bladder disorders (e.g., urinary incontinence, urinary retention, urinary obstruction, urinary tract Infections, interstitial cystitis, prostatitis, neurogenic bladder, hematuria), renal disorders (e.g., hydronephrosis, proteinuria, renal failure, pyelonephritis, urolithiasis, reflux nephropathy, and unilateral obstructive uropathy).

[0047] The recitation of “Neural/Sensory” in the “Preferred Indication” column indicates that the corresponding nucleic acid and protein, or antibody against the same, of the invention (or fragment or variant thereof), may be used for example, to diagnose, treat, prevent, and/or ameliorate diseases and/or disorders relating to neoplastic diseases (e.g., as described below under “Hyperproliferative Disorders”) and diseases or disorders of the nervous system (e.g., as described below under “Neural Activity and Neurological Diseases”).

[0048] In specific embodiments, a protein, nucleic acid, or antibody of the invention (or fragment or variant thereof) having a “Neural/Sensory” recitation in the “Preferred Indication” column of Table 1D, may be used for example, to diagnose, treat, prevent, and/or ameliorate a disease or disorder selected from the group consisting of: brain cancer (e.g., brain stem glioma, brain tumors, central nervous system (Primary) lymphoma, central nervous system lymphoma, cerebellar astrocytoma, and cerebral astrocytoma, neurodegenerative disorders (e.g., Alzheimer's Disease, Creutzfeldt-Jakob Disease, Parkinson's Disease, and Idiopathic Presenile Dementia), encephalomyelitis, cerebral malaria, meningitis, metabolic brain diseases (e.g., phenylketonuria and pyruvate carboxylase deficiency), cerebellar ataxia, ataxia telangiectasia, and AIDS Dementia Complex, schizophrenia, attention deficit disorder, hyperactive attention deficit disorder, autism, and obsessive compulsive disorders.

[0049] The recitation of “Respiratory” in the “Preferred Indication” column indicates that the corresponding nucleic acid and protein, or antibody against the same, of the invention (or fragment or variant thereof), may be used for example, to diagnose, treat, prevent, and/or ameliorate diseases and/or disorders relating to neoplastic diseases (e.g., as described below under “Hyperproliferative Disorders”) and diseases or disorders of the respiratory system (e.g., as described below under “Respiratory Disorders”).

[0050] In specific embodiments, a protein, nucleic acid, or antibody of the invention (or fragment or variant thereof) having a “Respiratory” recitation in the “Preferred Indication” column of Table 1D, may be used for example, to diagnose, treat, prevent, and/or ameliorate a disease or disorder selected from the group consisting of: cancers of the respiratory system such as larynx cancer, pharynx cancer, trachea cancer, epiglottis cancer, lung cancer, squamous cell carcinomas, small cell (oat cell) carcinomas, large cell carcinomas, and adenocarcinomas. Allergic reactions, cystic fibrosis, sarcoidosis, histiocytosis X, infiltrative lung diseases (e.g., pulmonary fibrosis and lymphoid interstitial pneumonia), obstructive airway diseases (e.g., asthma, emphysema, chronic or acute bronchitis), occupational lung diseases (e.g., silicosis and asbestosis), pneumonia, and pleurisy.

[0051] The recitation of “Endocrine” in the “Preferred Indication” column indicates that the corresponding nucleic acid and protein, or antibody against the same, of the invention (or fragment or variant thereof), may be used for example, to diagnose, treat, prevent, and/or ameliorate diseases and/or disorders relating to neoplastic diseases (e.g., as described below under “Hyperproliferative Disorders”) and diseases or disorders of the respiratory system (e.g., as described below under “Respiratory Disorders”), renal disorders (e.g., as described below under “Renal Disorders”), and disorders of the endocrine system (e.g., as described below under “Endocrine Disorders”.

[0052] In specific embodiments, a protein, nucleic acid, or antibody of the invention (or fragment or variant thereof) having an “Endocrine” recitation in the “Preferred Indication” column of Table 1D, may be used for example, to diagnose, treat, prevent, and/or ameliorate a disease or disorder selected from the group consisting of: cancers of endocrine tissues and organs (e.g., cancers of the hypothalamus, pituitary gland, thyroid gland, parathyroid glands, pancreas, adrenal glands, ovaries, and testes), diabetes (e.g., diabetes insipidus, type I and type II diabetes mellitus), obesity, disorders related to pituitary glands (e.g., hyperpituitarism, hypopituitarism, and pituitary dwarfism), hypothyroidism, hyperthyroidism, goiter, reproductive disorders (e.g. male and female infertility), disorders related to adrenal glands (e.g., Addison's Disease, corticosteroid deficiency, and Cushing's Syndrome), kidney cancer (e.g., hypernephroma, transitional cell cancer, and Wilm's tumor), diabetic nephropathy, interstitial nephritis, polycystic kidney disease, glomerulonephritis (e.g., IgM mesangial proliferative glomerulonephritis and glomerulonephritis caused by autoimmune disorders; such as Goodpasture's syndrome), and nephrocalcinosis.

[0053] The recitation of “Digestive” in the “Preferred Indication” column indicates that the corresponding nucleic acid and protein, or antibody against the same, of the invention (or fragment or variant thereof), may be used for example, to diagnose, treat, prevent, and/or ameliorate diseases and/or disorders relating to neoplastic diseases (e.g., as described below under “Hyperproliferative Disorders”) and diseases or disorders of the gastrointestinal system (e.g., as described below under “Gastrointestinal Disorders”.

[0054] In specific embodiments, a protein, nucleic acid, or antibody of the invention (or fragment or variant thereof) having a “Digestive” recitation in the “Preferred Indication” column of Table 1D, may be used for example, to diagnose, treat, prevent, and/or ameliorate a disease or disorder selected from the group consisting of: ulcerative colitis, appendicitis, Crohn's disease, hepatitis, hepatic encephalopathy, portal hypertension, cholelithiasis, cancer of the digestive system (e.g., biliary tract cancer, stomach cancer, colon cancer, gastric cancer, pancreatic cancer, cancer of the bile duct, tumors of the colon (e.g., polyps or cancers), and cirrhosis), pancreatitis, ulcerative disease, pyloric stenosis, gastroenteritis, gastritis, gastric atropy, benign tumors of the duodenum, distension, irritable bowel syndrome, malabsorption, congenital disorders of the small intestine, bacterial and parasitic infection, megacolon, Hirschsprung's disease, aganglionic megacolon, acquired megacolon, colitis, anorectal disorders (e.g., anal fistulas, hemorrhoids), congenital disorders of the liver (e.g., Wilson's disease, hemochromatosis, cystic fibrosis, biliary atresia, and alpha1-antitrypsin deficiency), portal hypertension, cholelithiasis, and jaundice.

[0055] The recitation of “Connective/Epithelial” in the “Preferred Indication” column indicates that the corresponding nucleic acid and protein, or antibody against the same, of the invention (or fragment or variant thereof), may be used for example, to diagnose, treat, prevent, and/or ameliorate diseases and/or disorders relating to neoplastic diseases (e.g., as described below under “Hyperproliferative Disorders”), cellular and genetic abnormalities (e.g., as described below under “Diseases at the Cellular Level”), angiogenesis (e.g., as described below under “Anti-Angiogenesis Activity”), and or to promote or inhibit regeneration (e.g., as described below under “Regeneration”), and wound healing (e.g., as described below under “Wound Healing and Epithelial Cell Proliferation”).

[0056] In specific embodiments, a protein, nucleic acid, or antibody of the invention (or fragment or variant thereof) having a “Connective/Epithelial” recitation in the “Preferred Indication” column of Table 1D, may be used for example, to diagnose, treat, prevent, and/or ameliorate a disease or disorder selected from the group consisting of: connective tissue metaplasia, mixed connective tissue disease, focal epithelial hyperplasia, epithelial metaplasia, mucoepithelial dysplasia, graft v. host disease, polymyositis, cystic hyperplasia, cerebral dysplasia, tissue hypertrophy, Alzheimer's disease, lymphoproliferative disorder, Waldenstron's macroglobulinemia, Crohn's disease, pernicious anemia, idiopathic Addison's disease, glomerulonephritis, bullous pemphigoid, Sjogren's syndrome, diabetes mellitus, cystic fibrosis, osteoblastoma, osteoclastoma, osteosarcoma, chondrosarcoma, osteoporosis, osteocarthritis, periodontal disease, wound healing, relapsing polychondritis, vasculitis, polyarteritis nodosa, Wegener's granulomatosis, cellulitis, rheumatoid arthritis, psoriatic arthritis, discoid lupus erythematosus, systemic lupus erythematosus, scleroderma, CREST syndrome, Sjogren's syndrome, polymyositis, dermatomyositis, mixed connective tissue disease, relapsing polychondritis, vasculitis, Henoch-Schonlein syndrome, erythema nodosum, polyarteritis nodosa, temporal (giant cell) arteritis, Takayasu's arteritis, Wegener's granulomatosis, Reiter's syndrome, Behcet's syndrome, ankylosing spondylitis, cellulitis, keloids, Ehler Danlos syndrome, Marfan syndrome, pseudoxantoma elasticum, osteogenese imperfecta, chondrodysplasias, epidermolysis bullosa, Alport syndrome, and cutis laxa.

Description of Table 1E

[0057] Table 1E provides information related to biological activities and preferred indications for polynucleotides and polypeptides of the invention (including antibodies, agonists, and/or antagonists thereof). Table 1E also provides information related to assays which may be used to test polynucleotides and polypeptides of the invention (including antibodies, agonists, and/or antagonists thereof) for the corresponding biological activities. The first column (“Gene No.”) provides the gene number in the application for each clone identifier. The second column (“cDNA Clone ID:”) provides the unique clone identifier for each clone as previously described and indicated in Tables 1A, 1B, 1C, and 1D. The third column (“AA SEQ ID NO:Y”) indicates the Sequence Listing SEQ ID Number for polypeptide sequences encoded by the corresponding cDNA clones (also as indicated in Tables 1A, 1B, and 2). The fourth column (“Biological Activity”) indicates a biological activity corresponding to the indicated polypeptides (or polynucleotides encoding said polypeptides). The fifth column (“Exemplary Activity Assay”) further describes the corresponding biological activity and provides information pertaining to the various types of assays which may be performed to test, demonstrate, or quantify the corresponding biological activity. The sixth column (“Preferred Indications”) describes particular embodiments of the invention and indications (e.g. pathologies, diseases, disorders, abnormalities, etc.) for which polynucleotides and polypeptides of the invention (including antibodies, agonists, and/or antagonists thereof) may be used in detecting, preventing, diagnosing, prognosticating, treating, and/or ameliorating.

[0058] Table 1E describes the use of FMAT technology, inter alia, for testing or demonstrating various biological activities. Fluorometric microvolume assay technology (FMAT) is a fluorescence-based system which provides a means to perform nonradioactive cell- and bead-based assays to detect activation of cell signal transduction pathways. This technology was designed specifically for ligand binding and immunological assays. Using this technology, fluorescent cells or beads at the bottom of the well are detected as localized areas of concentrated fluorescence using a data processing system. Unbound flurophore comprising the background signal is ignored, allowing for a wide variety of homogeneous assays. FMAT technology may be used for peptide ligand binding assays, immunofluorescence, apoptosis, cytotoxicity, and bead-based immunocapture assays. See, Miraglia S et. al., “Homogeneous cell and bead based assays for highthroughput screening using flourometric microvolume assay technology,” Journal of Biomolecular Screening; 4:193-204 (1999). In particular, FMAT technology may be used to test, confirm, and/or identify the ability of polypeptides (including polypeptide fragments and variants) to activate signal transduction pathways. For example, FMAT technology may be used to test, confirm, and/or identify the ability of polypeptides to upregulate production of immunomodulatory proteins (such as, for example, interleukins, GM-CSF, Rantes, and Tumor Necrosis factors, as well as other cellular regulators (e.g. insulin)).

[0059] Table 1E also describes the use of kinase assays for testing, demonstrating, or quantifying biological activity. In this regard, the phosphorylation and de-phosphorylation of specific amino acid residues (e.g. Tyrosine, Serine, Threonine) on cell-signal transduction proteins provides a fast, reversible means for activation and de-activation of cellular signal transduction pathways. Moreover, cell signal transduction via phosphorylation/de-phosphorylation is crucial to the regulation of a wide variety of cellular processes (e.g. proliferation, differentiation, migration, apoptosis, etc.). Accordingly, kinase assays provide a powerful tool useful for testing, confirming, and/or identifying polypeptides (including polypeptide fragments and variants) that mediate cell signal transduction events via protein phosphorylation. See e.g., Forrer, P., Tamaskovic R., and Jaussi, R. “Enzyme-Linked Immunosorbent Assay for Measurement of JNK, ERK, and p38 Kinase Activities” Biol. Chem. 379(8-9): 1101-1110 (1998).

Description of Table 1F

[0060] Polynucleotides encoding polypeptides of the present invention can be used in assays to test for one or more biological activities. One such biological activity which may be tested includes the ability of polynucleotides and polypeptides of the invention to stimulate up-regulation or down-regulation of expression of particular genes and proteins. Hence, if polynucleotides and polypeptides of the present invention exhibit activity in altering particular gene and protein expression patterns, it is likely that these polynucleotides and polypeptides of the present invention may be involved in, or capable of effecting changes in, diseases associated with the altered gene and protein expression profiles. Hence, polynucleotides, polypeptides, or antibodies of the present invention could be used to treat said associated diseases.

[0061] TaqMan® assays may be performed to assess the ability of polynucleotides (and polypeptides they encode) to alter the expression pattern of particular “target” genes. TaqMan® reactions are performed to evaluate the ability of a test agent to induce or repress expression of specific genes in different cell types. TaqMan® gene expression quantification assays (“TaqMan® assays”) are well known to, and routinely performed by, those of ordinary skill in the art. TaqMan® assays are performed in a two step reverse transcription/polymerase chain reaction (RT-PCR). In the first (RT) step, cDNA is reverse transcribed from total RNA samples using random hexamer primers. In the second (PCR) step, PCR products are synthesized from the cDNA using gene specific primers.

[0062] To quantify gene expression the Taqman® PCR reaction exploits the 5′ nuclease activity of AmpliTaq Gold® DNA Polymerase to cleave a Taqman® probe (distinct from the primers) during PCR. The Taqman® probe contains a reporter dye at the 5′-end of the probe and a quencher dye at the 3′ end of the probe. When the probe is intact, the proximity of the reporter dye to the quencher dye results in suppression of the reporter fluorescence. During PCR, if the target of interest is present, the probe specifically anneals between the forward and reverse primer sites. AmpliTaq Fold DNA Polymerase then cleaves the probe between the reporter and quencher when the probe hybridizes to the target, resulting in increased fluorescence of the reporter (see FIG. 2). Accumulation of PCR products is detected directly by monitoring the increase in fluorescence of the reporter dye.

[0063] After the probe fragments are displaced from the target, polymerization of the strand continues. The 3′-end of the probe is blocked to prevent extension of the probe during PCR. This process occurs in every cycle and does not interfere with the exponential accumulation of product. The increase in fluorescence signal is detected only if the target sequence is complementary to the probe and is amplified during PCR. Because of these requirements, any nonspecific amplification is not detected.

[0064] For test sample preparation, vector controls or, constructs containing the coding sequence for the gene of interest are transfected into cells, such as for example 293T cells, and supernatants collected after 48 hours. For cell treatment and RNA isolation, multiple primary human cells or human cell lines are used; such cells may include but are not limited to, Normal Human Dermal Fibroblasts, Aortic Smooth Muscle, Human Umbilical Vein Endothelial Cells, HepG2, Daudi, Jurkat, U937, Caco, and THP-1 cell lines. Cells are plated in growth media and growth is arrested by culturing without media change for 3 days, or by switching cells to low serum media and incubating overnight. Cells are treated for 1, 6, or 24 hours with either vector control supernatant or sample supernatant (or purified/partially purified protein preparations in buffer). Total RNA is isolated; for example, by using Trizol extraction or by using the Ambion RNAqueous™-4PCR RNA isolation system. Expression levels of multiple genes are analyzed using Taqman®, and expression in the test sample is compared to control vector samples to identify genes induced or repressed. Each of the above described techniques are well known to, and routinely performed by, those of ordinary skill in the art.

[0065] Table 1F indicates particular disease classes and preferred indications for which polynucleotides, polypeptides, or antibodies of the present invention may be used in detecting, diagnosing, preventing, treating and/or ameliorating said diseases and disorders based on “target” gene expression patterns which may be up- or down-regulated by polynucleotides (and the encoded polypeptides) corresponding to each indicated cDNA Clone ID (shown in Table 1F, Column 2).

[0066] Thus, in preferred embodiments, the present invention encompasses a method of detecting, diagnosing, preventing, treating, and/or ameliorating a disease or disorder listed in the “Disease Class” and/or “Preferred Indication” columns of Table 1F; comprising administering to a patient in which such detection, diagnosis, prevention, or treatment is desired a protein, nucleic acid, or antibody of the invention (or fragment or variant thereof) in an amount effective to detect, diagnose, prevent, treat, or ameliorate the disease or disorder. The first and second columns of Table 1D show the “Gene No.” and “cDNA Clone ID No.”, respectively, indicating certain nucleic acids and proteins (or antibodies against the same) of the invention (including polynucleotide, polypeptide, and antibody fragments or variants thereof that may be used in detecting, diagnosing, preventing, treating, or ameliorating the disease(s) or disorder(s) indicated in the corresponding row in the “Disease Class” or “Preferred Indication” Columns of Table 1F.

[0067] In another embodiment, the present invention also encompasses methods of detecting, diagnosing, preventing, treating, or ameliorating a disease or disorder listed in the “Disease Class” or “Preferred Indication” Columns of Table 1F; comprising administering to a patient combinations of the proteins, nucleic acids, or antibodies of the invention (or fragments or variants thereof, sharing similar indications as shown in the corresponding rows in the “Disease Class” or “Preferred Indication” Columns of Table 1F.

[0068] The “Disease Class” Column of Table 1F provides a categorized descriptive heading for diseases, disorders, and/or conditions (more fully described below) that may be detected, diagnosed, prevented, treated, or ameliorated by a protein, nucleic acid, or antibody of the invention (or fragment or variant thereof).

[0069] The “Preferred Indication” Column of Table 1F describes diseases, disorders, and/or conditions that may be detected, diagnosed, prevented, treated, or ameliorated by a protein, nucleic acid, or antibody of the invention (or fragment or variant thereof).

[0070] The “Cell Line” and “Exemplary Targets” Columns of Table 1F indicate particular cell lines and target genes, respectively, which may show altered gene expression patterns (i.e., up- or down-regulation of the indicated target gene) in Taqman® assays, performed as described above, utilizing polynucleotides of the cDNA Clone ID shown in the corresponding row. Alteration of expression patterns of the indicated “Exemplary Target” genes is correlated with a particular “Disease Class” and/or “Preferred Indication” as shown in the corresponding row under the respective column headings.

[0071] The “Exemplary Accessions” Column indicates GenBank Accessions (available online through the National Center for Biotechnology Information (NCBI) at http://www.ncbi.nlm.nih.gov/) which correspond to the “Exemplary Targets” shown in the adjacent row.

[0072] The recitation of “Cancer” in the “Disease Class” Column indicates that the corresponding nucleic acid and protein, or antibody against the same, of the invention (or fragment or variant thereof) may be used for example, to detect, diagnose, prevent, treat, and/or ameliorate neoplastic diseases and/or disorders (e.g., leukemias, cancers, etc., as described below under “Hyperproliferative Disorders”).

[0073] The recitation of “Immune” in the “Disease Class” column indicates that the corresponding nucleic acid and protein, or antibody against the same, of the invention (or fragment or variant thereof), may be used for example, to detect, diagnose, prevent, treat, and/or ameliorate diseases and/or disorders relating to neoplastic diseases (e.g., as described below under “Hyperproliferative Disorders”), blood disorders (e.g., as described below under “Immune Activity” “Cardiovascular Disorders” and/or “Blood-Related Disorders”), and infections (e.g., as described below under “Infectious Disease”).

[0074] The recitation of “Angiogenesis” in the “Disease Class” column indicates that the corresponding nucleic acid and protein, or antibody against the same, of the invention (or fragment or variant thereof), may be used for example, to detect, diagnose, treat, prevent, and/or ameliorate diseases and/or disorders relating to neoplastic diseases (e.g., as described below under “Hyperproliferative Disorders”), diseases and/or disorders of the cardiovascular system (e.g., as described below under “Cardiovascular Disorders”), diseases and/or disorders involving cellular and genetic abnormalities (e.g., as described below under “Diseases at the Cellular Level”), diseases and/or disorders involving angiogenesis (e.g., as described below under “Anti-Angiogenesis Activity”), to promote or inhibit cell or tissue regeneration (e.g., as described below under “Regeneration”), or to promote wound healing (e.g., as described below under “Wound Healing and Epithelial Cell Proliferation”).

[0075] The recitation of “Diabetes” in the “Disease Class” column indicates that the corresponding nucleic acid and protein, or antibody against the same, of the invention (or fragment or variant thereof), may be used for example, to detect, diagnose, treat, prevent, and/or ameliorate diabetes (including diabetes mellitus types I and II), as well as diseases and/or disorders associated with, or consequential to, diabetes (e.g. as described below under “Endocrine Disorders,” “Renal Disorders,” and “Gastrointestinal Disorders”).

Description of Table 2

[0076] Table 2 summarizes homology and features of some of the polypeptides of the invention. The first column provides a unique clone identifier, “Clone ID:”, corresponding to a cDNA clone disclosed in Table 1A or 1B. The second column provides the unique contig identifier, “Contig ID:” corresponding to contigs in Table 1B and allowing for correlation with the information in Table 1B. The third column provides the sequence identifier, “SEQ ID NO:X”, for the contig polynucleotide sequence. The fourth column provides the analysis method by which the homology/identity disclosed in the Table was determined. Comparisons were made between polypeptides encoded by the polynucleotides of the invention and either a non-redundant protein database (herein, referred to as “NR”), or a database of protein families (herein referred to as “PFAM”) as further described below. The fifth column provides a description of the PFAM/NR hit having a significant match to a polypeptide of the invention. Column six provides the accession number of the PFAM/NR hit disclosed in the fifth column. Column seven, “Score/Percent Identity”, provides a quality score or the percent identity, of the hit disclosed in columns five and six. Columns 8 and 9, “NT From” and “NT To” respectively, delineate the polynucleotides in “SEQ ID NO:X” that encode a polypeptide having a significant match to the PFAM/NR database as disclosed in the fifth and sixth columns. In specific embodiments polypeptides of the invention comprise, or alternatively consist of, an amino acid sequence encoded by a polynucleotide in SEQ ID NO:X as delineated in columns 8 and 9, or fragments or variants thereof.

Description of Table 3

[0077] Table 3 provides polynucleotide sequences that may be disclaimed according to certain embodiments of the invention. The first column provides a unique clone identifier, “Clone ID”, for a cDNA clone related to contig sequences disclosed in Table 1B. The second column provides the sequence identifier, “SEQ ID NO:X”, for contig sequences disclosed in Table 1A and/or 1B. The third column provides the unique contig identifier, “Contig ID:”, for contigs disclosed in Table 1B. The fourth column provides a unique integer ‘a’ where ‘a’ is any integer between 1 and the final nucleotide minus 15 of SEQ ID NO:X, and the fifth column provides a unique integer ‘b’ where ‘b’ is any integer between 15 and the final nucleotide of SEQ ID NO:X, where both a and b correspond to the positions of nucleotide residues shown in SEQ ID NO:X, and where b is greater than or equal to a +14. For each of the polynucleotides shown as SEQ ID NO:X, the uniquely defined integers can be substituted into the general formula of a-b, and used to describe polynucleotides which may be preferably excluded from the invention. In certain embodiments, preferably excluded from the invention are at least one, two, three, four, five, ten, or more of the polynucleotide sequence(s) having the accession number(s) disclosed in the sixth column of this Table (including for example, published sequence in connection with a particular BAC clone). In further embodiments, preferably excluded from the invention are the specific polynucleotide sequence(s) contained in the clones corresponding to at least one, two, three, four, five, ten, or more of the available material having the accession numbers identified in the sixth column of this Table (including for example, the actual sequence contained in an identified BAC clone).

Description of Table 4

[0078] Table 4 provides a key to the tissue/cell source identifier code disclosed in Table 1B.2, column 5. Column 1 provides the tissue/cell source identifier code disclosed in Table 1B.2, Column 5. Columns 2-5 provide a description of the tissue or cell source. Note that “Description” and “Tissue” sources (i.e. columns 2 and 3) having the prefix “a_” indicates organs, tissues, or cells derived from “adult” sources. Codes corresponding to diseased tissues are indicated in column 6 with the word “disease.” The use of the word “disease” in column 6 is non-limiting. The tissue or cell source may be specific (e.g. a neoplasm), or may be disease-associated (e.g., a tissue sample from a normal portion of a diseased organ). Furthermore, tissues and/or cells lacking the “disease” designation may still be derived from sources directly or indirectly involved in a disease state or disorder, and therefore may have a further utility in that disease state or disorder. In numerous cases where the tissue/cell source is a library, column 7 identifies the vector used to generate the library.

Definitions

[0079] The following definitions are provided to facilitate understanding of certain terms used throughout this specification.

[0080] In the present invention, “isolated” refers to material removed from its original environment (e.g., the natural environment if it is naturally occurring), and thus is altered “by the hand of man” from its natural state. For example, an isolated polynucleotide could be part of a vector or a composition of matter, or could be contained within a cell, and still be “isolated” because that vector, composition of matter, or particular cell is not the original environment of the polynucleotide. The term “isolated” does not refer to genomic or cDNA libraries, whole cell total or mRNA preparations, genomic DNA preparations (including those separated by electrophoresis and transferred onto blots), sheared whole cell genomic DNA preparations or other compositions where the art demonstrates no distinguishing features of the polynucleotide/sequences of the present invention.

[0081] In the present invention, a “secreted” protein refers to those proteins capable of being directed to the ER, secretory vesicles, or the extracellular space as a result of a signal sequence, as well as those proteins released into the extracellular space without necessarily containing a signal sequence. If the secreted protein is released into the extracellular space, the secreted protein can undergo extracellular processing to produce a “mature” protein. Release into the extracellular space can occur by many mechanisms, including exocytosis and proteolytic cleavage.

[0082] As used herein, a “polynucleotide” refers to a molecule having a nucleic acid sequence encoding SEQ ID NO:Y or a fragment or variant thereof (e.g., the polypeptide delinated in columns fourteen and fifteen of Table 1A); a nucleic acid sequence contained in SEQ ID NO:X (as described in column 5 of Table 1A and/or column 3 of Table 1B) or the complement thereof, a cDNA sequence contained in Clone ID: (as described in column 2 of Table 1A and/or 1B and contained within a library deposited with the ATCC); a nucleotide sequence encoding the polypeptide encoded by a nucleotide sequence in SEQ ID NO:B as defined in column 6 (EXON From-To) of Table 1C or a fragment or variant thereof; or a nucleotide coding sequence in SEQ ID NO:B as defined in column 6 of Table 1C or the complement thereof. For example, the polynucleotide can contain the nucleotide sequence of the full length cDNA sequence, including the 5′ and 3′ untranslated sequences, the coding region, as well as fragments, epitopes, domains, and variants of the nucleic acid sequence. Moreover, as used herein, a “polypeptide” refers to a molecule having an amino acid sequence encoded by a polynucleotide of the invention as broadly defined (obviously excluding poly-Phenylalanine or poly-Lysine peptide sequences which result from translation of a polyA tail of a sequence corresponding to a cDNA).

[0083] In the present invention, “SEQ ID NO:X” was often generated by overlapping sequences contained in multiple clones (contig analysis). A representative clone containing all or most of the sequence for SEQ ID NO:X is deposited at Human Genome Sciences, Inc. (HGS) in a catalogued and archived library. As shown, for example, in column 2 of Table 1B, each clone is identified by a cDNA Clone ID (identifier generally referred to herein as Clone ID:). Each Clone ID is unique to an individual clone and the Clone ID is all the information needed to retrieve a given clone from the HGS library. Table 6 provides a list of the deposited cDNA libraries. One can use the Clone ID: to determine the library source by reference to Table 6. Table 6 lists the deposited cDNA libraries by name and links each library to an ATCC Deposit. Library names contain four characters, for example, “HTWE.” The name of a cDNA clone (Clone ID) isolated from that library begins with the same four characters, for example “HTWEP07”. As mentioned below, Table 1A and/or 1B correlates the Clone ID names with SEQ ID NO:X. Thus, starting with an SEQ. ID NO:X, one can use Tables 1A, 1B, 6, and 9 to determine the corresponding Clone ID, which library it came from and which ATCC deposit the library is contained in. Furthermore, it is possible to retrieve a given cDNA clone from the source library by techniques known in the art and described elsewhere herein. The ATCC is located at 10801 University Boulevard, Manassas, Va. 20110-2209, USA. The ATCC deposits were made pursuant to the terms of the Budapest Treaty on the international recognition of the deposit of microorganisms for the purposes of patent procedure.

[0084] In specific embodiments, the polynucleotides of the invention are at least 15, at least 30, at least 50, at least 100, at least 125, at least 500, or at least 1000 continuous nucleotides but are less than or equal to 300 kb, 200 kb, 100 kb, 50 kb, 15 kb, 10 kb, 7.5 kb, 5 kb, 2.5 kb, 2.0 kb, or 1 kb, in length. In a further embodiment, polynucleotides of the invention comprise a portion of the coding sequences, as disclosed herein, but do not comprise all or a portion of any intron. In another embodiment, the polynucleotides comprising coding sequences do not contain coding sequences of a genomic flanking gene (i.e., 5′ or 3′ to the gene of interest in the genome). In other embodiments, the polynucleotides of the invention do not contain the coding sequence of more than 1000, 500, 250, 100, 50, 25, 20, 15, 10, 5, 4, 3, 2, or 1 genomic flanking gene(s).

[0085] A “polynucleotide” of the present invention also includes those polynucleotides capable of hybridizing, under stringent hybridization conditions, to sequences contained in SEQ ID NO:X, or the complement thereof (e.g., the complement of any one, two, three, four, or more of the polynucleotide fragments described herein), the polynucleotide sequence delineated in columns 7 and 8 of Table 1A or the complement thereof, the polynucleotide sequence delineated in columns 8 and 9 of Table 2 or the complement thereof, and/or cDNA sequences contained in Clone ID: (e.g., the complement of any one, two, three, four, or more of the polynucleotide fragments, or the cDNA clone within the pool of cDNA clones deposited with the ATCC, described herein), and/or the polynucleotide sequence delineated in column 6 of Table 1C or the complement thereof. “Stringent hybridization conditions” refers to an overnight incubation at 42 degree C. in a solution comprising 50% formamide, 5×SSC (750 mM NaCl, 75 mM trisodium citrate), 50 mM sodium phosphate (pH 7.6), 5× Denhardt's solution, 10% dextran sulfate, and 20 μg/ml denatured, sheared salmon sperm DNA, followed by washing the filters in 0.1×SSC at about 65 degree C.

[0086] Also contemplated are nucleic acid molecules that hybridize to the polynucleotides of the present invention at lower stringency hybridization conditions. Changes in the stringency of hybridization and signal detection are primarily accomplished through the manipulation of formamide concentration (lower percentages of formamide result in lowered stringency); salt conditions, or temperature. For example, lower stringency conditions include an overnight incubation at 37 degree C. in a solution comprising 6×SSPE (20×SSPE=3M NaCl; 0.2M NaH₂PO₄; 0.02M EDTA, pH 7.4), 0.5% SDS, 30% formamide, 100 ug/ml salmon sperm blocking DNA; followed by washes at 50 degree C. with 1×SSPE, 0.1% SDS. In addition, to achieve even lower stringency, washes performed following stringent hybridization can be done at higher salt concentrations (e.g. 5×SSC).

[0087] Note that variations in the above conditions may be accomplished through the inclusion and/or substitution of alternate blocking reagents used to suppress background in hybridization experiments. Typical blocking reagents include Denhardt's reagent, BLOTTO, heparin, denatured salmon sperm DNA, and commercially available proprietary formulations. The inclusion of specific blocking reagents may require modification of the hybridization conditions described above, due to problems with compatibility.

[0088] Of course, a polynucleotide which hybridizes only to polyA+ sequences (such as any 3′ terminal polyA+ tract of a cDNA shown in the sequence listing), or to a complementary stretch of T (or U) residues, would not be included in the definition of “polynucleotide,” since such a polynucleotide would hybridize to any nucleic acid molecule containing a poly (A) stretch or the complement thereof (e.g., practically any double-stranded cDNA clone generated using oligo dT as a primer).

[0089] The polynucleotide of the present invention can be composed of any polyribonucleotide or polydeoxribonucleotide, which may be unmodified RNA or DNA or modified RNA or DNA. For example, polynucleotides can be composed of single- and double-stranded DNA, DNA that is a mixture of single- and double-stranded regions, single- and double-stranded RNA, and RNA that is mixture of single- and double-stranded regions, hybrid molecules comprising DNA and RNA that may be single-stranded or, more typically, double-stranded or a mixture of single- and double-stranded regions. In addition, the polynucleotide can be composed of triple-stranded regions comprising RNA or DNA or both RNA and DNA. A polynucleotide may also contain one or more modified bases or DNA or RNA backbones modified for stability or for other reasons. “Modified” bases include, for example, tritylated bases and unusual bases such as inosine. A variety of modifications can be made to DNA and RNA; thus, “polynucleotide” embraces chemically, enzymatically, or metabolically modified forms.

[0090] In specific embodiments, the polynucleotides of the invention are at least 15, at least 30, at least 50, at least 100, at least 125, at least 500, or at least 1000 continuous nucleotides but are less than or equal to 300 kb, 200 kb, 100 kb, 50 kb, 15 kb, 10 kb, 7.5 kb, 5 kb, 2.5 kb, 2.0 kb, or 1 kb, in length. In a further embodiment, polynucleotides of the invention comprise a portion of the coding sequences, as disclosed herein, but do not comprise all or a portion of any intron. In another embodiment, the polynucleotides comprising coding sequences do not contain coding sequences of a genomic flanking gene (i.e., 5′ or 3′ to the gene of interest in the genome). In other embodiments, the polynucleotides of the invention do not contain the coding sequence of more than 1000, 500, 250, 100, 50, 25, 20, 15, 10, 5, 4, 3, 2, or 1 genomic flanking gene(s).

[0091] “SEQ ID NO:X” refers to a polynucleotide sequence described in column 5 of Table 1A, while “SEQ ID NO:Y” refers to a polypeptide sequence described in column 10 of Table 1A. SEQ ID NO:X is identified by an integer specified in column 6 of Table 1A. The polypeptide sequence SEQ ID NO:Y is a translated open reading frame (ORF) encoded by polynucleotide SEQ ID NO:X. The polynucleotide sequences are shown in the sequence listing immediately followed by all of the polypeptide sequences. Thus, a polypeptide sequence corresponding to polynucleotide sequence SEQ ID NO:2 is the first polypeptide sequence shown in the sequence listing. The second polypeptide sequence corresponds to the polynucleotide sequence shown as SEQ ID NO:3, and so on.

[0092] The polypeptide of the present invention can be composed of amino acids joined to each other by peptide bonds or modified peptide bonds, i.e., peptide isosteres, and may contain amino acids other than the 20 gene-encoded amino acids. The polypeptides may be modified by either natural processes, such as posttranslational processing, or by chemical modification techniques which are well known in the art. Such modifications are well described in basic texts and in more detailed monographs, as well as in a voluminous research literature. Modifications can occur anywhere in a polypeptide, including the peptide backbone, the amino acid side-chains and the amino or carboxyl termini. It will be appreciated that the same type of modification may be present in the same or varying degrees at several sites in a given polypeptide. Also, a given polypeptide may contain many types of modifications. Polypeptides may be branched, for example, as a result of ubiquitination, and they may be cyclic, with or without branching. Cyclic, branched, and branched cyclic polypeptides may result from posttranslation natural processes or may be made by synthetic methods. Modifications include acetylation, acylation, ADP-ribosylation, amidation, covalent attachment of flavin, covalent attachment of a heme moiety, covalent attachment of a nucleotide or nucleotide derivative, covalent attachment of a lipid or lipid derivative, covalent attachment of phosphotidylinositol, cross-linking, cyclization, disulfide bond formation, demethylation, formation of covalent cross-links, formation of cysteine, formation of pyroglutamate, formylation, gamma-carboxylation, glycosylation, GPI anchor formation, hydroxylation, iodination, methylation, myristoylation, oxidation, pegylation, proteolytic processing, phosphorylation, prenylation, racemization, selenoylation, sulfation, transfer-RNA mediated addition of amino acids to proteins such as arginylation, and ubiquitination. (See, for instance, PROTEINS—STRUCTURE AND MOLECULAR PROPERTIES, 2nd Ed., T. E. Creighton, W. H. Freeman and Company, New York (1993); POSTTRANSLATIONAL COVALENT MODIFICATION OF PROTEINS, B. C. Johnson, Ed., Academic Press, New York, pgs. 1-12 (1983); Seifter et al., Meth. Enzymol. 182:626-646 (1990); Rattan et al., Ann. N.Y. Acad. Sci. 663:48-62 (1992)).

[0093] “SEQ ID NO:X” refers to a polynucleotide sequence described, for example, in Tables 1A, 1B or 2, while “SEQ ID NO:Y” refers to a polypeptide sequence described in column 11 of Table 1A and or column 6 of Table 1B.1. SEQ ID NO:X is identified by an integer specified in column 4 of Table 1B.1. The polypeptide sequence SEQ ID NO:Y is a translated open reading frame (ORF) encoded by polynucleotide SEQ ID NO:X. “Clone ID:” refers to a cDNA clone described in column 2 of Table 1A and/or 1B.

[0094] “A polypeptide having functional activity” refers to a polypeptide capable of displaying one or more known functional activities associated with a full-length (complete) protein. Such functional activities include, but are not limited to, biological activity, antigenicity [ability to bind (or compete with a polypeptide for binding) to an anti-polypeptide antibody], immunogenicity (ability to generate antibody which binds to a specific polypeptide of the invention), ability to form multimers with polypeptides of the invention, and ability to bind to a receptor or ligand for a polypeptide.

[0095] The polypeptides of the invention can be assayed for functional activity (e.g. biological activity) using or routinely modifying assays known in the art, as well as assays described herein. Specifically, one of skill in the art may routinely assay secreted polypeptides (including fragments and variants) of the invention for activity using assays as described in the examples section below.

[0096] “A polypeptide having biological activity” refers to a polypeptide exhibiting activity similar to, but not necessarily identical to, an activity of a polypeptide of the present invention, including mature forms, as measured in a particular biological assay, with or without dose dependency. In the case where dose dependency does exist, it need not be identical to that of the polypeptide, but rather substantially similar to the dose-dependence in a given activity as compared to the polypeptide of the present invention (i.e., the candidate polypeptide will exhibit greater activity or not more than about 25-fold less and, preferably, not more than about tenfold less activity, and most preferably, not more than about three-fold less activity relative to the polypeptide of the present invention).

Tables

Table 1A

[0097] Table 1A summarizes information concerning certain polypnucleotides and polypeptides of the invention. The first column provides the gene number in the application for each clone identifier. The second column provides a unique clone identifier, “Clone ID:”, for a cDNA clone related to each contig sequence disclosed in Table 1A. Third column, the cDNA Clones identified in the second column were deposited as indicated in the third column (i.e. by ATCC Deposit No:Z and deposit date). Some of the deposits contain multiple different clones corresponding to the same gene. In the fourth column, “Vector” refers to the type of vector contained in the corresponding cDNA Clone identified in the second column. In the fifth column, the nucleotide sequence identified as “NT SEQ ID NO:X” was assembled from partially homologous (“overlapping”) sequences obtained from the corresponding cDNA clone identified in the second column and, in some cases, from additional related cDNA clones. The overlapping sequences were assembled into a single contiguous sequence of high redundancy (usually three to five overlapping sequences at each nucleotide position), resulting in a final sequence identified as SEQ ID NO:X. In the sixth column, “Total NT Seq.” refers to the total number of nucleotides in the contig sequence identified as SEQ ID NO:X.” The deposited clone may contain all or most of these sequences, reflected by the nucleotide position indicated as “5′ NT of Clone Seq.” (seventh column) and the “3′ NT of Clone Seq.” (eighth column) of SEQ ID NO:X. In the ninth column, the nucleotide position of SEQ ID NO:X of the putative start codon (methionine) is identified as “5′ NT of Start Codon.” Similarly, in column ten, the nucleotide position of SEQ ID NO:X of the predicted signal sequence is identified as “5′ NT of First AA of Signal Pep.” In the eleventh column, the translated amino acid sequence, beginning with the methionine, is identified as “AA SEQ ID NO:Y,” although other reading frames can also be routinely translated using known molecular biology techniques. The polypeptides produced by these alternative open reading frames are specifically contemplated by the present invention.

[0098] In the twelfth and thirteenth columns of Table 1A, the first and last amino acid position of SEQ ID NO:Y of the predicted signal peptide is identified as “First AA of Sig Pep” and “Last AA of Sig Pep.” In the fourteenth column, the predicted first amino acid position of SEQ ID NO:Y of the secreted portion is identified as “Predicted First AA of Secreted Portion”. The amino acid position of SEQ ID NO:Y of the last amino acid encoded by the open reading frame is identified in the fifteenth column as “Last AA of ORF”.

[0099] SEQ ID NO:X (where X may be any of the polynucleotide sequences disclosed in the sequence listing) and the translated SEQ ID NO:Y (where Y may be any of the polypeptide sequences disclosed in the sequence listing) are sufficiently accurate and otherwise suitable for a variety of uses well known in the art and described further below. For instance, SEQ ID NO:X is useful for designing nucleic acid hybridization probes that will detect nucleic acid sequences contained in SEQ ID NO:X or the cDNA contained in the deposited clone. These probes will also hybridize to nucleic acid molecules in biological samples, thereby enabling a variety of forensic and diagnostic methods of the invention. Similarly, polypeptides identified from SEQ ID NO:Y may be used, for example, to generate antibodies which bind specifically to proteins containing the polypeptides and the secreted proteins encoded by the cDNA clones identified in Table 1A and/or elsewhere herein

[0100] Nevertheless, DNA sequences generated by sequencing reactions can contain sequencing errors. The errors exist as misidentified nucleotides, or as insertions or deletions of nucleotides in the generated DNA sequence. The erroneously inserted or deleted nucleotides cause frame shifts in the reading frames of the predicted amino acid sequence. In these cases, the predicted amino acid sequence diverges from the actual amino acid sequence, even though the generated DNA sequence may be greater than 99.9% identical to the actual DNA sequence (for example, one base insertion or deletion in an open reading frame of over 1000 bases).

[0101] Accordingly, for those applications requiring precision in the nucleotide sequence or the amino acid sequence, the present invention provides not only the generated nucleotide sequence identified as SEQ ID NO:X, and the predicted translated amino acid sequence identified as SEQ ID NO:Y, but also a sample of plasmid DNA containing a human cDNA of the invention deposited with the ATCC, as set forth in Table 1A. The nucleotide sequence of each deposited plasmid can readily be determined by sequencing the deposited plasmid in accordance with known methods.

[0102] The predicted amino acid sequence can then be verified from such deposits. Moreover, the amino acid sequence of the protein encoded by a particular plasmid can also be directly determined by peptide sequencing or by expressing the protein in a suitable host cell containing the deposited human cDNA, collecting the protein, and determining its sequence.

[0103] Also provided in Table 1A is the name of the vector which contains the cDNA plasmid. Each vector is routinely used in the art. The following additional information is provided for convenience.

[0104] Vectors Lambda Zap (U.S. Pat. Nos. 5,128,256 and 5,286,636), Uni-Zap XR (U.S. Pat. Nos. 5,128,256 and 5,286,636), Zap Express (U.S. Pat. Nos. 5,128,256 and 5,286,636), pBluescript (pBS) (Short, J. M. et al., Nucleic Acids Res. 16:7583-7600 (1988); Alting-Mees, M. A. and Short, J. M., Nucleic Acids Res. 17:9494 (1989)) and pBK (Alting-Mees, M. A. et al., Strategies 5:58-61 (1992)) are commercially available from Stratagene Cloning Systems, Inc., 11011 N. Torrey Pines Road, La Jolla, Calif., 92037. pBS contains an ampicillin resistance gene and pBK contains a neomycin resistance gene. Phagemid pBS may be excised from the Lambda Zap and Uni-Zap XR vectors, and phagemid pBK may be excised from the Zap Express vector. Both phagemids may be transformed into E. coli strain XL-1 Blue, also available from Stratagene

[0105] Vectors pSport1, pCMVSport 1.0, pCMVSport 2.0 and pCMVSport 3.0, were obtained from Life Technologies, Inc., P.O. Box 6009, Gaithersburg, Md. 20897. All Sport vectors contain an ampicillin resistance gene and may be transformed into E. coli strain DH10B, also available from Life Technologies. See, for instance, Gruber, C. E., et al., Focus 15:59 (1993). Vector lafmid BA (Bento Soares, Columbia University, New York, N.Y.) contains an ampicillin resistance gene and can be transformed into E. coli strain XL-1 Blue. Vector pCR®2.1, which is available from Invitrogen, 1600 Faraday Avenue, Carlsbad, Calif. 92008, contains an ampicillin resistance gene and may be transformed into E. coli strain DH10B, available from Life Technologies. See, for instance, Clark, J. M., Nuc. Acids Res. 16:9677-9686 (1988) and Mead, D. et al., Bio/Technology 9: (1991).

[0106] The present invention also relates to the genes corresponding to SEQ ID NO:X, SEQ ID NO:Y, and/or a deposited cDNA (cDNA Clone ID). The corresponding gene can be isolated in accordance with known methods using the sequence information disclosed herein. Such methods include, but are not limited to, preparing probes or primers from the disclosed sequence and identifying or amplifying the corresponding gene from appropriate sources of genomic material.

[0107] Also provided in the present invention are allelic variants, orthologs, and/or species homologs. Procedures known in the art can be used to obtain full-length genes, allelic variants, splice variants, full-length coding portions, orthologs, and/or species homologs of genes corresponding to SEQ ID NO:X and SEQ ID NO:Y using information from the sequences disclosed herein or the clones deposited with the ATCC. For example, allelic variants and/or species homologs may be isolated and identified by making suitable probes or primers from the sequences provided herein and screening a suitable nucleic acid source for allelic variants and/or the desired homologue.

[0108] The present invention provides a polynucleotide comprising, or alternatively consisting of, the nucleic acid sequence of SEQ ID NO:X and/or a cDNA contained in ATCC Deposit No. Z. The present invention also provides a polypeptide comprising, or alternatively, consisting of, the polypeptide sequence of SEQ ID NO:Y, a polypeptide encoded by SEQ ID NO:X, and/or a polypeptide encoded by a cDNA contained in ATCC deposit No. Z. Polynucleotides encoding a polypeptide comprising, or alternatively consisting of the polypeptide sequence of SEQ ID NO:Y, a polypeptide encoded by SEQ ID NO:X and/or a polypeptide encoded by the cDNA contained in ATCC Deposit No. Z, are also encompassed by the invention. The present invention further encompasses a polynucleotide comprising, or alternatively consisting of the complement of the nucleic acid sequence of SEQ ID NO:X, and/or the complement of the coding strand of the cDNA contained in ATCC Deposit No. Z.

LENGTHY TABLE REFERENCED HERE
US20070015271A1-20070118-T00001
Please refer to the end of the specification for access instructions.

Table 1B (Comprised of Tables 1B.1 and 1B.2)

[0109] The first column in Table 1B.1 and Table 1B.2 provides the gene number in the application corresponding to the clone identifier. The second column in Table 1B.1 and Table 1B.2 provides a unique “Clone ID:” for the cDNA clone related to each contig sequence disclosed in Table 1B.1 and Table 1B.2. This clone ID references the cDNA clone which contains at least the 5′ most sequence of the assembled contig and at least a portion of SEQ ID NO:X as determined by directly sequencing the referenced clone. The referenced clone may have more sequence than described in the sequence listing or the clone may have less. In the vast majority of cases, however, the clone is believed to encode a full-length polypeptide. In the case where a clone is not full-length, a full-length cDNA can be obtained by methods described elsewhere herein. The third column in Table 1B.1 and Table 1B.2 provides a unique “Contig ID” identification for each contig sequence. The fourth column in Table 1B.1 and Table 1B.2 provides the “SEQ ID NO:” identifier for each of the contig polynucleotide sequences disclosed in Table 1B.

[0110] Table 1B.1

[0111] The fifth column in Table 1B.1, “ORF (From-To)”, provides the location (i.e., nucleotide position numbers) within the polynucleotide sequence “SEQ ID NO:X” that delineate the preferred open reading frame (ORF) shown in the sequence listing and referenced in Table 1B.1, column 6, as SEQ ID NO:Y. Where the nucleotide position number “To” is lower than the nucleotide position number “From”, the preferred ORF is the reverse complement of the referenced polynucleotide sequence. The sixth column in Table 1B.1 provides the corresponding SEQ ID NO:Y for the polypeptide sequence encoded by the preferred ORF delineated in column 5. In one embodiment, the invention provides an amino acid sequence comprising, or alternatively consisting of, a polypeptide encoded by the portion of SEQ ID NO:X delineated by “ORF (From-To)”. Also provided are polynucleotides encoding such amino acid sequences and the complementary strand thereto. Column 7 in Table 1B.1 lists residues comprising epitopes contained in the polypeptides encoded by the preferred ORF (SEQ ID NO:Y), as predicted using the algorithm of Jameson and Wolf, (1988) Comp. Appl. Biosci. 4:181-186. The Jameson-Wolf antigenic analysis was performed using the computer program PROTEAN (Version 3.11 for the Power MacIntosh, DNASTAR, Inc., 1228 South Park Street Madison, Wis.). In specific embodiments, polypeptides of the invention comprise, or alternatively consist of, at least one, two, three, four, five or more of the predicted epitopes as described in Table 1B. It will be appreciated that depending on the analytical criteria used to predict antigenic determinants, the exact address of the determinant may vary slightly.

[0112] Column 8 in Table 1B.1 provides a chromosomal map location for certain polynucleotides of the invention. Chromosomal location was determined by finding exact matches to EST and cDNA sequences contained in the NCBI (National Center for Biotechnology Information) UniGene database. Each sequence in the UniGene database is assigned to a “cluster”; all of the ESTs, cDNAs, and STSs in a cluster are believed to be derived from a single gene. Chromosomal mapping data is often available for one or more sequence(s) in a UniGene cluster; this data (if consistent) is then applied to the cluster as a whole. Thus, it is possible to infer the chromosomal location of a new polynucleotide sequence by determining its identity with a mapped UniGene cluster.

[0113] A modified version of the computer program BLASTN (Altshul, et al., J. Mol. Biol. 215:403-410 (1990), and Gish, and States, Nat. Genet. 3:266-272) (1993) was used to search the UniGene database for EST or cDNA sequences that contain exact or near-exact matches to a polynucleotide sequence of the invention (the ‘Query’). A sequence from the UniGene database (the ‘Subject’) was said to be an exact match if it contained a segment of 50 nucleotides in length such that 48 of those nucleotides were in the same order as found in the Query sequence. If all of the matches that met this criteria were in the same UniGene cluster, and mapping data was available for this cluster, it is indicated in Table 1B under the heading “Cytologic Band”. Where a cluster had been further localized to a distinct cytologic band, that band is disclosed; where no banding information was available, but the gene had been localized to a single chromosome, the chromosome is disclosed.

[0114] Once a presumptive chromosomal location was determined for a polynucleotide of the invention, an associated disease locus was identified by comparison with a database of diseases which have been experimentally associated with genetic loci. The database used was the Morbid Map, derived from OMIM™ and National Center for Biotechnology Information, National Library of Medicine (Bethesda, Md.) 2000. If the putative chromosomal location of a polynucleotide of the invention (Query sequence) was associated with a disease in the Morbid Map database, an OMIM reference identification number was noted in column 9, Table 1B.1, labelled “OMIM Disease Reference(s). Table 5 is a key to the OMIM reference identification numbers (column 1), and provides a description of the associated disease in Column 2.

[0115] Table 1B.2

[0116] Column 5, in Table 1B.2, provides an expression profile and library code:count for each of the contig sequences (SEQ ID NO:X) disclosed in Table 1B, which can routinely be combined with the information provided in Table 4 and used to determine the tissues, cells, and/or cell line libraries which predominantly express the polynucleotides of the invention. The first number in Table 1B.2, column 5 (preceding the colon), represents the tissue/cell source identifier code corresponding to the code and description provided in Table 4. The second number in column 5 (following the colon) represents the number of times a sequence corresponding to the reference polynucleotide sequence was identified in the corresponding tissue/cell source. Those tissue/cell source identifier codes in which the first two letters are “AR” designate information generated using DNA array technology. Utilizing this technology, cDNAs were amplified by PCR and then transferred, in duplicate, onto the array. Gene expression was assayed through hybridization of first strand cDNA probes to the DNA array. cDNA probes were generated from total RNA extracted from a variety of different tissues and cell lines. Probe synthesis was performed in the presence of ³³P dCTP, using oligo (dT) to prime reverse transcription. After hybridization, high stringency washing conditions were employed to remove non-specific hybrids from the array. The remaining signal, emanating from each gene target, was measured using a Phosphorimager. Gene expression was reported as Phosphor Stimulating Luminescence (PSL) which reflects the level of phosphor signal generated from the probe hybridized to each of the gene targets represented on the array. A local background signal subtraction was performed before the total signal generated from each array was used to normalize gene expression between the different hybridizations. The value presented after “[array code]:” represents the mean of the duplicate values, following background subtraction and probe normalization. One of skill in the art could routinely use this information to identify normal and/or diseased tissue(s) which show a predominant expression pattern of the corresponding polynucleotide of the invention or to identify polynucleotides which show predominant and/or specific tissue and/or cell expression.

LENGTHY TABLE REFERENCED HERE
US20070015271A1-20070118-T00002
Please refer to the end of the specification for access instructions.

[0117] Table 1C summarizes additional polynucleotides encompassed by the invention (including cDNA clones related to the sequences (Clone ID:), contig sequences (contig identifier (Contig ID:) contig nucleotide sequence identifiers (SEQ ID NO:X)), and genomic sequences (SEQ ID NO:B). The first column provides a unique clone identifier, “Clone ID:”, for a cDNA clone related to each contig sequence. The second column provides the sequence identifier, “SEQ ID NO:X”, for each contig sequence. The third column provides a unique contig identifier, “Contig ID:” for each contig sequence. The fourth column, provides a BAC identifier “BAC ID NO:A” for the BAC clone referenced in the corresponding row of the table. The fifth column provides the nucleotide sequence identifier, “SEQ ID NO:B” for a fragment of the BAC clone identified in column four of the corresponding row of the table. The sixth column, “Exon From-To”, provides the location (i.e., nucleotide position numbers) within the polynucleotide sequence of SEQ ID NO:B which delineate certain polynucleotides of the invention that are also exemplary members of polynucleotide sequences that encode polypeptides of the invention (e.g., polypeptides containing amino acid sequences encoded by the polynucleotide sequences delineated in column six, and fragments and variants thereof).

TABLE 1C

| | | | | | |
|---|---|---|---|---|---|
| cDNA | SEQ ID | CONTIG | | SEQ ID | EXON |
| HClone ID | NO: X | ID: | BAC ID: A | NO: B | From-To |

[0118] Tables 1D and 1E: The polynucleotides or polypeptides, or agonists or antagonists of the present invention can be used in assays to test for one or more biological activities. If these polynucleotides and polypeptides do exhibit activity in a particular assay, it is likely that these molecules may be involved in the diseases associated with the biological activity. Thus, the polynucleotides or polypeptides, or agonists or antagonists could be used to treat the associated disease.

[0119] The present invention encompasses methods of detecting, preventing, diagnosing, prognosticating, treating, and/or ameliorating a disease or disorder. In preferred embodiments, the present invention encompasses a method of treating a disease or disorder listed in the “Preferred Indications” columns of Table 1D and Table 1E; comprising administering to a patient (in which such treatment, prevention, or amelioration is desired) a protein, nucleic acid, or antibody of the invention (or fragment or variant thereof) in an amount effective to treat, prevent, diagnose, or ameliorate the disease or disorder. The first and seccond columns of Table 1D show the “Gene No.” and “cDNA Clone ID No.”, respectively, indicating certain nucleic acids and proteins (or antibodies against the same) of the invention (including polynucleotide, polypeptide, and antibody fragments or variants thereof) that may be used in preventing, treating, diagnosing, or ameliorating the disease(s) or disorder(s) indicated in the corresponding row in Column 3 of Table 1D.

[0120] In another embodiment, the present invention also encompasses methods of preventing, treating, diagnosing, or ameliorating a disease or disorder listed in the “Preferred Indications” column of Table 1D and Table 1E; comprising administering to a patient combinations of the proteins, nucleic acids, or antibodies of the invention (or fragments or variants thereof), sharing similar indications as shown in the corresponding rows in Column 3 of Table 1D.

[0121] The “Preferred Indications” columns of Table 1D and Table 1E describe diseases, disorders, and/or conditions that may be treated, prevented, diagnosed, or ameliorated by a protein, nucleic acid, or antibody of the invention (or fragment or variant thereof).

[0122] The recitation of “Cancer” in the “Preferred Indications” columns indicates that the corresponding nucleic acid and protein, or antibody against the same, of the invention (or fragment or variant thereof) may be used for example, to diagnose, treat, prevent, and/or ameliorate diseases and/or disorders relating to neoplastic diseases (e.g., leukemias, cancers, and/or as described below under “Hyperproliferative Disorders”).

[0123] In specific embodiments, a protein, nucleic acid, or antibody of the invention (or fragment or variant thereof) having a “Cancer” recitation in the “Preferred Indication” column of Table 1D may be used for example, to diagnose, treat, prevent, and/or ameliorate a neoplasm located in a tissue selected from the group consisting of: colon, abdomen, bone, breast, digestive system, liver, pancreas, prostate, peritoneum, lung, blood (e.g., leukemia), endocrine glands (adrenal, parathyroid, pituitary, testicles, ovary, thymus, thyroid), uterus, eye, head and neck, nervous (central and peripheral), lymphatic system, pelvic, skin, soft tissue, spleen, thoracic, and urogenital.

[0124] In specific embodiments, a protein, nucleic acid, or antibody of the invention (or fragment or variant thereof) having a “Cancer” recitation in the “Preferred Indication” column of Table 1D, may be used for example, to diagnose, treat, prevent, and/or ameliorate a pre-neoplastic condition, selected from the group consisting of: hyperplasia (e.g., endometrial hyperplasia and/or as described in the section entitled “Hyperproliferative Disorders”), metaplasia (e.g., connective tissue metaplasia, atypical metaplasia, and/or as described in the section entitled “Hyperproliferative Disorders”), and/or dysplasia (e.g., cervical dysplasia, and bronchopulmonary dysplasia).

[0125] In another specific embodiment, a protein, nucleic acid, or antibody of the invention (or fragment or variant thereof) having a “Cancer” recitation in the “Preferred Indication” column of Table 1D, may be used for example, to diagnose, treat, prevent, and/or ameliorate a benign dysproliferative disorder selected from the group consisting of: benign tumors, fibrocystic conditions, tissue hypertrophy, and/or as described in the section entitled “Hyperproliferative Disorders”.

[0126] The recitation of “Immune/Hematopoietic” in the “Preferred Indication” column indicates that the corresponding nucleic acid and protein, or antibody against the same, of the invention (or fragment or variant thereof), may be used for example, to diagnose, treat, prevent, and/or ameliorate diseases and/or disorders relating to neoplastic diseases (e.g., as described below under “Hyperproliferative Disorders”), blood disorders (e.g., as described below under “Immune Activity” “Cardiovascular Disorders” and/or “Blood-Related Disorders”), and infections (e.g., as described below under “Infectious Disease”).

[0127] In specific embodiments, a protein, nucleic acid, or antibody of the invention (or fragment or variant thereof) having the “Immune/Hematopoietic” recitation in the “Preferred Indication” column of Table 1D, may be used for example, to diagnose, treat, prevent, and/or ameliorate a disease or disorder selected from the group consisting of: anemia, pancytopenia, leukopenia, thrombocytopenia, leukemias, Hodgkin's disease, non-Hodgkin's lymphoma, acute lymphocytic anemia (ALL), plasmacytomas, multiple myeloma, Burkitt's lymphoma, arthritis, asthma, AIDS, autoimmune disease, rheumatoid arthritis, granulomatous disease, immune deficiency, inflammatory bowel disease, sepsis, neutropenia, neutrophilia, psoriasis, immune reactions to transplanted organs and tissues, systemic lupus erythematosis, hemophilia, hypercoagulation, diabetes mellitus, endocarditis, meningitis, Lyme Disease, and allergies.

[0128] The recitation of “Reproductive” in the “Preferred Indication” column indicates that the corresponding nucleic acid and protein, or antibody against the same, of the invention (or fragment or variant thereof), may be used for example, to diagnose, treat, prevent, and/or ameliorate diseases and/or disorders relating to neoplastic diseases (e.g., as described below under “Hyperproliferative Disorders”), and disorders of the reproductive system (e.g., as described below under “Reproductive System Disorders”).

[0129] In specific embodiments, a protein, nucleic acid, or antibody of the invention (or fragment or variant thereof) having a “Reproductive” recitation in the “Preferred Indication” column of Table 1D, may be used for example, to diagnose, treat, prevent, and/or ameliorate a disease or disorder selected from the group consisting of: cryptorchism, prostatitis, inguinal hernia, varicocele, leydig cell tumors, verrucous carcinoma, prostatitis, malacoplakia, Peyronie's disease, penile carcinoma, squamous cell hyperplasia, dysmenorrhea, ovarian adenocarcinoma, Turner's syndrome, mucopurulent cervicitis, Sertoli-leydig tumors, ovarian cancer, uterine cancer, pelvic inflammatory disease, testicular cancer, prostate cancer, Klinefelter's syndrome, Young's syndrome, premature ejaculation, diabetes mellitus, cystic fibrosis, Kartagener's syndrome, testicular atrophy, testicular feminization, anorchia, ectopic testis, epididymitis, orchitis, gonorrhea, syphilis, testicular torsion, vasitis nodosa, germ cell tumors, stromal tumors, dysmenorrhea, retroverted uterus, endometriosis, fibroids, adenomyosis, anovulatory bleeding, amenorrhea, Cushing's syndrome, hydatidiform moles, Asherman's syndrome, premature menopause, precocious puberty, uterine polyps, dysfunctional uterine bleeding, cervicitis, chronic cervicitis, mucopurulent cervicitis, cervical dysplasia, cervical polyps, Nabothian cysts, cervical erosion, cervical incompetence, cervical neoplasms, pseudohermaphroditism, and premenstrual syndrome.

[0130] The recitation of “Musculoskeletal” in the “Preferred Indication” column indicates that the corresponding nucleic acid and protein, or antibody against the same, of the invention (or fragment or variant thereof), may be used for example, to diagnose, treat, prevent, and/or ameliorate diseases and/or disorders relating to neoplastic diseases (e.g., as described below under “Hyperproliferative Disorders”), and disorders of the immune system (e.g., as described below under “Immune Activity”).

[0131] In specific embodiments, a protein, nucleic acid, or antibody of the invention (or fragment or variant thereof) having a “Musculoskeletal” recitation in the “Preferred Indication” column of Table 1D, may be used for example, to diagnose, treat, prevent, and/or ameliorate a disease or disorder selected from the group consisting of: bone cancers (e.g., osteochondromas, benign chondromas, chondroblastoma, chondromyxoid fibromas, osteoid osteomas, giant cell tumors, multiple myeloma, osteosarcomas), Paget's Disease, rheumatoid arthritis, systemic lupus erythematosus, osteomyelitis, Lyme Disease, gout, bursitis, tendonitis, osteoporosis, osteoarthritis, muscular dystrophy, mitochondrial myopathy, cachexia, and multiple sclerosis.

[0132] The recitation of “Cardiovascular” in the “Preferred Indication” column indicates that the corresponding nucleic acid and protein, or antibody against the same, of the invention (or fragment or variant thereof), may be used for example, to diagnose, treat, prevent, and/or ameliorate diseases and/or disorders relating to neoplastic diseases (e.g., as described below under “Hyperproliferative Disorders”), and disorders of the cardiovascular system (e.g., as described below under “Cardiovascular Disorders”).

[0133] In specific embodiments, a protein, nucleic acid, or antibody of the invention (or fragment or variant thereof) having a “Cardiovascular” recitation in the “Preferred Indication” column of Table 1D, may be used for example, to diagnose, treat, prevent, and/or ameliorate a disease or disorder selected from the group consisting of: myxomas, fibromas, rhabdomyomas, cardiovascular abnormalities (e.g., congenital heart defects, cerebral arteriovenous malformations, septal defects), heart disease (e.g., heart failure, congestive heart disease, arrhythmia, tachycardia, fibrillation, pericardial Disease, endocarditis), cardiac arrest, heart valve disease (e.g., stenosis, regurgitation, prolapse), vascular disease (e.g., hypertension, coronary artery disease, angina, aneurysm, arteriosclerosis, peripheral vascular disease), hyponatremia, hypematremia, hypokalemia, and hyperkalemia.

[0134] The recitation of “Mixed Fetal” in the “Preferred Indication” column indicates that the corresponding nucleic acid and protein, or antibody against the same, of the invention (or fragment or variant thereof), may be used for example, to diagnose, treat, prevent, and/or ameliorate diseases and/or disorders relating to neoplastic diseases (e.g., as described below under “Hyperproliferative Disorders”).

[0135] In specific embodiments, a protein, nucleic acid, or antibody of the invention (or fragment or variant thereof) having a “Mixed Fetal” recitation in the “Preferred Indication” column of Table 1D, may be used for example, to diagnose, treat, prevent, and/or ameliorate a disease or disorder selected from the group consisting of: spina bifida, hydranencephaly, neurofibromatosis, fetal alcohol syndrome, diabetes mellitus, PKU, Down's syndrome, Patau syndrome, Edwards syndrome, Turner syndrome, Apert syndrome, Carpenter syndrome, Conradi syndrome, Crouzon syndrome, cutis laxa, Cornelia de Lange syndrome, Ellis-van Creveld syndrome, Holt-Oram syndrome, Kartagener syndrome, Meckel-Gruber syndrome, Noonan syndrome, Pallister-Hall syndrome, Rubinstein-Taybi syndrome, Scimitar syndrome, Smith-Lemli-Opitz syndrome, thromocytopenia-absent radius (TAR) syndrome, Treacher Collins syndrome, Williams syndrome, Hirschsprung's disease, Meckel's diverticulum, polycystic kidney disease, Turner's syndrome, and gonadal dysgenesis, Klippel-Feil syndrome, Ostogenesis imperfecta, muscular dystrophy, Tay-Sachs disease, Wilm's tumor, neuroblastoma, and retinoblastoma.

[0136] The recitation of “Excretory” in the “Preferred Indication” column indicates that the corresponding nucleic acid and protein, or antibody against the same, of the invention (or fragment or variant thereof), may be used for example, to diagnose, treat, prevent, and/or ameliorate diseases and/or disorders relating to neoplastic diseases (e.g., as described below under “Hyperproliferative Disorders”) and renal disorders (e.g., as described below under “Renal Disorders”).

[0137] In specific embodiments, a protein, nucleic acid, or antibody of the invention (or fragment or variant thereof) having a “Excretory” recitation in the “Preferred Indication” column of Table 1D, may be used for example, to diagnose, treat, prevent, and/or ameliorate a disease or disorder selected from the group consisting of: bladder cancer, prostate cancer, benign prostatic hyperplasia, bladder disorders (e.g., urinary incontinence, urinary retention, urinary obstruction, urinary tract Infections, interstitial cystitis, prostatitis, neurogenic bladder, hematuria), renal disorders (e.g., hydronephrosis, proteinuria, renal failure, pyelonephritis, urolithiasis, reflux nephropathy, and unilateral obstructive uropathy).

[0138] The recitation of “Neural/Sensory” in the “Preferred Indication” column indicates that the corresponding nucleic acid and protein, or antibody against the same, of the invention (or fragment or variant thereof), may be used for example, to diagnose, treat, prevent, and/or ameliorate diseases and/or disorders relating to neoplastic diseases (e.g., as described below under “Hyperproliferative Disorders”) and diseases or disorders of the nervous system (e.g., as described below under “Neural Activity and Neurological Diseases”).

[0139] In specific embodiments, a protein, nucleic acid, or antibody of the invention (or fragment or variant thereof) having a “Neural/Sensory” recitation in the “Preferred Indication” column of Table 1D, may be used for example, to diagnose, treat, prevent, and/or ameliorate a disease or disorder selected from the group consisting of: brain cancer (e.g., brain stem glioma, brain tumors, central nervous system (Primary) lymphoma, central nervous system lymphoma, cerebellar astrocytoma, and cerebral astrocytoma, neurodegenerative disorders (e.g., Alzheimer's Disease, Creutzfeldt-Jakob Disease, Parkinson's Disease, and Idiopathic Presenile Dementia), encephalomyelitis, cerebral malaria, meningitis, metabolic brain diseases (e.g., phenylketonuria and pyruvate carboxylase deficiency), cerebellar ataxia, ataxia telangiectasia, and AIDS Dementia Complex, schizophrenia, attention deficit disorder, hyperactive attention deficit disorder, autism, and obsessive compulsive disorders.

[0140] The recitation of “Respiratory” in the “Preferred Indication” column indicates that the corresponding nucleic acid and protein, or antibody against the same, of the invention (or fragment or variant thereof), may be used for example, to diagnose, treat, prevent, and/or ameliorate diseases and/or disorders relating to neoplastic diseases (e.g., as described below under “Hyperproliferative Disorders”) and diseases or disorders of the respiratory system (e.g., as described below under “Respiratory Disorders”).

[0141] In specific embodiments, a protein, nucleic acid, or antibody of the invention (or fragment or variant thereof) having a “Respiratory” recitation in the “Preferred Indication” column of Table 1D, may be used for example, to diagnose, treat, prevent, and/or ameliorate a disease or disorder selected from the group consisting of: cancers of the respiratory system such as larynx cancer, pharynx cancer, trachea cancer, epiglottis cancer, lung cancer, squamous cell carcinomas, small cell (oat cell) carcinomas, large cell carcinomas, and adenocarcinomas. Allergic reactions, cystic fibrosis, sarcoidosis, histiocytosis X, infiltrative lung diseases (e.g., pulmonary fibrosis and lymphoid interstitial pneumonia), obstructive airway diseases (e.g., asthma, emphysema, chronic or acute bronchitis), occupational lung diseases (e.g., silicosis and asbestosis), pneumonia, and pleurisy.

[0142] The recitation of “Endocrine” in the “Preferred Indication” column indicates that the corresponding nucleic acid and protein, or antibody against the same, of the invention (or fragment or variant thereof), may be used for example, to diagnose, treat, prevent, and/or ameliorate diseases and/or disorders relating to neoplastic diseases (e.g., as described below under “Hyperproliferative Disorders”) and diseases or disorders of the respiratory system (e.g., as described below under “Respiratory Disorders”), renal disorders (e.g., as described below under “Renal Disorders”), and disorders of the endocrine system (e.g., as described below under “Endocrine Disorders”.

[0143] In specific embodiments, a protein, nucleic acid, or antibody of the invention (or fragment or variant thereof) having an “Endocrine” recitation in the “Preferred Indication” column of Table 1D, may be used for example, to diagnose, treat, prevent, and/or ameliorate a disease or disorder selected from the group consisting of: cancers of endocrine tissues and organs (e.g., cancers of the hypothalamus, pituitary gland, thyroid gland, parathyroid glands, pancreas, adrenal glands, ovaries, and testes), diabetes (e.g., diabetes insipidus, type I and type II diabetes mellitus), obesity, disorders related to pituitary glands (e.g., hyperpituitarism, hypopituitarism, and pituitary dwarfism), hypothyroidism, hyperthyroidism, goiter, reproductive disorders (e.g. male and female infertility), disorders related to adrenal glands (e.g., Addison's Disease, corticosteroid deficiency, and Cushing's Syndrome), kidney cancer (e.g., hypernephroma, transitional cell cancer, and Wilm's tumor), diabetic nephropathy, interstitial nephritis, polycystic kidney disease, glomerulonephritis (e.g., IgM mesangial proliferative glomerulonephritis and glomerulonephritis caused by autoimmune disorders; such as Goodpasture's syndrome), and nephrocalcinosis.

[0144] The recitation of “Digestive” in the “Preferred Indication” column indicates that the corresponding nucleic acid and protein, or antibody against the same, of the invention (or fragment or variant thereof), may be used for example, to diagnose, treat, prevent, and/or ameliorate diseases and/or disorders relating to neoplastic diseases (e.g., as described below under “Hyperproliferative Disorders”) and diseases or disorders of the gastrointestinal system (e.g., as described below under “Gastrointestinal Disorders”.

[0145] In specific embodiments, a protein, nucleic acid, or antibody of the invention (or fragment or variant thereof) having a “Digestive” recitation in the “Preferred Indication” column of Table 1D, may be used for example, to diagnose, treat, prevent, and/or ameliorate a disease or disorder selected from the group consisting of: ulcerative colitis, appendicitis, Crohn's disease, hepatitis, hepatic encephalopathy, portal hypertension, cholelithiasis, cancer of the digestive system (e.g., biliary tract cancer, stomach cancer, colon cancer, gastric cancer, pancreatic cancer, cancer of the bile duct, tumors of the colon (e.g., polyps or cancers), and cirrhosis), pancreatitis, ulcerative disease, pyloric stenosis, gastroenteritis, gastritis, gastric atropy, benign tumors of the duodenum, distension, irritable bowel syndrome, malabsorption, congenital disorders of the small intestine, bacterial and parasitic infection, megacolon, Hirschsprung's disease, aganglionic megacolon, acquired megacolon, colitis, anorectal disorders (e.g., anal fistulas, hemorrhoids), congenital disorders of the liver (e.g., Wilson's disease, hemochromatosis, cystic fibrosis, biliary atresia, and alpha1-antitrypsin deficiency), portal hypertension, cholelithiasis, and jaundice.

[0146] The recitation of “Connective/Epithelial” in the “Preferred Indication” column indicates that the corresponding nucleic acid and protein, or antibody against the same, of the invention (or fragment or variant thereof), may be used for example, to diagnose, treats prevent, and/or ameliorate diseases and/or disorders relating to neoplastic diseases (e.g., as described below under “Hyperproliferative Disorders”), cellular and genetic abnormalities (e.g., as described below under “Diseases at the Cellular Level”), angiogenesis (e.g., as described below under “Anti-Angiogenesis Activity”), and or to promote or inhibit regeneration (e.g., as described below under “Regeneration”), and wound healing (e.g., as described below under “Wound Healing and Epithelial Cell Proliferation”).

[0147] In specific embodiments, a protein, nucleic acid, or antibody of the invention (or fragment or variant thereof) having a “Connective/Epithelial” recitation in the “Preferred Indication” column of Table 1D, may be used for example, to diagnose, treat, prevent, and/or ameliorate a disease or disorder selected from the group consisting of: connective tissue metaplasia, mixed connective tissue disease, focal epithelial hyperplasia, epithelial metaplasia, mucoepithelial dysplasia, graft v. host disease, polymyositis, cystic hyperplasia, cerebral dysplasia, tissue hypertrophy, Alzheimer's disease, lymphoproliferative disorder, Waldenstron's macroglobulinemia, Crohn's disease, pernicious anemia, idiopathic Addison's disease, glomerulonephritis, bullous pemphigoid, Sjogren's syndrome, diabetes mellitus, cystic fibrosis, osteoblastoma, osteoclastoma, osteosarcoma, chondrosarcoma, osteoporosis, osteocarthritis, periodontal disease, wound healing, relapsing polychondritis, vasculitis, polyarteritis nodosa, Wegener's granulomatosis, cellulitis, rheumatoid arthritis, psoriatic arthritis, discoid lupus erythematosus, systemic lupus erythematosus, scleroderma, CREST syndrome, Sjogren's syndrome, polymyositis, dermatomyositis, mixed connective tissue disease, relapsing polychondritis, vasculitis, Henoch-Schonlein syndrome, erythema nodosum, polyarteritis nodosa, temporal (giant cell) arteritis, Takayasu's arteritis, Wegener's granulomatosis, Reiter's syndrome, Behcet's syndrome, ankylosing spondylitis, cellulitis, keloids, Ehler Danlos syndrome, Marfan syndrome, pseudoxantoma elasticum, osteogenese imperfecta, chondrodysplasias, epidermolysis bullosa, Alport syndrome, and cutis laxa.

TABLE 1D

| | cDNA | |
|---|---|---|
| Gene No. | Clone ID | Preferred Indication Identifier |
| 1 | H2CAA74 | Cancer |
| 2 | H2LAD30 | Cancer |
| 3 | H2LAJ93 | Cancer |
| 4 | H2LAO11 | Cancer |
| 5 | H2LBB76 | Cancer |
| 6 | H6AAA32 | Cancer |
| 7 | H6AAA56 | Musculoskeletal, |
| | | Neural/Sensory |
| 8 | H6BSF02 | Cancer |
| 9 | H6EBJ04 | Cancer |
| 10 | H6EDY37 | Immune/Hematopoetic, |
| | | Reproductive |
| 11 | H6EET08 | Cancer |
| 12 | H6EEW21 | Immune/Hematopoetic, |
| | | Reproductive |
| 13 | H6EEX93 | Cancer |
| 14 | HACBW33 | Connective/Epithelial, |
| | | Immune/Hematopoetic, |
| | | Neural/Sensory |
| 15 | HADAM67 | Cancer |
| 16 | HADBF01 | Cancer |
| 17 | HADDD75 | Cancer |
| 18 | HADFW01 | Cancer |
| 19 | HADME20 | Neural/Sensory |
| 20 | HADTC04 | Cancer |
| 21 | HADTH82 | Cancer |
| 22 | HADTM33 | Cancer |
| 23 | HAECA01 | Cancer |
| 24 | HAECD08 | Cancer |
| 25 | HAFAD03 | Cancer |
| 26 | HAFAD39 | Cancer |
| 27 | HAFBF35 | Cancer |
| 28 | HAGBB70 | Cancer |
| 29 | HAGDW09 | Neural/Sensory |
| 30 | HAGEC06 | Cancer |
| 31 | HAGFG63 | Cancer |
| 32 | HAGHD81 | Cancer |
| 33 | HAHCP03 | Cardiovascular, |
| | | Reproductive |
| 34 | HAHCP63 | Cardiovascular |
| 35 | HAHDI13 | Cardiovascular, |
| | | Musculoskeletal |
| 36 | HAHEK68 | Cardiovascular |
| 37 | HAICG02 | Cancer |
| 38 | HAICN34 | Cancer |
| 39 | HAICQ62 | Connective/Epithelial, |
| | | Digestive, |
| | | Immune/Hematopoetic |
| 40 | HAICS58 | Cancer |
| 41 | HAIDB46 | Cancer |
| 42 | HAIEA78 | Cancer |
| 43 | HAIFN31 | Cancer |
| 44 | HAJAH34 | Cancer |
| 45 | HAJAH48 | Immune/Hematopoetic |
| 46 | HAJAN65 | Cancer |
| 47 | HAJAZ16 | Cancer |
| 48 | HAJBQ35 | Cancer |
| 49 | HAJBX74 | Cancer |
| 50 | HAMFC42 | Digestive |
| 51 | HAMFC79 | Excretory, |
| | | Immune/Hematopoetic |
| 52 | HAMHE82 | Cancer |
| 53 | HANKC95 | Musculoskeletal |
| 54 | HAPAT57 | Cancer |
| 55 | HAPAY56 | Excretory, |
| | | Immune/Hematopoetic |
| 56 | HAPBR31 | Cancer |
| 57 | HAPNN78 | Cancer |
| 58 | HAPOF13 | Cancer |
| 59 | HAPOR07 | Cancer |
| 60 | HAPOR40 | Cancer |
| 61 | HAPPX52 | Immune/Hematopoetic, |
| | | Neural/Sensory, |
| | | Reproductive |
| 62 | HAPQT26 | Cancer |
| 63 | HAPQU75 | Digestive |
| 64 | HAPTM16 | Cancer |
| 65 | HAQBH32 | Cancer |
| 66 | HAQNC74 | Cancer |
| 67 | HARMD18 | Cancer |
| 68 | HARMM17 | Cancer |
| 69 | HARNE81 | Cancer |
| 70 | HARNL52 | Connective/Epithelial |
| 71 | HAROG72 | Cancer |
| 72 | HASAB10 | Cancer |
| 73 | HASAW13 | Cancer |
| 74 | HASAZ78 | Cancer |
| 75 | HATBS30 | Cardiovascular, |
| | | Digestive, |
| | | Endocrine |
| 76 | HATCM76 | Cancer |
| 77 | HATCN06 | Cancer |
| 78 | HATCY28 | Cancer |
| 79 | HATCY89 | Cancer |
| 80 | HATDD75 | Cancer |
| 81 | HATXV51 | Cancer |
| 82 | HATZL36 | Cancer |
| 83 | HAUBA08 | Cancer |
| 84 | HAUBY57 | Cancer |
| 85 | HAWAL30 | Cancer |
| 86 | HBAFF09 | Excretory |
| 87 | HBAMD88 | Excretory, |
| | | Immune/Hematopoetic |
| 88 | HBBBD24 | Cancer |
| 89 | HBCCL08 | Cancer |
| 90 | HBCCP82 | Cancer |
| 91 | HBDAC56 | Cancer |
| 92 | HBGMU18 | Reproductive |
| 93 | HBGNE21 | Cancer |
| 94 | HBIAI23 | Cancer |
| 95 | HBIAO59 | Digestive, |
| | | Immune/Hematopoetic, |
| | | Neural/Sensory |
| 96 | HBIAQ68 | Cancer |
| 97 | HBICD95 | Cancer |
| 98 | HBICV28 | Cancer |
| 99 | HBIMC22 | Cancer |
| 100 | HBIMC31 | Cancer |
| 101 | HBINX68 | Cancer |
| 102 | HBJAY39 | Cancer |
| 103 | HBJEA60 | Immune/Hematopoetic |
| 104 | HBJEL88 | Cancer |
| 105 | HBJFE78 | Cancer |
| 106 | HBJFH78 | Cancer |
| 107 | HBJFR76 | Immune/Hematopoetic |
| 108 | HBJFV66 | Immune/Hematopoetic |
| 109 | HBJLC76 | Immune/Hematopoetic |
| 110 | HBJMM42 | Cancer |
| 111 | HBMBJ94 | Digestive, |
| | | Immune/Hematopoetic |
| 112 | HBMBX59 | Immune/Hematopoetic, |
| | | Reproductive |
| 113 | HBMCP89 | Cancer |
| 114 | HBMDA33 | Immune/Hematopoetic, |
| | | Mixed Fetal, |
| | | Musculoskeletal |
| 115 | HBMDH62 | Immune/Hematopoetic |
| 116 | HBMSH54 | Cancer |
| 117 | HBMTO47 | Cancer |
| 118 | HBMTO73 | Cancer |
| 119 | HBMUP58 | Cancer |
| 120 | HBMVM77 | Cancer |
| 121 | HBMXI35 | Excretory, |
| | | Immune/Hematopoetic, |
| | | Neural/Sensory |
| 122 | HBNAC77 | Cancer |
| 123 | HBNAT95 | Cancer |
| 124 | HBNAU60 | Cancer |
| 125 | HBOAC92 | Cancer |
| 126 | HBOAD40 | Cancer |
| 127 | HBODS50 | Immune/Hematopoetic |
| 128 | HBSAM76 | Cancer |
| 129 | HBWCC82 | Cancer |
| 130 | HBXCU89 | Cancer |
| 131 | HCBAB44 | Connective/Epithelial, |
| | | Reproductive |
| 132 | HCBNX63 | Mixed Fetal, |
| | | Reproductive |
| 133 | HCBOG68 | Digestive, |
| | | Reproductive |
| 134 | HCDAK53 | Excretory, |
| | | Musculoskeletal |
| 135 | HCDCT09 | Cancer |
| 136 | HCDEG06 | Cancer |
| 137 | HCE1K47 | Cancer |
| 138 | HCE2W19 | Cancer |
| 139 | HCE3K53 | Immune/Hematopoetic, |
| | | Mixed Fetal, |
| | | Neural/Sensory |
| 140 | HCE3R37 | Cancer |
| 141 | HCE4V50 | Cancer |
| 142 | HCE4X78 | Cancer |
| 143 | HCE5F84 | Cancer |
| 144 | HCE5J89 | Immune/Hematopoetic, |
| | | Neural/Sensory |
| 145 | HCEBF72 | Cancer |
| 146 | HCEBJ24 | Cancer |
| 147 | HCEEF28 | Immune/Hematopoetic, |
| | | Mixed Fetal, |
| | | Neural/Sensory |
| 148 | HCEEL63 | Neural/Sensory |
| 149 | HCEEN95 | Cancer |
| 150 | HCEES04 | Neural/Sensory, |
| | | Reproductive |
| 151 | HCEIQ29 | Cancer |
| 152 | HCEIQ32 | Neural/Sensory |
| 153 | HCEJK74 | Cancer |
| 154 | HCEMY05 | Digestive, |
| | | Neural/Sensory |
| 155 | HCEMZ30 | Cancer |
| 156 | HCEOU19 | Digestive, |
| | | Musculoskeletal, |
| | | Neural/Sensory |
| 157 | HCEPT74 | Mixed Fetal, |
| | | Neural/Sensory, |
| | | Reproductive |
| 158 | HCEVF81 | Cancer |
| 159 | HCFBC35 | Immune/Hematopoetic, |
| | | Reproductive |
| 160 | HCFBX82 | Immune/Hematopoetic |
| 161 | HCFLF29 | Cancer |
| 162 | HCFLF80 | Cancer |
| 163 | HCFMS23 | Cancer |
| 164 | HCGLB30 | Cancer |
| 165 | HCGMF25 | Cancer |
| 166 | HCGMI73 | Cancer |
| 167 | HCHNV36 | Cancer |
| 168 | HCHPG18 | Cancer |
| 169 | HCNCA73 | Digestive, |
| | | Neural/Sensory |
| 170 | HCNCU05 | Digestive, |
| | | Neural/Sensory |
| 171 | HCNSD81 | Digestive |
| 172 | HCNSG31 | Cancer |
| 173 | HCNSM85 | Digestive |
| 174 | HCOKD57 | Cancer |
| 175 | HCQAJ72 | Cancer |
| 176 | HCQAS17 | Digestive, |
| | | Mixed Fetal, |
| | | Reproductive |
| 177 | HCRAZ77 | Cancer |
| 178 | HCROA74 | Cancer |
| 179 | HCSRA90 | Cancer |
| 180 | HCUBG09 | Cancer |
| 181 | HCUBQ64 | Immune/Hematopoetic, |
| | | Mixed Fetal |
| 182 | HCUCH29 | Immune/Hematopoetic |
| 183 | HCUFI27 | Immune/Hematopoetic |
| 184 | HCUGE96 | Immune/Hematopoetic |
| 185 | HCUHF41 | Immune/Hematopoetic |
| 186 | HCWDZ36 | Immune/Hematopoetic |
| 187 | HCWEA37 | Immune/Hematopoetic |
| 188 | HCWGD32 | Immune/Hematopoetic, |
| | | Reproductive |
| 189 | HDFUB43 | Cancer |
| 190 | HDHEA83 | Cancer |
| 191 | HDHIA88 | Excretory, |
| | | Mixed Fetal, |
| | | Neural/Sensory |
| 192 | HDHMB78 | Cancer |
| 193 | HDLAA94 | Immune/Hematopoetic, |
| | | Reproductive |
| 194 | HDLKY77 | Cancer |
| 195 | HDLMD37 | Cancer |
| 196 | HDPAE25 | Cancer |
| 197 | HDPBB91 | Cancer |
| 198 | HDPBJ28 | Cancer |
| 199 | HDPBW46 | Cancer |
| 200 | HDPCG15 | Digestive, |
| | | Immune/Hematopoetic, |
| | | Reproductive |
| 201 | HDPCK70 | Cancer |
| 202 | HDPCM18 | Cancer |
| 203 | HDPCO72 | Immune/Hematopoetic |
| 204 | HDPCX78 | Cancer |
| 205 | HDPDA54 | Cancer |
| 206 | HDPDG06 | Cancer |
| 207 | HDPDH32 | Immune/Hematopoetic |
| 208 | HDPDI53 | Cancer |
| 209 | HDPFB62 | Cancer |
| 210 | HDPFE27 | Immune/Hematopoetic, |
| | | Neural/Sensory |
| 211 | HDPFL58 | Cancer |
| 212 | HDPFM14 | Cancer |
| 213 | HDPFM56 | Cancer |
| 214 | HDPFQ90 | Cancer |
| 215 | HDPFT72 | Immune/Hematopoetic |
| 216 | HDPFW89 | Cancer |
| 217 | HDPGA83 | Immune/Hematopoetic |
| 218 | HDPGB92 | Cancer |
| 219 | HDPGE45 | Cancer |
| 220 | HDPGJ44 | Cancer |
| 221 | HDPGJ81 | Cancer |
| 222 | HDPGP45 | Cancer |
| 223 | HDPGX82 | Cancer |
| 224 | HDPHB28 | Cancer |
| 225 | HDPHG50 | Digestive, |
| | | Immune/Hematopoetic, |
| | | Neural/Sensory |
| 226 | HDPHH36 | Digestive, |
| | | Immune/Hematopoetic |
| 227 | HDPHI38 | Cancer |
| 228 | HDPIC58 | Cancer |
| 229 | HDPIE13 | Cancer |
| 230 | HDPIE88 | Digestive, |
| | | Immune/Hematopoetic, |
| | | Reproductive |
| 231 | HDPIK17 | Cancer |
| 232 | HDPIM90 | Cancer |
| 233 | HDPIQ23 | Cancer |
| 234 | HDPIQ67 | Cancer |
| 235 | HDPIX68 | Immune/Hematopoetic, |
| | | Neural/Sensory |
| 236 | HDPJG92 | Immune/Hematopoetic |
| 237 | HDPJN03 | Cancer |
| 238 | HDPJO39 | Cancer |
| 239 | HDPJP62 | Digestive, |
| | | Immune/Hematopoetic, |
| | | Reproductive |
| 240 | HDPJR17 | Immune/Hematopoetic, |
| | | Neural/Sensory |
| 241 | HDPJR93 | Immune/Hematopoetic, |
| | | Reproductive |
| 242 | HDPJS89 | Cancer |
| 243 | HDPJT39 | Digestive, |
| | | Immune/Hematopoetic, |
| | | Reproductive |
| 244 | HDPJT55 | Immune/Hematopoetic |
| 245 | HDPJT84 | Cancer |
| 246 | HDPJU89 | Cancer |
| 247 | HDPJV72 | Digestive, |
| | | Immune/Hematopoetic, |
| | | Reproductive |
| 248 | HDPKI36 | Cancer |
| 249 | HDPMA12 | Cancer |
| 250 | HDPMB23 | Cancer |
| 251 | HDPME88 | Immune/Hematopoetic |
| 252 | HDPMG63 | Cancer |
| 253 | HDPMH30 | Cancer |
| 254 | HDPMM34 | Cancer |
| 255 | HDPMM85 | Cancer |
| 256 | HDPMQ60 | Cancer |
| 257 | HDPMQ82 | Connective/Epithelial, |
| | | Immune/Hematopoetic |
| 258 | HDPMX96 | Cancer |
| 259 | HDPNA15 | Immune/Hematopoetic, |
| | | Reproductive |
| 260 | HDPNB03 | Cancer |
| 261 | HDPNB04 | Cancer |
| 262 | HDPNB09 | Cancer |
| 263 | HDPOD52 | Immune/Hematopoetic |
| 264 | HDPOL27 | Cancer |
| 265 | HDPOL88 | Cancer |
| 266 | HDPOP47 | Cancer |
| 267 | HDPPD79 | Cancer |
| 268 | HDPPJ57 | Cancer |
| 269 | HDPPL29 | Cancer |
| 270 | HDPPN68 | Cancer |
| 271 | HDPSF10 | Cancer |
| 272 | HDPSI40 | Cancer |
| 273 | HDPSN14 | Immune/Hematopoetic, |
| | | Reproductive |
| 274 | HDPUI61 | Cancer |
| 275 | HDPUQ06 | Cancer |
| 276 | HDPVF03 | Cancer |
| 277 | HDPVR96 | Cancer |
| 278 | HDPVX93 | Cancer |
| 279 | HDPWA19 | Cancer |
| 280 | HDPWU54 | Cancer |
| 281 | HDPWX42 | Cancer |
| 282 | HDPXA35 | Cancer |
| 283 | HDPXQ78 | Cancer |
| 284 | HDPXV70 | Cancer |
| 285 | HDPYE03 | Cancer |
| 286 | HDQPL92 | Cancer |
| 287 | HDSAL59 | Cancer |
| 288 | HDSAN43 | Cancer |
| 289 | HDSIX56 | Immune/Hematopoetic |
| 290 | HDTAI21 | Cancer |
| 291 | HDTAL71 | Cancer |
| 292 | HDTAN09 | Cancer |
| 293 | HDTAZ44 | Immune/Hematopoetic, |
| | | Neural/Sensory, |
| | | Reproductive |
| 294 | HDTBM43 | Cancer |
| 295 | HDTBO86 | Immune/Hematopoetic |
| 296 | HDTBT50 | Cancer |
| 297 | HDTBV91 | Cancer |
| 298 | HDTBX04 | Cancer |
| 299 | HDTDI44 | Immune/Hematopoetic |
| 300 | HDTDR12 | Cancer |
| 301 | HDTDS40 | Immune/Hematopoetic |
| 302 | HDTDT73 | Cancer |
| 303 | HDTEH74 | Cancer |
| 304 | HDTEJ01 | Cancer |
| 305 | HDTFM54 | Cancer |
| 306 | HDTGI75 | Immune/Hematopoetic |
| 307 | HDTLS78 | Cancer |
| 308 | HE2BC57 | Cancer |
| 309 | HE2FB72 | Cancer |
| 310 | HE2FQ55 | Cancer |
| 311 | HE2JZ78 | Mixed Fetal |
| 312 | HE2RX32 | Cancer |
| 313 | HE6CO85 | Immune/Hematopoetic, |
| | | Mixed Fetal |
| 314 | HE6CR19 | Cancer |
| 315 | HE6GI53 | Cancer |
| 316 | HE6GR29 | Cancer |
| 317 | HE8AE45 | Cancer |
| 318 | HE8AP31 | Cancer |
| 319 | HE8CX56 | Cancer |
| 320 | HE8TB44 | Mixed Fetal |
| 321 | HE9BK24 | Cancer |
| 322 | HE9CR57 | Cancer |
| 323 | HE9DS56 | Cancer |
| 324 | HE9ED79 | Cancer |
| 325 | HE9FX37 | Cancer |
| 326 | HE9MA82 | Cancer |
| 327 | HE9ME29 | Cancer |
| 328 | HE9OW91 | Cancer |
| 329 | HE9PT66 | Cancer |
| 330 | HE9RN08 | Cancer |
| 331 | HE9SB80 | Cancer |
| 332 | HEAAA52 | Cancer |
| 333 | HEBBC80 | Cancer |
| 334 | HEBBE93 | Immune/Hematopoetic, |
| | | Mixed Fetal, |
| | | Neural/Sensory |
| 335 | HEBBO59 | Cancer |
| 336 | HEBCI67 | Excretory, |
| | | Neural/Sensory |
| 337 | HEEAF81 | Cancer |
| 338 | HEEBF87 | Reproductive |
| 339 | HEEBZ95 | Cancer |
| 340 | HEGAG41 | Cancer |
| 341 | HEGAI67 | Cancer |
| 342 | HEGBA25 | Immune/Hematopoetic, |
| | | Reproductive |
| 343 | HELAU79 | Cancer |
| 344 | HELBM86 | Cardiovascular, |
| | | Immune/Hematopoetic |
| 345 | HELBS34 | Cancer |
| 346 | HELDD51 | Cardiovascular, |
| | | Immune/Hematopoetic |
| 347 | HELDI06 | Cancer |
| 348 | HELDS18 | Cancer |
| 349 | HELDX09 | Cancer |
| 350 | HELFG13 | Cancer |
| 351 | HELFN75 | Cardiovascular |
| 352 | HELGH89 | Cardiovascular |
| 353 | HELGO68 | Cancer |
| 354 | HEMAH05 | Cancer |
| 355 | HEMBU24 | Cancer |
| 356 | HEMCZ56 | Cancer |
| 357 | HEMDG72 | Cancer |
| 358 | HEMEM04 | Cancer |
| 359 | HEMEM90 | Cancer |
| 360 | HEMEV69 | Cancer |
| 361 | HEMFB19 | Cancer |
| 362 | HEMGE83 | Cancer |
| 363 | HEMGL27 | Cancer |
| 364 | HEOMC20 | Cardiovascular, |
| | | Connective/Epithelial, |
| | | Immune/Hematopoetic |
| 365 | HEOMY46 | Cancer |
| 366 | HEONN73 | Cancer |
| 367 | HEOQJ36 | Cancer |
| 368 | HEQAD60 | Cancer |
| 369 | HEQCB67 | Cancer |
| 370 | HERAH81 | Cancer |
| 371 | HETAB53 | Cancer |
| 372 | HETAQ37 | Cancer |
| 373 | HETBI87 | Reproductive |
| 374 | HETBM96 | Cardiovascular, |
| | | Digestive, |
| | | Reproductive |
| 375 | HETBW05 | Digestive, |
| | | Reproductive |
| 376 | HETBY74 | Cancer |
| 377 | HETDV07 | Cancer |
| 378 | HETDV80 | Cancer |
| 379 | HETDW91 | Cancer |
| 380 | HETEY24 | Cancer |
| 381 | HETEZ10 | Cancer |
| 382 | HETFL66 | Excretory, |
| | | Reproductive, |
| | | Respiratory |
| 383 | HETFN79 | Cancer |
| 384 | HETFO52 | Neural/Sensory, |
| | | Reproductive |
| 385 | HETFZ19 | Cancer |
| 386 | HETGJ67 | Cancer |
| 387 | HETHC14 | Cancer |
| 388 | HETHU59 | Cancer |
| 389 | HETJP64 | Neural/Sensory, |
| | | Reproductive |
| 390 | HETLG39 | Cancer |
| 391 | HFAAD55 | Neural/Sensory |
| 392 | HFCAE62 | Cancer |
| 393 | HFCAU91 | Cancer |
| 394 | HFCBQ52 | Cancer |
| 395 | HFCDT71 | Cancer |
| 396 | HFCET92 | Cancer |
| 397 | HFCFK63 | Cancer |
| 398 | HFEAJ78 | Connective/Epithelial |
| 399 | HFGAD75 | Cancer |
| 400 | HFGAK75 | Cancer |
| 401 | HFGAN83 | Cancer |
| 402 | HFHML93 | Cancer |
| 403 | HFIIJ14 | Musculoskeletal |
| 404 | HFIUR38 | Cancer |
| 405 | HFIXO59 | Immune/Hematopoetic, |
| | | Musculoskeletal, |
| | | Reproductive |
| 406 | HFIYU71 | Cancer |
| 407 | HFIYX91 | Cancer |
| 408 | HFKCU96 | Cancer |
| 409 | HFKEY48 | Cancer |
| 410 | HFKHF53 | Cancer |
| 411 | HFLQB16 | Cancer |
| 412 | HFLQF57 | Digestive, |
| | | Immune/Hematopoetic, |
| | | Neural/Sensory |
| 413 | HFLVH45 | Cancer |
| 414 | HFPBX96 | Cancer |
| 415 | HFPCK81 | Mixed Fetal, |
| | | Neural/Sensory |
| 416 | HFPCT72 | Cancer |
| 417 | HFPCY75 | Cancer |
| 418 | HFPDE94 | Neural/Sensory |
| 419 | HFPDM88 | Cancer |
| 420 | HFPDP36 | Neural/Sensory |
| 421 | HFPEF23 | Cancer |
| 422 | HFPEI42 | Musculoskeletal, |
| | | Neural/Sensory |
| 423 | HFPET44 | Neural/Sensory |
| 424 | HFRAB26 | Cancer |
| 425 | HFRAN15 | Immune/Hematopoetic, |
| | | Neural/Sensory |
| 426 | HFSAG79 | Cancer |
| 427 | HFTAM22 | Cancer |
| 428 | HFTAR44 | Neural/Sensory |
| 429 | HFTBR48 | Cancer |
| 430 | HFTCF50 | Cancer |
| 431 | HFTDO52 | Cancer |
| 432 | HFVGD02 | Cancer |
| 433 | HFVGS85 | Cancer |
| 434 | HFVHA83 | Digestive, |
| | | Immune/Hematopoetic, |
| | | Mixed Fetal |
| 435 | HFVHI18 | Cancer |
| 436 | HFVHU04 | Cancer |
| 437 | HFVIC71 | Cancer |
| 438 | HFVKE81 | Digestive |
| 439 | HFXDA35 | Neural/Sensory |
| 440 | HFXDI69 | Neural/Sensory |
| 441 | HFXDL48 | Cardiovascular, |
| | | Neural/Sensory |
| 442 | HFXDS94 | Cancer |
| 443 | HFXGW33 | Cancer |
| 444 | HFXHC07 | Immune/Hematopoetic, |
| | | Neural/Sensory |
| 445 | HFXJP76 | Cancer |
| 446 | HFXJX05 | Cancer |
| 447 | HFXKR35 | Cancer |
| 448 | HFXKW94 | Cancer |
| 449 | HFXKY36 | Cancer |
| 450 | HFXLF67 | Neural/Sensory |
| 451 | HGBAA42 | Cancer |
| 452 | HGBBS31 | Digestive |
| 453 | HGCMD20 | Cancer |
| 454 | HGCOA84 | Cancer |
| 455 | HGCOP28 | Cancer |
| 456 | HHANZ04 | Cancer |
| 457 | HHBEF22 | Cancer |
| 458 | HHEAC92 | Cancer |
| 459 | HHEAG19 | Cancer |
| 460 | HHEAO28 | Digestive, |
| | | Immune/Hematopoetic |
| 461 | HHECF89 | Cancer |
| 462 | HHECG92 | Immune/Hematopoetic, |
| | | Reproductive |
| 463 | HHECK30 | Cancer |
| 464 | HHECX43 | Immune/Hematopoetic, |
| | | Reproductive |
| 465 | HHECZ24 | Immune/Hematopoetic, |
| | | Neural/Sensory, |
| | | Reproductive |
| 466 | HHEDB73 | Cardiovascular, |
| | | Connective/Epithelial, |
| | | Immune/Hematopoetic |
| 467 | HHEDD30 | Immune/Hematopoetic |
| 468 | HHEDG22 | Cancer |
| 469 | HHEDH59 | Cancer |
| 470 | HHEDI52 | Immune/Hematopoetic |
| 471 | HHEDL83 | Cancer |
| 472 | HHEMB01 | Cancer |
| 473 | HHEMB73 | Cancer |
| 474 | HHEME31 | Cancer |
| 475 | HHEMH07 | Cancer |
| 476 | HHEMP65 | Immune/Hematopoetic |
| 477 | HHENH26 | Cancer |
| 478 | HHENK68 | Cancer |
| 479 | HHENV25 | Immune/Hematopoetic, |
| | | Reproductive, |
| | | Respiratory |
| 480 | HHEOK44 | Cancer |
| 481 | HHEOY15 | Cancer |
| 482 | HHEPE70 | Cancer |
| 483 | HHEPH19 | Cancer |
| 484 | HHEPS33 | Cancer |
| 485 | HHEPT06 | Cancer |
| 486 | HHESL71 | Immune/Hematopoetic |
| 487 | HHFBT80 | Cancer |
| 488 | HHFFK18 | Cancer |
| 489 | HHFFQ13 | Cancer |
| 490 | HHFFQ25 | Cancer |
| 491 | HHFFW36 | Cancer |
| 492 | HHFGP69 | Cardiovascular, |
| | | Immune/Hematopoetic |
| 493 | HHFGV11 | Cancer |
| 494 | HHFHF26 | Cancer |
| 495 | HHFHG78 | Cancer |
| 496 | HHFHP94 | Cancer |
| 497 | HHFLG27 | Cancer |
| 498 | HHFMY72 | Cancer |
| 499 | HHGAP04 | Reproductive |
| 500 | HHGAP73 | Cancer |
| 501 | HHGBW34 | Cancer |
| 502 | HHGCE42 | Immune/Hematopoetic |
| 503 | HHGCX50 | Cancer |
| 504 | HHGDA21 | Cancer |
| 505 | HHGDC84 | Cancer |
| 506 | HHGDU04 | Cancer |
| 507 | HHPBH52 | Cancer |
| 508 | HHPCE76 | Cancer |
| 509 | HHPCN64 | Cancer |
| 510 | HHPFJ23 | Neural/Sensory |
| 511 | HHPGE19 | Cancer |
| 512 | HHPSF10 | Cancer |
| 513 | HHSAA32 | Cancer |
| 514 | HHSAO54 | Musculoskeletal, |
| | | Neural/Sensory, |
| | | Reproductive |
| 515 | HHSBL18 | Cancer |
| 516 | HHSDQ09 | Neural/Sensory |
| 517 | HHSDQ41 | Cancer |
| 518 | HHSDW43 | Mixed Fetal, |
| | | Neural/Sensory |
| 519 | HHSDZ57 | Cancer |
| 520 | HHTLG27 | Cancer |
| 521 | HIASB51 | Cancer |
| 522 | HIATO45 | Endocrine |
| 523 | HIBEF51 | Cancer |
| 524 | HIBEV58 | Cancer |
| 525 | HILBN78 | Digestive, |
| | | Immune/Hematopoetic, |
| | | Reproductive |
| 526 | HISCJ93 | Digestive |
| 527 | HISFV70 | Cardiovascular, |
| | | Digestive, |
| | | Immune/Hematopoetic |
| 528 | HJABF15 | Immune/Hematopoetic |
| 529 | HJABY05 | Cancer |
| 530 | HJBCI01 | Cancer |
| 531 | HJBDE52 | Cancer |
| 532 | HJMAM25 | Cancer |
| 533 | HJMAP02 | Immune/Hematopoetic, |
| | | Reproductive |
| 534 | HJMAR06 | Cancer |
| 535 | HJMBK21 | Cancer |
| 536 | HJMBV52 | Cancer |
| 537 | HKAAF77 | Cancer |
| 538 | HKAAV24 | Cancer |
| 539 | HKAAV85 | Cancer |
| 540 | HKABA32 | Connective/Epithelial |
| 541 | HKABL60 | Connective/Epithelial |
| 542 | HKABO35 | Cancer |
| 543 | HKABQ44 | Cancer |
| 544 | HKABQ53 | Cancer |
| 545 | HKABR62 | Connective/Epithelial |
| 546 | HKACK33 | Cancer |
| 547 | HKACL61 | Connective/Epithelial, |
| | | Immune/Hematopoetic, |
| | | Neural/Sensory |
| 548 | HKACS10 | Cancer |
| 549 | HKACV34 | Connective/Epithelial, |
| | | Reproductive |
| 550 | HKACZ22 | Connective/Epithelial |
| 551 | HKADC78 | Connective/Epithelial, |
| | | Immune/Hematopoetic |
| 552 | HKADO26 | Cancer |
| 553 | HKADR76 | Cancer |
| 554 | HKAEF92 | Cancer |
| 555 | HKAEG96 | Cancer |
| 556 | HKAEK16 | Cancer |
| 557 | HKAEL78 | Cancer |
| 558 | HKAEP25 | Cancer |
| 559 | HKAEQ49 | Cancer |
| 560 | HKAEU63 | Cancer |
| 561 | HKAFK06 | Connective/Epithelial |
| 562 | HKAFX34 | Cardiovascular, |
| | | Connective/Epithelial |
| 563 | HKAHE94 | Cancer |
| 564 | HKAOC78 | Cancer |
| 565 | HKAPI15 | Connective/Epithelial |
| 566 | HKAPS33 | Connective/Epithelial, |
| | | Digestive, |
| | | Reproductive |
| 567 | HKATA56 | Connective/Epithelial, |
| | | Reproductive |
| 568 | HKDBI48 | Cancer |
| 569 | HKGCD89 | Cancer |
| 570 | HKGDF77 | Musculoskeletal |
| 571 | HKGDP17 | Respiratory |
| 572 | HKIXK47 | Excretory, |
| | | Immune/Hematopoetic, |
| | | Reproductive |
| 573 | HKIXK55 | Cancer |
| 574 | HKIXR69 | Cancer |
| 575 | HKMMQ73 | Digestive, |
| | | Excretory |
| 576 | HKPMA52 | Cancer |
| 577 | HL3AE59 | Cancer |
| 578 | HLAAA22 | Cancer |
| 579 | HLBDB72 | Immune/Hematopoetic |
| 580 | HLDAE65 | Cancer |
| 581 | HLDBR58 | Digestive, |
| | | Immune/Hematopoetic, |
| | | Reproductive |
| 582 | HLDBS03 | Cancer |
| 583 | HLDBS56 | Cancer |
| 584 | HLDBX26 | Cancer |
| 585 | HLDBZ30 | Cancer |
| 586 | HLDCD14 | Cancer |
| 587 | HLDCE43 | Digestive |
| 588 | HLDCE82 | Cancer |
| 589 | HLDCG34 | Cancer |
| 590 | HLDCI94 | Cancer |
| 591 | HLDCJ17 | Cancer |
| 592 | HLDNC59 | Cancer |
| 593 | HLDND56 | Cancer |
| 594 | HLDNJ21 | Cancer |
| 595 | HLDNY69 | Digestive, |
| | | Immune/Hematopoetic, |
| | | Mixed Fetal |
| 596 | HLDOF77 | Digestive, |
| | | Immune/Hematopoetic, |
| | | Mixed Fetal |
| 597 | HLDOS43 | Digestive |
| 598 | HLDOT61 | Cancer |
| 599 | HLDOU18 | Digestive |
| 600 | HLDQZ35 | Cancer |
| 601 | HLHCL09 | Cancer |
| 602 | HLHCQ71 | Cancer |
| 603 | HLHCT59 | Respiratory |
| 604 | HLHDC84 | Cancer |
| 605 | HLHDQ75 | Cancer |
| 606 | HLHDT20 | Cancer |
| 607 | HLHEM04 | Cancer |
| 608 | HLHGG25 | Cancer |
| 609 | HLHSI20 | Cancer |
| 610 | HLHTJ21 | Cancer |
| 611 | HLIBB18 | Digestive |
| 612 | HLICJ24 | Cancer |
| 613 | HLJBD54 | Cancer |
| 614 | HLJBF04 | Cancer |
| 615 | HLJDL61 | Cancer |
| 616 | HLJDO10 | Respiratory |
| 617 | HLJDP21 | Cancer |
| 618 | HLJDQ62 | Cancer |
| 619 | HLJDU93 | Cancer |
| 620 | HLJDW29 | Cancer |
| 621 | HLJEE04 | Cancer |
| 622 | HLMCT69 | Immune/Hematopoetic, |
| | | Musculoskeletal |
| 623 | HLMDX11 | Cancer |
| 624 | HLMFH40 | Cancer |
| 625 | HLMME92 | Immune/Hematopoetic |
| 626 | HLMMK61 | Immune/Hematopoetic |
| 627 | HLNAB24 | Immune/Hematopoetic |
| 628 | HLQBS59 | Digestive |
| 629 | HLQDH74 | Cancer |
| 630 | HLQFB12 | Digestive, |
| | | Reproductive |
| 631 | HLTAZ07 | Cancer |
| 632 | HLTBT71 | Cancer |
| 633 | HLWAI28 | Cancer |
| 634 | HLWAJ63 | Cancer |
| 635 | HLWAS58 | Cancer |
| 636 | HLWAZ63 | Reproductive |
| 637 | HLWBD62 | Digestive, |
| | | Excretory, |
| | | Reproductive |
| 638 | HLWBF60 | Cancer |
| 639 | HLWBJ29 | Cancer |
| 640 | HLWBK48 | Cancer |
| 641 | HLWBO56 | Cancer |
| 642 | HLWBT34 | Cancer |
| 643 | HLYAU85 | Cancer |
| 644 | HLYBX88 | Cancer |
| 645 | HLYCE43 | Immune/Hematopoetic |
| 646 | HMABH07 | Cancer |
| 647 | HMACM80 | Cancer |
| 648 | HMADA28 | Cancer |
| 649 | HMADJ02 | Cancer |
| 650 | HMADL56 | Cancer |
| 651 | HMADS45 | Cancer |
| 652 | HMADT55 | Immune/Hematopoetic, |
| | | Musculoskeletal |
| 653 | HMAEL43 | Cancer |
| 654 | HMAFF91 | Cancer |
| 655 | HMAFK79 | Cancer |
| 656 | HMAGC59 | Cancer |
| 657 | HMAGF64 | Immune/Hematopoetic |
| 658 | HMAGK51 | Cancer |
| 659 | HMAGM33 | Cancer |
| 660 | HMAIP66 | Cancer |
| 661 | HMAKA11 | Immune/Hematopoetic |
| 662 | HMCAS66 | Cancer |
| 663 | HMCBP63 | Cancer |
| 664 | HMCBY59 | Cancer |
| 665 | HMCDA67 | Immune/Hematopoetic |
| 666 | HMCDH54 | Cancer |
| 667 | HMCDK83 | Cancer |
| 668 | HMCFW10 | Immune/Hematopoetic |
| 669 | HMCGS15 | Cancer |
| 670 | HMDAO40 | Cancer |
| 671 | HMEBH24 | Cancer |
| 672 | HMECD49 | Cardiovascular, |
| | | Immune/Hematopoetic |
| 673 | HMEFF86 | Cancer |
| 674 | HMEFX42 | Cancer |
| 675 | HMEIP22 | Cardiovascular |
| 676 | HMEIP65 | Cancer |
| 677 | HMEJG02 | Cancer |
| 678 | HMEJJ55 | Cancer |
| 679 | HMEKS05 | Cancer |
| 680 | HMEKV69 | Cancer |
| 681 | HMELK96 | Cancer |
| 682 | HMGBT84 | Cancer |
| 683 | HMIAH29 | Cancer |
| 684 | HMIBK36 | Excretory, |
| | | Immune/Hematopoetic, |
| | | Neural/Sensory |
| 685 | HMICQ96 | Neural/Sensory |
| 686 | HMJAA51 | Cancer |
| 687 | HMJAF25 | Digestive, |
| | | Neural/Sensory |
| 688 | HMKAQ40 | Cancer |
| 689 | HMPAP73 | Immune/Hematopoetic |
| 690 | HMPTG11 | Cancer |
| 691 | HMQAG33 | Immune/Hematopoetic |
| 692 | HMQAP49 | Cancer |
| 693 | HMQBM23 | Cancer |
| 694 | HMQBR31 | Cardiovascular, |
| | | Immune/Hematopoetic, |
| | | Musculoskeletal |
| 695 | HMQCD14 | Digestive, |
| | | Immune/Hematopoetic |
| 696 | HMQCV13 | Immune/Hematopoetic |
| 697 | HMQCY52 | Cancer |
| 698 | HMQDP29 | Cancer |
| 699 | HMSER17 | Cardiovascular, |
| | | Immune/Hematopoetic |
| 700 | HMSFW68 | Digestive, |
| | | Immune/Hematopoetic |
| 701 | HMSIA55 | Cancer |
| 702 | HMSIB42 | Cancer |
| 703 | HMSJD91 | Cancer |
| 704 | HMSJL15 | Immune/Hematopoetic |
| 705 | HMSJV30 | Cancer |
| 706 | HMSKA95 | Cancer |
| 707 | HMTAE36 | Cancer |
| 708 | HMTBL57 | Cancer |
| 709 | HMUDN51 | Cancer |
| 710 | HMWBT75 | Immune/Hematopoetic |
| 711 | HMWDB84 | Cancer |
| 712 | HMWEA30 | Cancer |
| 713 | HMWGP54 | Cancer |
| 714 | HMWGQ48 | Immune/Hematopoetic |
| 715 | HMWGU44 | Cancer |
| 716 | HMWHG62 | Cancer |
| 717 | HMWHG68 | Cancer |
| 718 | HMWIM12 | Digestive, |
| | | Immune/Hematopoetic, |
| | | Reproductive |
| 719 | HNBUH70 | Digestive, |
| | | Reproductive, |
| | | Respiratory |
| 720 | HNBUZ31 | Cancer |
| 721 | HNDAC60 | Cancer |
| 722 | HNEDU15 | Cancer |
| 723 | HNFCJ32 | Cancer |
| 724 | HNFCO16 | Immune/Hematopoetic |
| 725 | HNFCS26 | Cancer |
| 726 | HNFEF36 | Immune/Hematopoetic |
| 727 | HNFEM05 | Cancer |
| 728 | HNFEP35 | Cancer |
| 729 | HNFEY57 | Cancer |
| 730 | HNFGV86 | Immune/Hematopoetic |
| 731 | HNFGZ90 | Cancer |
| 732 | HNFHW84 | Immune/Hematopoetic, |
| | | Musculoskeletal |
| 733 | HNFIH40 | Cancer |
| 734 | HNFIJ42 | Cancer |
| 735 | HNFIR05 | Cancer |
| 736 | HNFIW43 | Cancer |
| 737 | HNGBV83 | Immune/Hematopoetic |
| 738 | HNGCD68 | Immune/Hematopoetic |
| 739 | HNGFE79 | Cancer |
| 740 | HNGHK72 | Immune/Hematopoetic |
| 741 | HNGIP81 | Immune/Hematopoetic |
| 742 | HNGIZ20 | Immune/Hematopoetic |
| 743 | HNGJE59 | Immune/Hematopoetic |
| 744 | HNGJK45 | Immune/Hematopoetic |
| 745 | HNGJU24 | Immune/Hematopoetic |
| 746 | HNGKC59 | Immune/Hematopoetic |
| 747 | HNGPJ52 | Immune/Hematopoetic |
| 748 | HNHBH64 | Immune/Hematopoetic, |
| | | Neural/Sensory |
| 749 | HNHBL65 | Cancer |
| 750 | HNHCA27 | Immune/Hematopoetic |
| 751 | HNHCW38 | Immune/Hematopoetic |
| 752 | HNHDD52 | Immune/Hematopoetic |
| 753 | HNHDV38 | Cancer |
| 754 | HNHFA47 | Cancer |
| 755 | HNHFF79 | Immune/Hematopoetic |
| 756 | HNHFN66 | Immune/Hematopoetic |
| 757 | HNHGA56 | Cancer |
| 758 | HNHHP69 | Immune/Hematopoetic |
| 759 | HNHIA73 | Immune/Hematopoetic |
| 760 | HNHMU46 | Immune/Hematopoetic |
| 761 | HNHNP66 | Immune/Hematopoetic |
| 762 | HNJCA61 | Cancer |
| 763 | HNJDL53 | Digestive |
| 764 | HNKAU25 | Cancer |
| 765 | HNKCC77 | Cancer |
| 766 | HNNVB54 | Immune/Hematopoetic |
| 767 | HNSBO13 | Digestive |
| 768 | HNTAC92 | Cancer |
| 769 | HNTBO37 | Cancer |
| 770 | HNTCI85 | Cancer |
| 771 | HNTML79 | Cancer |
| 772 | HNTMY29 | Connective/Epithelial, |
| | | Reproductive |
| 773 | HNTNV86 | Cancer |
| 774 | HNTOA69 | Cancer |
| 775 | HOABP74 | Digestive, |
| | | Immune/Hematopoetic, |
| | | Musculoskeletal |
| 776 | HOABP90 | Musculoskeletal |
| 777 | HOABR34 | Cancer |
| 778 | HOACG55 | Cancer |
| 779 | HOCVC08 | Digestive, |
| | | Neural/Sensory |
| 780 | HODAH63 | Neural/Sensory, |
| | | Reproductive |
| 781 | HODAS59 | Cancer |
| 782 | HODBT16 | Cancer |
| 783 | HODCC34 | Cancer |
| 784 | HODDC26 | Reproductive |
| 785 | HODDD29 | Reproductive |
| 786 | HODGU15 | Digestive, |
| | | Neural/Sensory, |
| | | Reproductive |
| 787 | HOEAL47 | Cancer |
| 788 | HOEBK64 | Cancer |
| 789 | HOEBX61 | Cancer |
| 790 | HOECP43 | Cancer |
| 791 | HOECW07 | Musculoskeletal |
| 792 | HOEFN11 | Cancer |
| 793 | HOFMG83 | Cancer |
| 794 | HOFMI55 | Neural/Sensory, |
| | | Reproductive |
| 795 | HOFMQ84 | Immune/Hematopoetic, |
| | | Reproductive |
| 796 | HOFNA59 | Cancer |
| 797 | HOFNA73 | Cancer |
| 798 | HOFNC49 | Cancer |
| 799 | HOFNF53 | Reproductive |
| 800 | HOFNH81 | Reproductive |
| 801 | HOFNT19 | Cancer |
| 802 | HOFNT25 | Cancer |
| 803 | HOFNX21 | Reproductive |
| 804 | HOFNX30 | Reproductive |
| 805 | HOFNZ83 | Cancer |
| 806 | HOFOB11 | Reproductive |
| 807 | HOGAE19 | Cancer |
| 808 | HOGAL55 | Cancer |
| 809 | HOGAN66 | Cancer |
| 810 | HOGBJ10 | Cancer |
| 811 | HOGBL26 | Reproductive |
| 812 | HOGCD09 | Cancer |
| 813 | HOGCS70 | Cancer |
| 814 | HOHAH83 | Musculoskeletal |
| 815 | HOHBA49 | Cancer |
| 816 | HOHBF01 | Digestive, |
| | | Musculoskeletal, |
| | | Respiratory |
| 817 | HOHBN63 | Cancer |
| 818 | HOHBP11 | Cancer |
| 819 | HOHBU38 | Connective/Epithelial, |
| | | Immune/Hematopoetic, |
| | | Musculoskeletal |
| 820 | HOHBV40 | Musculoskeletal |
| 821 | HOHBY16 | Cancer |
| 822 | HOHBY52 | Cancer |
| 823 | HOHCA60 | Cancer |
| 824 | HOHCL29 | Musculoskeletal |
| 825 | HOHDA11 | Immune/Hematopoetic, |
| | | Musculoskeletal |
| 826 | HORBN13 | Cancer |
| 827 | HOSBD47 | Cancer |
| 828 | HOSBH74 | Cancer |
| 829 | HOSBJ30 | Cancer |
| 830 | HOSCI38 | Cancer |
| 831 | HOSCW60 | Cancer |
| 832 | HOSDG43 | Musculoskeletal |
| 833 | HOSDI05 | Cancer |
| 834 | HOSFD79 | Cancer |
| 835 | HOUBV40 | Cancer |
| 836 | HOUHL17 | Cancer |
| 837 | HOVAX37 | Reproductive |
| 838 | HPAAA47 | Cancer |
| 839 | HPASD50 | Cancer |
| 840 | HPBCT01 | Cancer |
| 841 | HPCAF66 | Cancer |
| 842 | HPDDO12 | Cancer |
| 843 | HPDWT03 | Cancer |
| 844 | HPEBD70 | Cancer |
| 845 | HPFDG52 | Reproductive |
| 846 | HPHAE52 | Cancer |
| 847 | HPIAC86 | Cancer |
| 848 | HPIAN26 | Reproductive |
| 849 | HPIBT86 | Reproductive |
| 850 | HPICE65 | Cancer |
| 851 | HPICE86 | Cancer |
| 852 | HPJBZ48 | Cancer |
| 853 | HPJCX12 | Cancer |
| 854 | HPJDM69 | Cancer |
| 855 | HPLBK19 | Reproductive |
| 856 | HPMBY47 | Cancer |
| 857 | HPMDO48 | Cancer |
| 858 | HPMEG51 | Cancer |
| 859 | HPMFL27 | Cancer |
| 860 | HPMGN57 | Cancer |
| 861 | HPMGU39 | Cancer |
| 862 | HPMGW04 | Cancer |
| 863 | HPRAL90 | Cancer |
| 864 | HPRAV03 | Cancer |
| 865 | HPRCA31 | Cancer |
| 866 | HPRCB54 | Cancer |
| 867 | HPRCC72 | Cancer |
| 868 | HPRCF91 | Reproductive |
| 869 | HPRCI78 | Cancer |
| 870 | HPRCL57 | Cancer |
| 871 | HPRTQ06 | Cancer |
| 872 | HPTRW28 | Endocrine, |
| | | Neural/Sensory |
| 873 | HPTTD38 | Cancer |
| 874 | HPTTQ89 | Cancer |
| 875 | HPTTQ91 | Cancer |
| 876 | HPTUA47 | Cancer |
| 877 | HPTVC60 | Cancer |
| 878 | HPTVR79 | Cancer |
| 879 | HPWAP52 | Digestive, |
| | | Reproductive |
| 880 | HPWAU41 | Cancer |
| 881 | HPWDL48 | Cancer |
| 882 | HPXAA20 | Cancer |
| 883 | HPXAB39 | Cancer |
| 884 | HQAHD50 | Immune/Hematopoetic |
| 885 | HQQBB12 | Cancer |
| 886 | HRAAA68 | Excretory, |
| | | Immune/Hematopoetic |
| 887 | HRAAK57 | Cancer |
| 888 | HRABD94 | Cancer |
| 889 | HRABM89 | Digestive, |
| | | Excretory |
| 890 | HRABN02 | Excretory |
| 891 | HRABP39 | Cancer |
| 892 | HRABS02 | Excretory |
| 893 | HRABU80 | Cancer |
| 894 | HRABZ58 | Cancer |
| 895 | HRACB06 | Cancer |
| 896 | HRACC15 | Cancer |
| 897 | HRACD76 | Cancer |
| 898 | HRADU37 | Cancer |
| 899 | HRADZ48 | Excretory |
| 900 | HRDCD54 | Cancer |
| 901 | HRDDR84 | Cancer |
| 902 | HRDEV41 | Cancer |
| 903 | HRDEW41 | Cancer |
| 904 | HRGBE62 | Cancer |
| 905 | HRGBQ64 | Cancer |
| 906 | HROAL58 | Cancer |
| 907 | HRODD66 | Digestive |
| 908 | HRODQ04 | Cancer |
| 909 | HRODY44 | Cancer |
| 910 | HSAAR60 | Connective/Epithelial, |
| | | Immune/Hematopoetic, |
| | | Musculoskeletal |
| 911 | HSAAU35 | Connective/Epithelial, |
| | | Musculoskeletal, |
| | | Reproductive |
| 912 | HSATX50 | Immune/Hematopoetic, |
| | | Reproductive |
| 913 | HSAUY56 | Immune/Hematopoetic |
| 914 | HSAVB21 | Immune/Hematopoetic |
| 915 | HSAVH15 | Immune/Hematopoetic |
| 916 | HSAVI13 | Cancer |
| 917 | HSAVT35 | Immune/Hematopoetic |
| 918 | HSAWJ55 | Cancer |
| 919 | HSAWQ69 | Cardiovascular, |
| | | Immune/Hematopoetic, |
| | | Neural/Sensory |
| 920 | HSAXA23 | Immune/Hematopoetic |
| 921 | HSAYB70 | Immune/Hematopoetic, |
| | | Reproductive |
| 922 | HSAYL16 | Cardiovascular, |
| | | Immune/Hematopoetic |
| 923 | HSBBC70 | Cancer |
| 924 | HSBBC75 | Cancer |
| 925 | HSDEE58 | Cancer |
| 926 | HSDEY07 | Cancer |
| 927 | HSDFK08 | Cancer |
| 928 | HSDFV29 | Cancer |
| 929 | HSDGE59 | Cancer |
| 930 | HSDGK35 | Cancer |
| 931 | HSDGT31 | Neural/Sensory |
| 932 | HSDGU96 | Neural/Sensory |
| 933 | HSDIT85 | Cancer |
| 934 | HSDJR28 | Immune/Hematopoetic, |
| | | Musculoskeletal, |
| | | Neural/Sensory |
| 935 | HSDKC45 | Neural/Sensory |
| 936 | HSDZO72 | Cancer |
| 937 | HSFAN79 | Immune/Hematopoetic |
| 938 | HSGSA61 | Connective/Epithelial, |
| | | Digestive, |
| | | Immune/Hematopoetic |
| 939 | HSHAT09 | Cancer |
| 940 | HSIAI70 | Cancer |
| 941 | HSICN14 | Cancer |
| 942 | HSICV21 | Cancer |
| 943 | HSIDE52 | Cancer |
| 944 | HSIDN92 | Cancer |
| 945 | HSIDP95 | Cancer |
| 946 | HSIDT08 | Cancer |
| 947 | HSIEE85 | Cancer |
| 948 | HSIEI71 | Cancer |
| 949 | HSIFX06 | Digestive |
| 950 | HSIGK57 | Cancer |
| 951 | HSKBF16 | Cancer |
| 952 | HSKDF75 | Cancer |
| 953 | HSKEM46 | Cancer |
| 954 | HSKET35 | Cancer |
| 955 | HSKGO26 | Cancer |
| 956 | HSKGZ70 | Cancer |
| 957 | HSKIO94 | Cancer |
| 958 | HSKMG31 | Digestive, |
| | | Immune/Hematopoetic, |
| | | Reproductive |
| 959 | HSKNJ04 | Cancer |
| 960 | HSKXE91 | Cancer |
| 961 | HSKXM03 | Cardiovascular, |
| | | Musculoskeletal, |
| | | Reproductive |
| 962 | HSKXN78 | Cancer |
| 963 | HSLDJ95 | Cancer |
| 964 | HSLDT25 | Musculoskeletal |
| 965 | HSLEJ47 | Cancer |
| 966 | HSLEQ43 | Cancer |
| 967 | HSLFF79 | Musculoskeletal |
| 968 | HSLGA19 | Musculoskeletal |
| 969 | HSLHI10 | Cancer |
| 970 | HSNBL94 | Cancer |
| 971 | HSNOG80 | Cancer |
| 972 | HSNOI46 | Cancer |
| 973 | HSOBW79 | Cancer |
| 974 | HSPAF93 | Digestive |
| 975 | HSPAY58 | Digestive |
| 976 | HSPBB10 | Cancer |
| 977 | HSQAU17 | Cancer |
| 978 | HSQDM71 | Cancer |
| 979 | HSQEL25 | Cancer |
| 980 | HSQFB41 | Cancer |
| 981 | HSQFC94 | Cancer |
| 982 | HSQFL74 | Cancer |
| 983 | HSRAW48 | Cancer |
| 984 | HSRBL79 | Cancer |
| 985 | HSSDL44 | Cancer |
| 986 | HSSDM38 | Cancer |
| 987 | HSSED43 | Cancer |
| 988 | HSSFI03 | Cancer |
| 989 | HSSFN40 | Cancer |
| 990 | HSSFN80 | Cancer |
| 991 | HSSJC86 | Digestive, |
| | | Musculoskeletal, |
| | | Neural/Sensory |
| 992 | HSSJH70 | Cancer |
| 993 | HSSJP09 | Cancer |
| 994 | HSSKB19 | Cancer |
| 995 | HSSMU96 | Cancer |
| 996 | HSUBF19 | Cancer |
| 997 | HSVAQ19 | Cancer |
| 998 | HSVAT61 | Cancer |
| 999 | HSVAX84 | Immune/Hematopoetic |
| 1000 | HSVBS08 | Excretory, |
| | | Immune/Hematopoetic |
| 1001 | HSVCG30 | Cancer |
| 1002 | HSWAO37 | Cancer |
| 1003 | HSWAP63 | Cancer |
| 1004 | HSWAQ89 | Cancer |
| 1005 | HSWBG66 | Cancer |
| 1006 | HSWBL16 | Reproductive |
| 1007 | HSWBV25 | Cancer |
| 1008 | HSXAW16 | Neural/Sensory |
| 1009 | HSXCM91 | Immune/Hematopoetic, |
| | | Musculoskeletal, |
| | | Neural/Sensory |
| 1010 | HSYAD28 | Cancer |
| 1011 | HSYAE36 | Cancer |
| 1012 | HSYAE94 | Cancer |
| 1013 | HSYAI81 | Immune/Hematopoetic |
| 1014 | HSYAI85 | Cancer |
| 1015 | HSYAK80 | Cancer |
| 1016 | HSYAV58 | Cancer |
| 1017 | HSYAY88 | Cancer |
| 1018 | HSYBF81 | Cancer |
| 1019 | HSYBG40 | Cancer |
| 1020 | HSYBI49 | Cancer |
| 1021 | HSYBO10 | Cancer |
| 1022 | HSYHU60 | Cancer |
| 1023 | HSYHY70 | Cancer |
| 1024 | HT1SB52 | Cancer |
| 1025 | HT3AL15 | Immune/Hematopoetic, |
| | | Neural/Sensory |
| 1026 | HT3SB70 | Cancer |
| 1027 | HT4CC72 | Cancer |
| 1028 | HT4ES74 | Cancer |
| 1029 | HT4FU85 | Immune/Hematopoetic, |
| | | Musculoskeletal |
| 1030 | HT4SI50 | Cancer |
| 1031 | HT5GJ21 | Cancer |
| 1032 | HTAEB05 | Cancer |
| 1033 | HTAEK53 | Cancer |
| 1034 | HTAEU17 | Endocrine, |
| | | Immune/Hematopoetic |
| 1035 | HTBAA74 | Digestive, |
| | | Immune/Hematopoetic |
| 1036 | HTEBX12 | Reproductive |
| 1037 | HTECD31 | Cancer |
| 1038 | HTEHH47 | Cancer |
| 1039 | HTEKE34 | Reproductive |
| 1040 | HTEMZ21 | Cancer |
| 1041 | HTEND49 | Cancer |
| 1042 | HTENS88 | Reproductive |
| 1043 | HTENZ38 | Cancer |
| 1044 | HTEPS72 | Reproductive |
| 1045 | HTGAD16 | Immune/Hematopoetic |
| 1046 | HTGAT51 | Cardiovascular, |
| | | Immune/Hematopoetic, |
| | | Reproductive |
| 1047 | HTGAY48 | Cancer |
| 1048 | HTGEJ75 | Cancer |
| 1049 | HTGER35 | Connective/Epithelial, |
| | | Immune/Hematopoetic |
| 1050 | HTHCI11 | Immune/Hematopoetic |
| 1051 | HTHCU08 | Cancer |
| 1052 | HTHCU49 | Cancer |
| 1053 | HTHCY42 | Cancer |
| 1054 | HTHDS21 | Digestive, |
| | | Immune/Hematopoetic |
| 1055 | HTJMD29 | Cancer |
| 1056 | HTJMD64 | Cancer |
| 1057 | HTJME61 | Cancer |
| 1058 | HTLAC15 | Cancer |
| 1059 | HTLAT66 | Cancer |
| 1060 | HTLDN14 | Cancer |
| 1061 | HTLED03 | Cancer |
| 1062 | HTLEU39 | Reproductive |
| 1063 | HTNBU75 | Cancer |
| 1064 | HTOAD02 | Cancer |
| 1065 | HTOAS23 | Cancer |
| 1066 | HTOAT64 | Immune/Hematopoetic |
| 1067 | HTODE14 | Immune/Hematopoetic |
| 1068 | HTODN23 | Cancer |
| 1069 | HTOEA52 | Cancer |
| 1070 | HTOEB27 | Cancer |
| 1071 | HTOHL50 | Digestive, |
| | | Immune/Hematopoetic, |
| | | Neural/Sensory |
| 1072 | HTOHV38 | Cancer |
| 1073 | HTOHV42 | Digestive, |
| | | Immune/Hematopoetic, |
| | | Musculoskeletal |
| 1074 | HTOIK67 | Cancer |
| 1075 | HTOIL04 | Cancer |
| 1076 | HTOIY36 | Immune/Hematopoetic, |
| | | Reproductive |
| 1077 | HTOJP22 | Cancer |
| 1078 | HTPAN08 | Cancer |
| 1079 | HTPBD26 | Cancer |
| 1080 | HTPCH84 | Cancer |
| 1081 | HTPCU42 | Cancer |
| 1082 | HTPDD93 | Digestive, |
| | | Immune/Hematopoetic |
| 1083 | HTPEF45 | Cancer |
| 1084 | HTPGA81 | Digestive |
| 1085 | HTPGS50 | Cancer |
| 1086 | HTPHH74 | Cancer |
| 1087 | HTSEB21 | Cancer |
| 1088 | HTSEU39 | Cancer |
| 1089 | HTSGS30 | Digestive, |
| | | Immune/Hematopoetic, |
| | | Mixed Fetal |
| 1090 | HTTBN61 | Cancer |
| 1091 | HTTCT46 | Cancer |
| 1092 | HTTCU54 | Reproductive |
| 1093 | HTTDS54 | Cancer |
| 1094 | HTTED48 | Cardiovascular, |
| | | Immune/Hematopoetic, |
| | | Reproductive |
| 1095 | HTTEG50 | Cancer |
| 1096 | HTTEZ20 | Reproductive |
| 1097 | HTTFD41 | Cancer |
| 1098 | HTTFK27 | Cancer |
| 1099 | HTWCJ76 | Cancer |
| 1100 | HTWFK18 | Connective/Epithelial, |
| | | Immune/Hematopoetic |
| 1101 | HTWJE07 | Cancer |
| 1102 | HTWKE52 | Immune/Hematopoetic |
| 1103 | HTXAL79 | Immune/Hematopoetic |
| 1104 | HTXAO06 | Cancer |
| 1105 | HTXDZ21 | Cancer |
| 1106 | HTXED44 | Cancer |
| 1107 | HTXET53 | Cancer |
| 1108 | HTXFJ74 | Cancer |
| 1109 | HTXGD18 | Immune/Hematopoetic |
| 1110 | HTXGD89 | Immune/Hematopoetic |
| 1111 | HTXGG22 | Cancer |
| 1112 | HTXHA75 | Digestive, |
| | | Immune/Hematopoetic, |
| | | Neural/Sensory |
| 1113 | HTXHC26 | Cancer |
| 1114 | HTXLB47 | Cancer |
| 1115 | HTXNV38 | Cancer |
| 1116 | HTXOK51 | Immune/Hematopoetic |
| 1117 | HTXPE10 | Cancer |
| 1118 | HTXPN70 | Immune/Hematopoetic |
| 1119 | HTXQA54 | Cancer |
| 1120 | HTXQD24 | Cancer |
| 1121 | HUDBE42 | Cancer |
| 1122 | HUFBR57 | Cancer |
| 1123 | HUFBV68 | Cancer |
| 1124 | HUFCG89 | Digestive |
| 1125 | HUFCI65 | Cancer |
| 1126 | HULAM40 | Cancer |
| 1127 | HULEP73 | Cancer |
| 1128 | HUSFD69 | Cancer |
| 1129 | HUVCT01 | Cancer |
| 1130 | HUVDE75 | Cancer |
| 1131 | HUVDR03 | Cancer |
| 1132 | HWAAD69 | Cancer |
| 1133 | HWABB14 | Cancer |
| 1134 | HWABG32 | Cancer |
| 1135 | HWABJ31 | Immune/Hematopoetic, |
| | | Musculoskeletal |
| 1136 | HWABP68 | Cardiovascular, |
| | | Digestive, |
| | | Immune/Hematopoetic |
| 1137 | HWABQ42 | Cancer |
| 1138 | HWABW48 | Cancer |
| 1139 | HWACB86 | Cancer |
| 1140 | HWADL05 | Cancer |
| 1141 | HWAIT84 | Immune/Hematopoetic |
| 1142 | HWBAE31 | Immune/Hematopoetic, |
| | | Reproductive |
| 1143 | HWBAN79 | Cancer |
| 1144 | HWBCB74 | Cancer |
| 1145 | HWBDS86 | Cancer |
| 1146 | HWBHP40 | Digestive, |
| | | Immune/Hematopoetic |
| 1147 | HWBHP80 | Immune/Hematopoetic, |
| | | Reproductive |
| 1148 | HWCAB80 | Cancer |
| 1149 | HWCAD63 | Cancer |
| 1150 | HWDAE66 | Cancer |
| 1151 | HWFBD68 | Cancer |
| 1152 | HWHGC79 | Cancer |
| 1153 | HWHGD01 | Cancer |
| 1154 | HWHGM31 | Connective/Epithelial |
| 1155 | HWHGO60 | Cancer |
| 1156 | HWHGZ11 | Connective/Epithelial, |
| | | Immune/Hematopoetic |
| 1157 | HWHHJ13 | Cancer |
| 1158 | HWHHQ91 | Connective/Epithelial |
| 1159 | HWHPC94 | Cancer |
| 1160 | HWHPO24 | Connective/Epithelial, |
| | | Digestive |
| 1161 | HWJAC79 | Cancer |
| 1162 | HWLJY87 | Cancer |
| 1163 | HWLKQ11 | Cancer |
| 1164 | HWMGG35 | Digestive |
| 1165 | HWMMQ66 | Digestive, |
| | | Neural/Sensory |
| 1166 | HWMMU64 | Digestive, |
| | | Musculoskeletal, |
| | | Reproductive |
| 1167 | HWMNE89 | Digestive, |
| | | Immune/Hematopoetic |
| 1168 | HWNGE04 | Cancer |
| 1169 | HWSAE43 | Cancer |
| 1170 | HWSAG92 | Cancer |
| 1171 | HWSAI56 | Cancer |
| 1172 | HWTAY65 | Cancer |
| 1173 | HWTBT71 | Cancer |
| 1174 | HWWDB64 | Cancer |
| 1175 | HXAAG34 | Cancer |
| 1176 | HYAAB83 | Cancer |
| 1177 | HYAAF05 | Cancer |
| 1178 | HYAAJ68 | Cancer |
| 1179 | HYBAR40 | Cancer |
| 1180 | HYBBG69 | Cancer |
| 1181 | HYCAB57 | Cancer |

[0148] Table 1E provides information related to biological activities and preferred indications for polynucleotides and polypeptides of the invention (including antibodies, agonists, and/or antagonists thereof). Table 1E also provides information related to assays which may be used to test polynucleotides and polypeptides of the invention (including antibodies, agonists, and/or antagonists thereof) for the corresponding biological activities. The first column (“Gene No.”) provides the gene number in the application for each clone identifier. The second column (“cDNA Clone ID:”) provides the unique clone identifier for each clone as previously described and indicated in Tables 1A, 1B, 1C, and 1D. The third column (“AA SEQ ID NO:Y”) indicates the Sequence Listing SEQ ID Number for polypeptide sequences encoded by the corresponding cDNA clones (also as indicated in Tables 1A, 1B, and 2). The fourth column (“Biological Activity”) indicates a biological activity corresponding to the indicated polypeptides (or polynucleotides encoding said polypeptides). The fifth column (“Exemplary Activity Assay”) further describes the corresponding biological activity and also provides information pertaining to the various types of assays which may be performed to test, demonstrate, or quantify the corresponding biological activity. The sixth column (“Preferred Indictions”) describes particular embodiments of the invention as well as indications (e.g. pathologies, diseases, disorders, abnormalities, etc.) for which polynucleotides and polypeptides of the invention (including antibodies, agonists, and/or antagonists thereof) may be used in detecting, diagnosing, preventing, and/or treating.

[0149] Table 1E describes the use of, inter alia, FMAT technology for testing or demonstrating various biological activities. Fluorometric microvolume assay technology (FMAT) is a fluorescence-based system which provides a means to perform nonradioactive cell- and bead-based assays to detect activation of cell signal transduction pathways. This technology was designed specifically for ligand binding and immunological assays. Using this technology, fluorescent cells or beads at the bottom of the well are detected as localized areas of concentrated fluorescence using a data processing system. Unbound flurophore comprising the background signal is ignored, allowing for a wide variety of homogeneous assays. FMAT technology may be used for peptide ligand binding assays, immunofluorescence, apoptosis, cytotoxicity, and bead-based immunocapture assays. See, Miraglia S et. al., “Homogeneous cell and bead based assays for highthroughput screening using flourometric microvolume assay technology,” Journal of Biomolecular Screening; 4:193-204 (1999). In particular, FMAT technology may be used to test, confirm, and/or identify the ability of polypeptides (including polypeptide fragments and variants) to activate signal transduction pathways. For example, FMAT technology may be used to test, confirm, and/or identify the ability of polypeptides to upregulate production of immunomodulatory proteins (such as, for example, interleukins, GM-CSF, Rantes, and Tumor Necrosis factors, as well as other cellular regulators (e.g. insulin)).

[0150] Table 1E also describes the use of kinase assays for testing, demonstrating, or quantifying biological activity. In this regard, the phosphorylation and de-phosphorylation of specific amino acid residues (e.g. Tyrosine, Serine, Threonine) on cell-signal transduction proteins provides a fast, reversible means for activation and de-activation of cellular signal transduction pathways. Moreover, cell signal transduction via phosphorylation/de-phosphorylation is crucial to the regulation of a wide variety of cellular processes (e.g. proliferation, differentiation, migration, apoptosis, etc.). Accordingly, kinase assays provide a powerful tool useful for testing, confirming, and/or identifying polypeptides (including polypeptide fragments and variants) that mediate cell signal transduction events via protein phosphorylation. See e.g., Forrer, P., Tamaskovic R., and Jaussi, R. “Enzyme-Linked Immunosorbent Assay for Measurement of JNK, ERK, and p38 Kinase Activities” Biol. Chem. 379(8-9): 1101-1110 (1998).

LENGTHY TABLE REFERENCED HERE
US20070015271A1-20070118-T00003
Please refer to the end of the specification for access instructions.

[0151] Table 1F: Polynucleotides encoding polypeptides of the present invention can be used in assays to test for one or more biological activities. One such biological activity which may be tested includes the ability of polynucleotides and polypeptides of the invention to stimulate up-regulation or down-regulation of expression of particular genes and proteins. Hence, if polynucleotides and polypeptides of the present invention exhibit activity in altering particular gene and protein expression patterns, it is likely that these polynucleotides and polypeptides of the present invention may be involved in, or capable of effecting changes in, diseases associated with the altered gene and protein expression profiles. Hence, polynucleotides, polypeptides, or antibodies of the present invention could be used to treat said associated diseases.

[0152] TaqMan® assays may be performed to assess the ability of polynucleotides (and polypeptides they encode) to alter the expression pattern of particular “target” genes. TaqMan® reactions are performed to evaluate the ability of a test agent to induce or repress expression of specific genes in different cell types. TaqMan® gene expression quantification assays (“TaqMan® assays”) are well known to, and routinely performed by, those of ordinary skill in the art. TaqMan® assays are performed in a two step reverse transcription/polymerase chain reaction (RT-PCR). In the first (RT) step, cDNA is reverse transcribed from total RNA samples using random hexamer primers. In the second (PCR) step, PCR products are synthesized from the cDNA using gene specific primers.

[0153] To quantify gene expression the Taqman® PCR reaction exploits the 5′ nuclease activity of AmpliTaq Gold® DNA Polymerase to cleave a Taqman® probe (distinct from the primers) during PCR. The Taqman® probe contains a reporter dye at the 5′-end of the probe and a quencher dye at the 3′ end of the probe. When the probe is intact, the proximity of the reporter dye to the quencher dye results in suppression of the reporter fluorescence. During PCR, if the target of interest is present, the probe specifically anneals between the forward and reverse primer sites. AmpliTaq Fold DNA Polymerase then cleaves the probe between the reporter and quencher when the probe hybridizes to the target, resulting in increased fluorescence of the reporter (see FIG. 2). Accumulation of PCR products is detected directly by monitoring the increase in fluorescence of the reporter dye.

[0154] After the probe fragments are displaced from the target, polymerization of the strand continues. The 3′-end of the probe is blocked to prevent extension of the probe during PCR. This process occurs in every cycle and does not interfere with the exponential accumulation of product. The increase in fluorescence signal is detected only if the target sequence is complementary to the probe and is amplified during PCR. Because of these requirements, any nonspecific amplification is not detected.

[0155] For test sample preparation, vector controls or constructs containing the coding sequence for the gene of interest are transfected into cells, such as for example 293T cells, and supernatants collected after 48 hours. For cell treatment and RNA isolation, multiple primary human cells or human cell lines are used; such cells may include but are not limited to, Normal Human Dermal Fibroblasts, Aortic Smooth Muscle, Human Umbilical Vein Endothelial Cells, HepG2, Daudi, Jurkat, U937, Caco, and THP-1 cell lines. Cells are plated in growth media and growth is arrested by culturing without media change for 3 days, or by switching cells to low serum media and incubating overnight. Cells are treated for 1, 6, or 24 hours with either vector control supernatant or sample supernatant (or purified/partially purified protein preparations in buffer). Total RNA is isolated; for example, by using Trizol extraction or by using the Ambion RNAqueous™-4PCR RNA isolation system. Expression levels of multiple genes are analyzed using Taqman®, and expression in the test sample is compared to control vector samples to identify genes induced or repressed. Each of the above described techniques are well known to, and routinely performed by, those of ordinary skill in the art.

[0156] Table 1F indicates particular disease classes and preferred indications for which polynucleotides, polypeptides, or antibodies of the present invention may be used in detecting, diagnosing, preventing, treating and/or ameliorating said diseases and disorders based on “target” gene expression patterns which may be up- or down-regulated by polynucleotides (and the encoded polypeptides) corresponding to each indicated cDNA Clone ID (shown in Table 1F, Column 2).

[0157] Thus, in preferred embodiments, the present invention encompasses a method of detecting, diagnosing, preventing, treating, and/or ameliorating a disease or disorder listed in the “Disease Class” and/or “Preferred Indication” columns of Table 1F; comprising administering to a patient in which such detection, diagnosis, prevention, or treatment is desired a protein, nucleic acid, or antibody of the invention (or fragment or variant thereof) in an amount effective to detect, diagnose, prevent, treat, or ameliorate the disease or disorder. The first and second columns of Table 1D show the “Gene No.” and “cDNA Clone ID No.”, respectively, indicating certain nucleic acids and proteins (or antibodies against the same) of the invention (including polynucleotide, polypeptide, and antibody fragments or variants thereof) that may be used in detecting, diagnosing, preventing, treating, or ameliorating the disease(s) or disorder(s) indicated in the corresponding row in the “Disease Class” or “Preferred Indication” Columns of Table 1F.

[0158] In another embodiment, the present invention also encompasses methods of detecting, diagnosing, preventing, treating, or ameliorating a disease or disorder listed in the “Disease Class” or “Preferred Indication” Columns of Table 1F; comprising administering to a patient combinations of the proteins, nucleic acids, or antibodies of the invention (or fragments or variants thereof), sharing similar indications as shown in the corresponding rows in the “Disease Class” or “Preferred Indication” Columns of Table 1F.

[0159] The “Disease Class” Column of Table 1F provides a categorized descriptive heading for diseases, disorders, and/or conditions (more fully described below) that may be detected, diagnosed, prevented, treated, or ameliorated by a protein, nucleic acid, or antibody of the invention (or fragment or variant thereof).

[0160] The “Preferred Indication” Column of Table 1F describes diseases, disorders, and/or conditions that may be detected, diagnosed, prevented, treated, or ameliorated by a protein, nucleic acid, or antibody of the invention (or fragment or variant thereof).

[0161] The “Cell Line” and “Exemplary Targets” Columns of Table 1F indicate particular cell lines and target genes, respectively, which may show altered gene expression patterns (i.e., up- or down-regulation of the indicated target gene) in Taqman® assays, performed as described above, utilizing polynucleotides of the cDNA Clone ID shown in the corresponding row. Alteration of expression patterns of the indicated “Exemplary Target” genes is correlated with a particular “Disease Class” and/or “Preferred Indication” as shown in the corresponding row under the respective column headings.

[0162] The “Exemplary Accessions” Column indicates GenBank Accessions (available online through the National Center for Biotechnology Information (NCBI) at http://www.ncbi.nlm.nih.gov/) which correspond to the “Exemplary Targets” shown in the adjacent row.

[0163] The recitation of “Cancer” in the “Disease Class” Column indicates that the corresponding nucleic acid and protein, or antibody against the same, of the invention (or fragment or variant thereof) may be used for example, to detect, diagnose, prevent, treat, and/or ameliorate neoplastic diseases and/or disorders (e.g., leukemias, cancers, etc., as described below under “Hyperproliferative Disorders”).

[0164] The recitation of “Immune” in the “Disease Class” column indicates that the corresponding nucleic acid and protein, or antibody against the same, of the invention (or fragment or variant thereof), may be used for example, to detect, diagnose, prevent, treat, and/or ameliorate diseases and/or disorders relating to neoplastic diseases (e.g., as described below under “Hyperproliferative Disorders”), blood disorders (e.g., as described below under “Immune Activity” “Cardiovascular Disorders” and/or “Blood-Related Disorders”), and infections (e.g., as described below under “Infectious Disease”).

[0165] The recitation of “Angiogenesis” in the “Disease Class” column indicates that the corresponding nucleic acid and protein, or antibody against the same, of the invention (or fragment or variant thereof), may be used for example, to detect, diagnose, treat, prevent, and/or ameliorate diseases and/or disorders relating to neoplastic diseases (e.g., as described below under “Hyperproliferative Disorders”), diseases and/or disorders of the cardiovascular system (e.g., as described below under “Cardiovascular Disorders”), diseases and/or disorders involving cellular and genetic abnormalities (e.g., as described below under “Diseases at the Cellular Level”), diseases and/or disorders involving angiogenesis (e.g., as described below under “Anti-Angiogenesis Activity”), to promote or inhibit cell or tissue regeneration (e.g., as described below under “Regeneration”), or to promote wound healing (e.g., as described below under “Wound Healing and Epithelial Cell Proliferation”).

[0166] The recitation of “Diabetes” in the “Disease Class” column indicates that the corresponding nucleic acid and protein, or antibody against the same, of the invention (or fragment or variant thereof), may be used for example, to detect, diagnose, treat, prevent, and/or ameliorate diabetes (including diabetes mellitus types I and II), as well as diseases and/or disorders associated with, or consequential to, diabetes (e.g. as described below under “Endocrine Disorders,” “Renal Disorders,” and “Gastrointestinal Disorders”).

TABLE 1F

| Gene | cDNA | Disease | | | Exemplary | Exemplary |
|---|---|---|---|---|---|---|
| No. | Clone ID | Class | Preferred Indications: | Cell Line | Targets | Accessions |
| 96 | HBIAQ68 | Diabetes | A highly preferred indication is diabetes. Additional highly | AOSMC | IRS1 | gb\|AK025742\| |
| | | | preferred indications include complications associated with | | UNCP2 | AK025742 |
| | | | diabetes (e.g., diabetic retinopathy, diabetic nephropathy, kidney | | | |
| | | | disease (e.g., renal failure, nephropathy and/or other diseases and | | | |
| | | | disorders as described in the “Renal Disorders” section below), | | | |
| | | | diabetic neuropathy, nerve disease and nerve damage (e.g., due | | | |
| | | | to diabetic neuropathy), blood vessel blockage, heart disease, | | | |
| | | | stroke, impotence (e.g., due to diabetic neuropathy or blood | | | |
| | | | vessel blockage), seizures, mental confusion, drowsiness, | | | |
| | | | nonketotic hyperglycemic-hyperosmolar coma, cardiovascular | | | |
| | | | disease (e.g., heart disease, atherosclerosis, microvascular | | | |
| | | | disease, hypertension, stroke, and other diseases and disorders as | | | |
| | | | described in the “Cardiovascular Disorders” section below), | | | |
| | | | dyslipidemia, endocrine disorders (as described in the | | | |
| | | | “Endocrine Disorders” section below), neuropathy, vision | | | |
| | | | impairment (e.g., diabetic retinopathy and blindness), ulcers and | | | |
| | | | impaired wound healing, and infection (e.g., infectious diseases | | | |
| | | | and disorders as described in the “Infectious Diseases” section | | | |
| | | | below, especially of the urinary tract and skin). Highly preferred | | | |
| | | | indications also include obesity, weight gain, and weight loss, as | | | |
| | | | well as complications associated with obesity, weight gain, and | | | |
| | | | weight loss. Preferred embodiments of the invention include | | | |
| | | | methods of preventing, detecting, diagnosing, treating and/or | | | |
| | | | ameliorating the above mentioned conditions, disorders, and | | | |
| | | | diseases. (AOSMC cells are human aortic smooth muscle cells). | | | |
| 96 | HBIAQ68 | Diabetes | A highly preferred indication is diabetes. Additional highly | Caco-2 | Insulin | gb\|X70508\| |
| | | | preferred indications include complications associated with | | | HSPPI |
| | | | diabetes (e.g., diabetic retinopathy, diabetic nephropathy, kidney | | | |
| | | | disease (e.g., renal failure, nephropathy and/or other diseases and | | | |
| | | | disorders as described in the “Renal Disorders” section below), | | | |
| | | | diabetic neuropathy, nerve disease and nerve damage (e.g., due | | | |
| | | | to diabetic neuropathy), blood vessel blockage, heart disease, | | | |
| | | | stroke, impotence (e.g., due to diabetic neuropathy or blood | | | |
| | | | vessel blockage), seizures, mental confusion, drowsiness, | | | |
| | | | nonketotic hyperglycemic-hyperosmolar coma, cardiovascular | | | |
| | | | disease (e.g., heart disease, atherosclerosis, microvascular | | | |
| | | | disease, hypertension, stroke, and other diseases and disorders as | | | |
| | | | described in the “Cardiovascular Disorders” section below), | | | |
| | | | dyslipidemia, endocrine disorders (as described in the | | | |
| | | | “Endocrine Disorders” section below), neuropathy, vision | | | |
| | | | impairment (e.g., diabetic retinopathy and blindness), ulcers and | | | |
| | | | impaired wound healing, and infection (e.g., infectious diseases | | | |
| | | | and disorders as described in the “Infectious Diseases” section | | | |
| | | | below, especially of the urinary tract and skin). Highly preferred | | | |
| | | | indications also include obesity, weight gain, and weight loss, as | | | |
| | | | well as complications associated with obesity, weight gain, and | | | |
| | | | weight loss. Preferred embodiments of the invention include | | | |
| | | | methods of preventing, detecting, diagnosing, treating and/or | | | |
| | | | ameliorating the above mentioned conditions, disorders, and | | | |
| | | | diseases. (The Caco-2 cell line is a human colorectal | | | |
| | | | adenocarcinoma cell line available through the ATCC as cell line | | | |
| | | | number HTB-37). | | | |
| 96 | HBIAQ68 | Diabetes | A highly preferred indication is diabetes. Additional highly | HEK293 | Insulin | gb\|X70508\| |
| | | | preferred indications include complications associated with | | | HSPPI |
| | | | diabetes (e.g., diabetic retinopathy, diabetic nephropathy, kidney | | | |
| | | | disease (e.g., renal failure, nephropathy and/or other diseases and | | | |
| | | | disorders as described in the “Renal Disorders” section below), | | | |
| | | | diabetic neuropathy, nerve disease and nerve damage (e.g., due | | | |
| | | | to diabetic neuropathy), blood vessel blockage, heart disease, | | | |
| | | | stroke, impotence (e.g., due to diabetic neuropathy or blood | | | |
| | | | vessel blockage), seizures, mental confusion, drowsiness, | | | |
| | | | nonketotic hyperglycemic-hyperosmolar coma, cardiovascular | | | |
| | | | disease (e.g., heart disease, atherosclerosis, microvascular | | | |
| | | | disease, hypertension, stroke, and other diseases and disorders as | | | |
| | | | described in the “Cardiovascular Disorders” section below), | | | |
| | | | dyslipidemia, endocrine disorders (as described in the | | | |
| | | | “Endocrine Disorders” section below), neuropathy, vision | | | |
| | | | impairment (e.g., diabetic retinopathy and blindness), ulcers and | | | |
| | | | impaired wound healing, and infection (e.g., infectious diseases | | | |
| | | | and disorders as described in the “Infectious Diseases” section | | | |
| | | | below, especially of the urinary tract and skin). Highly preferred | | | |
| | | | indications also include obesity, weight gain, and weight loss, as | | | |
| | | | well as complications associated with obesity, weight gain, and | | | |
| | | | weight loss. Preferred embodiments of the invention include | | | |
| | | | methods of preventing, detecting, diagnosing, treating and/or | | | |
| | | | ameliorating the above mentioned conditions, disorders, and | | | |
| | | | diseases. (The HEK293 cell line is a human embryonal kidney | | | |
| | | | epithelial cell line available through the ATCC as cell line | | | |
| | | | number CRL-1573). | | | |
| 96 | HBIAQ68 | Diabetes | A highly preferred indication is diabetes. Additional highly | HUVEC | Leptin | gb\|AF281943\| |
| | | | preferred indications include complications associated with | | | AF281943 |
| | | | diabetes (e.g., diabetic retinopathy, diabetic nephropathy, kidney | | | |
| | | | disease (e.g., renal failure, nephropathy and/or other diseases and | | | |
| | | | disorders as described in the “Renal Disorders” section below), | | | |
| | | | diabetic neuropathy, nerve disease and nerve damage (e.g., due | | | |
| | | | to diabetic neuropathy), blood vessel blockage, heart disease, | | | |
| | | | stroke, impotence (e.g., due to diabetic neuropathy or blood | | | |
| | | | vessel blockage), seizures, mental confusion, drowsiness, | | | |
| | | | nonketotic hyperglycemic-hyperosmolar coma, cardiovascular | | | |
| | | | disease (e.g., heart disease, atherosclerosis, microvascular | | | |
| | | | disease, hypertension, stroke, and other diseases and disorders as | | | |
| | | | described in the “Cardiovascular Disorders” section below), | | | |
| | | | dyslipidemia, endocrine disorders (as described in the | | | |
| | | | “Endocrine Disorders” section below), neuropathy, vision | | | |
| | | | impairment (e.g., diabetic retinopathy and blindness), ulcers and | | | |
| | | | impaired wound healing, and infection (e.g., infectious diseases | | | |
| | | | and disorders as described in the “Infectious Diseases” section | | | |
| | | | below, especially of the urinary tract and skin). Highly preferred | | | |
| | | | indications also include obesity, weight gain, and weight loss, as | | | |
| | | | well as complications associated with obesity, weight gain, and | | | |
| | | | weight loss. Preferred embodiments of the invention include | | | |
| | | | methods of preventing, detecting, diagnosing, treating and/or | | | |
| | | | ameliorating the above mentioned conditions, disorders, and | | | |
| | | | diseases. (HUVEC cells are human umbilical vein endothelial | | | |
| | | | cells). | | | |
| 96 | HBIAQ68 | Diabetes | A highly preferred indication is diabetes. Additional highly | Jurkat | Leptin | gb\|AF281943\| |
| | | | preferred indications include complications associated with | | Resistin | AF281943 |
| | | | diabetes (e.g., diabetic retinopathy, diabetic nephropathy, kidney | | | gb\|AF205952\| |
| | | | disease (e.g., renal failure, nephropathy and/or other diseases and | | | AF205952 |
| | | | disorders as described in the “Renal Disorders” section below), | | | |
| | | | diabetic neuropathy, nerve disease and nerve damage (e.g., due | | | |
| | | | to diabetic neuropathy), blood vessel blockage, heart disease, | | | |
| | | | stroke, impotence (e.g., due to diabetic neuropathy or blood | | | |
| | | | vessel blockage), seizures, mental confusion, drowsiness, | | | |
| | | | nonketotic hyperglycemic-hyperosmolar coma, cardiovascular | | | |
| | | | disease (e.g., heart disease, atherosclerosis, microvascular | | | |
| | | | disease, hypertension, stroke, and other diseases and disorders as | | | |
| | | | described in the “Cardiovascular Disorders” section below), | | | |
| | | | dyslipidemia, endocrine disorders (as described in the | | | |
| | | | “Endocrine Disorders” section below), neuropathy, vision | | | |
| | | | impairment (e.g., diabetic retinopathy and blindness), ulcers and | | | |
| | | | impaired wound healing, and infection (e.g., infectious diseases | | | |
| | | | and disorders as described in the “Infectious Diseases” section | | | |
| | | | below, especially of the urinary tract and skin). Highly preferred | | | |
| | | | indications also include obesity, weight gain, and weight loss, as | | | |
| | | | well as complications associated with obesity, weight gain, and | | | |
| | | | weight loss. Preferred embodiments of the invention include | | | |
| | | | methods of preventing, detecting, diagnosing, treating and/or | | | |
| | | | ameliorating the above mentioned conditions, disorders, and | | | |
| | | | diseases. (The Jurkat cell line is a human T lymphocyte cell line | | | |
| | | | available through the ATCC as cell line number TIB-152). | | | |
| 96 | HBIAQ68 | Diabetes | A highly preferred indication is diabetes. Additional highly | Liver | CAP | gb\|AF136380\| |
| | | | preferred indications include complications associated with | | GLUT4 | AF136380 |
| | | | diabetes (e.g., diabetic retinopathy, diabetic nephropathy, kidney | | IRS1 | gb\|M20747\| |
| | | | disease (e.g., renal failure, nephropathy and/or other diseases and | | PPARg | HUMIRGT |
| | | | disorders as described in the “Renal Disorders” section below), | | | gb\|X90563\| |
| | | | diabetic neuropathy, nerve disease and nerve damage (e.g., due | | | HSPPARGAM |
| | | | to diabetic neuropathy), blood vessel blockage, heart disease, | | | |
| | | | stroke, impotence (e.g., due to diabetic neuropathy or blood | | | |
| | | | vessel blockage), seizures, mental confusion, drowsiness, | | | |
| | | | nonketotic hyperglycemic-hyperosmolar coma, cardiovascular | | | |
| | | | disease (e.g., heart disease, atherosclerosis, microvascular | | | |
| | | | disease, hypertension, stroke, and other diseases and disorders as | | | |
| | | | described in the “Cardiovascular Disorders” section below), | | | |
| | | | dyslipidemia, endocrine disorders (as described in the | | | |
| | | | “Endocrine Disorders” section below), neuropathy, vision | | | |
| | | | impairment (e.g., diabetic retinopathy and blindness), ulcers and | | | |
| | | | impaired wound healing, and infection (e.g., infectious diseases | | | |
| | | | and disorders as described in the “Infectious Diseases” section | | | |
| | | | below, especially of the urinary tract and skin). Highly preferred | | | |
| | | | indications also include obesity, weight gain, and weight loss, as | | | |
| | | | well as complications associated with obesity, weight gain, and | | | |
| | | | weight loss. Preferred embodiments of the invention include | | | |
| | | | methods of preventing, detecting, diagnosing, treating and/or | | | |
| | | | ameliorating the above mentioned conditions, disorders, and | | | |
| | | | diseases. | | | |
| 96 | HBIAQ68 | Diabetes | A highly preferred indication is diabetes. Additional highly | NHDF | Insulin | gb\|X70508\| |
| | | | preferred indications include complications associated with | | | HSPPI |
| | | | diabetes (e.g., diabetic retinopathy, diabetic nephropathy, kidney | | | |
| | | | disease (e.g., renal failure, nephropathy and/or other diseases and | | | |
| | | | disorders as described in the “Renal Disorders” section below), | | | |
| | | | diabetic neuropathy, nerve disease and nerve damage (e.g., due | | | |
| | | | to diabetic neuropathy), blood vessel blockage, heart disease, | | | |
| | | | stroke, impotence (e.g., due to diabetic neuropathy or blood | | | |
| | | | vessel blockage), seizures, mental confusion, drowsiness, | | | |
| | | | nonketotic hyperglycemic-hyperosmolar coma, cardiovascular | | | |
| | | | disease (e.g., heart disease, atherosclerosis, microvascular | | | |
| | | | disease, hypertension, stroke, and other diseases and disorders as | | | |
| | | | described in the “Cardiovascular Disorders” section below), | | | |
| | | | dyslipidemia, endocrine disorders (as described in the | | | |
| | | | “Endocrine Disorders” section below), neuropathy, vision | | | |
| | | | impairment (e.g., diabetic retinopathy and blindness), ulcers and | | | |
| | | | impaired wound healing, and infection (e.g., infectious diseases | | | |
| | | | and disorders as described in the “Infectious Diseases” section | | | |
| | | | below, especially of the urinary tract and skin). Highly preferred | | | |
| | | | indications also include obesity, weight gain, and weight loss, as | | | |
| | | | well as complications associated with obesity, weight gain, and | | | |
| | | | weight loss. Preferred embodiments of the invention include | | | |
| | | | methods of preventing, detecting, diagnosing, treating and/or | | | |
| | | | ameliorating the above mentioned conditions, disorders, and | | | |
| | | | diseases. (NHDF cells are normal human dermal fibroblasts). | | | |
| 153 | HCEJK74 | Angiogenesis | Highly preferred indications include diagnosis, prevention, | HUVEC | Flt1 | gb\|AF063657\| |
| | | | treatment, and/or amelioration of diseases and disorders | | | AF063657 |
| | | | involving angiogenesis, wound healing, neoplasia (particularly | | | |
| | | | including, but not limited to, tumor metastases), and | | | |
| | | | cardiovascular diseases and disorders; as described herein under | | | |
| | | | the headings “Hyperproliferative Disorders,” “Regeneration,” | | | |
| | | | “Anti-Angiogenesis Activity,” “Diseases at the Cellular Level,” | | | |
| | | | and “Wound Healing and Epithelial Cell Proliferation.”(HUVEC | | | |
| | | | cells are human umbilical vein endothelial cells). | | | |
| 153 | HCEJK74 | Diabetes | A highly preferred indication is diabetes. Additional highly | Adipocytes- | GLUT4 | gb\|M20747\| |
| | | | preferred indications include complications associated with | Mar. 12, 2001 | Hexo- | HUMIRGT |
| | | | diabetes (e.g., diabetic retinopathy, diabetic nephropathy, kidney | | kinase II | gb\|Z46354\| |
| | | | disease (e.g., renal failure, nephropathy and/or other diseases and | | IRS1 | HSHKEX1 |
| | | | disorders as described in the “Renal Disorders” section below), | | UNCP2 | gb\|AK025742\| |
| | | | diabetic neuropathy, nerve disease and nerve damage (e.g., due | | | AK025742 |
| | | | to diabetic neuropathy), blood vessel blockage, heart disease, | | | |
| | | | stroke, impotence (e.g., due to diabetic neuropathy or blood | | | |
| | | | vessel blockage), seizures, mental confusion, drowsiness, | | | |
| | | | nonketotic hyperglycemic-hyperosmolar coma, cardiovascular | | | |
| | | | disease (e.g., heart disease, atherosclerosis, microvascular | | | |
| | | | disease, hypertension, stroke, and other diseases and disorders as | | | |
| | | | described in the “Cardiovascular Disorders” section below), | | | |
| | | | dyslipidemia, endocrine disorders (as described in the | | | |
| | | | “Endocrine Disorders” section below), neuropathy, vision | | | |
| | | | impairment (e.g., diabetic retinopathy and blindness), ulcers and | | | |
| | | | impaired wound healing, and infection (e.g., infectious diseases | | | |
| | | | and disorders as described in the “Infectious Diseases” section | | | |
| | | | below, especially of the urinary tract and skin). Highly preferred | | | |
| | | | indications also include obesity, weight gain, and weight loss, as | | | |
| | | | well as complications associated with obesity, weight gain, and | | | |
| | | | weight loss. Preferred embodiments of the invention include | | | |
| | | | methods of preventing, detecting, diagnosing, treating and/or | | | |
| | | | ameliorating the above mentioned conditions, disorders, and | | | |
| | | | diseases. | | | |
| 153 | HCEJK74 | Diabetes | A highly preferred indication is diabetes. Additional highly | AOSMC | Acyl CoA | gb\|L09229\| |
| | | | preferred indications include complications associated with | | synthetase | HUMFACAL |
| | | | diabetes (e.g., diabetic retinopathy, diabetic nephropathy, kidney | | IRS2 | gb\|AB000732\| |
| | | | disease (e.g., renal failure, nephropathy and/or other diseases and | | PPARg | AB000732 |
| | | | disorders as described in the “Renal Disorders” section below), | | UNCP2 | gb\|X90563\| |
| | | | diabetic neuropathy, nerve disease and nerve damage (e.g., due | | | HSPPARGAM |
| | | | to diabetic neuropathy), blood vessel blockage, heart disease, | | | gb\|AK025742\| |
| | | | stroke, impotence (e.g., due to diabetic neuropathy or blood | | | AK025742 |
| | | | vessel blockage), seizures, mental confusion, drowsiness, | | | |
| | | | nonketotic hyperglycemic-hyperosmolar coma, cardiovascular | | | |
| | | | disease (e.g., heart disease, atherosclerosis, microvascular | | | |
| | | | disease, hypertension, stroke, and other diseases and disorders as | | | |
| | | | described in the “Cardiovascular Disorders” section below), | | | |
| | | | dyslipidemia, endocrine disorders (as described in the | | | |
| | | | “Endocrine Disorders” section below), neuropathy, vision | | | |
| | | | impairment (e.g., diabetic retinopathy and blindness), ulcers and | | | |
| | | | impaired wound healing, and infection (e.g., infectious diseases | | | |
| | | | and disorders as described in the “Infectious Diseases” section | | | |
| | | | below, especially of the urinary tract and skin). Highly preferred | | | |
| | | | indications also include obesity, weight gain, and weight loss, as | | | |
| | | | well as complications associated with obesity, weight gain, and | | | |
| | | | weight loss. Preferred embodiments of the invention include | | | |
| | | | methods of preventing, detecting, diagnosing, treating and/or | | | |
| | | | ameliorating the above mentioned conditions, disorders, and | | | |
| | | | diseases. (AOSMC cells are human aortic smooth muscle cells). | | | |
| 153 | HCEJK74 | Diabetes | A highly preferred indication is diabetes. Additional highly | Caco-2 | Insulin | gb\|X70508\| |
| | | | preferred indications include complications associated with | | | HSPPI |
| | | | diabetes (e.g., diabetic retinopathy, diabetic nephropathy, kidney | | | |
| | | | disease (e.g., renal failure, nephropathy and/or other diseases and | | | |
| | | | disorders as described in the “Renal Disorders” section below), | | | |
| | | | diabetic neuropathy, nerve disease and nerve damage (e.g., due | | | |
| | | | to diabetic neuropathy), blood vessel blockage, heart disease, | | | |
| | | | stroke, impotence (e.g., due to diabetic neuropathy or blood | | | |
| | | | vessel blockage), seizures, mental confusion, drowsiness, | | | |
| | | | nonketotic hyperglycemic-hyperosmolar coma, cardiovascular | | | |
| | | | disease (e.g., heart disease, atherosclerosis, microvascular | | | |
| | | | disease, hypertension, stroke, and other diseases and disorders as | | | |
| | | | described in the “Cardiovascular Disorders” section below), | | | |
| | | | dyslipidemia, endocrine disorders (as described in the | | | |
| | | | “Endocrine Disorders” section below), neuropathy, vision | | | |
| | | | impairment (e.g., diabetic retinopathy and blindness), ulcers and | | | |
| | | | impaired wound healing, and infection (e.g., infectious diseases | | | |
| | | | and disorders as described in the “Infectious Diseases” section | | | |
| | | | below, especially of the urinary tract and skin). Highly preferred | | | |
| | | | indications also include obesity, weight gain, and weight loss, as | | | |
| | | | well as complications associated with obesity, weight gain, and | | | |
| | | | weight loss. Preferred embodiments of the invention include | | | |
| | | | methods of preventing, detecting, diagnosing, treating and/or | | | |
| | | | ameliorating the above mentioned conditions, disorders, and | | | |
| | | | diseases. (The Caco-2 cell line is a human colorectal | | | |
| | | | adenocarcinoma cell line available through the ATCC as cell line | | | |
| | | | number HTB-37). | | | |
| 153 | HCEJK74 | Diabetes | A highly preferred indication is diabetes. Additional highly | Jurkat | Leptin | gb\|AF281943\| |
| | | | preferred indications include complications associated with | | Resistin | AF281943 |
| | | | diabetes (e.g., diabetic retinopathy, diabetic nephropathy, kidney | | | gb\|AF205952\| |
| | | | disease (e.g., renal failure, nephropathy and/or other diseases and | | | AF205952 |
| | | | disorders as described in the “Renal Disorders” section below), | | | |
| | | | diabetic neuropathy, nerve disease and nerve damage (e.g., due | | | |
| | | | to diabetic neuropathy), blood vessel blockage, heart disease, | | | |
| | | | stroke, impotence (e.g., due to diabetic neuropathy or blood | | | |
| | | | vessel blockage), seizures, mental confusion, drowsiness, | | | |
| | | | nonketotic hyperglycemic-hyperosmolar coma, cardiovascular | | | |
| | | | disease (e.g., heart disease, atherosclerosis, microvascular | | | |
| | | | disease, hypertension, stroke, and other diseases and disorders as | | | |
| | | | described in the “Cardiovascular Disorders” section below), | | | |
| | | | dyslipidemia, endocrine disorders (as described in the | | | |
| | | | “Endocrine Disorders” section below), neuropathy, vision | | | |
| | | | impairment (e.g., diabetic retinopathy and blindness), ulcers and | | | |
| | | | impaired wound healing, and infection (e.g., infectious Diseases | | | |
| | | | and disorders as described in the “Infectious Diseases” section | | | |
| | | | below, especially of the urinary tract and skin). Highly preferred | | | |
| | | | indications also include obesity, weight gain, and weight loss, as | | | |
| | | | well as complications associated with obesity, weight gain, and | | | |
| | | | weight loss. Preferred embodiments of the invention include | | | |
| | | | methods of preventing, detecting, diagnosing, treating and/or | | | |
| | | | ameliorating the above mentioned conditions, disorders, and | | | |
| | | | diseases. (The Jurkat cell line is a human T lymphocyte cell line | | | |
| | | | available through the ATCC as cell line number TIB-152). | | | |
| 153 | HCEJK74 | Diabetes | A highly preferred indication is diabetes. Additional highly | Liver | GLUT2 | gb\|L09683\| |
| | | | preferred indications include complications associated with | | IRS1 | UMGLUT2S10 |
| | | | diabetes (e.g., diabetic retinopathy, diabetic nephropathy, kidney | | PEPCK1 | gb\|L05144\| |
| | | | disease (e.g., renal failure, nephropathy and/or other diseases and | | | HUMPHOCAR |
| | | | disorders as described in the “Renal Disorders” section below), | | | |
| | | | diabetic neuropathy, nerve disease and nerve damage (e.g., due | | | |
| | | | to diabetic neuropathy), blood vessel blockage, heart disease, | | | |
| | | | stroke, impotence (e.g., due to diabetic neuropathy or blood | | | |
| | | | vessel blockage), seizures, mental confusion, drowsiness, | | | |
| | | | nonketotic hyperglycemic-hyperosmolar coma, cardiovascular | | | |
| | | | disease (e.g., heart disease, atherosclerosis, microvascular | | | |
| | | | disease, hypertension, stroke, and other diseases and disorders as | | | |
| | | | described in the “Cardiovascular Disorders” section below), | | | |
| | | | dyslipidemia, endocrine disorders (as described in the | | | |
| | | | “Endocrine Disorders” section below), neuropathy, vision | | | |
| | | | impairment (e.g., diabetic retinopathy and blindness), ulcers and | | | |
| | | | impaired wound healing, and infection (e.g., infectious diseases | | | |
| | | | and disorders as described in the “Infectious Diseases” section | | | |
| | | | below, especially of the urinary tract and skin). Highly preferred | | | |
| | | | indications also include obesity, weight gain, and weight loss, as | | | |
| | | | well as complications associated with obesity, weight gain, and | | | |
| | | | weight loss. Preferred embodiments of the invention include | | | |
| | | | methods of preventing, detecting, diagnosing, treating and/or | | | |
| | | | ameliorating the above mentioned conditions, disorders, and | | | |
| | | | diseases. | | | |
| 153 | HCEJK74 | Diabetes | A highly preferred indication is diabetes. Additional highly | U937 | Insulin | gb\|X70508\| |
| | | | preferred indications include complications associated with | | | HSPPI |
| | | | diabetes (e.g., diabetic retinopathy, diabetic nephropathy, kidney | | | |
| | | | disease (e.g., renal failure, nephropathy and/or other diseases and | | | |
| | | | disorders as described in the “Renal Disorders” section below), | | | |
| | | | diabetic neuropathy, nerve disease and nerve damage (e.g., due | | | |
| | | | to diabetic neuropathy), blood vessel blockage, heart disease, | | | |
| | | | stroke, impotence (e.g., due to diabetic neuropathy or blood | | | |
| | | | vessel blockage), seizures, mental confusion, drowsiness, | | | |
| | | | nonketotic hyperglycemic-hyperosmolar coma, cardiovascular | | | |
| | | | disease (e.g., heart disease, atherosclerosis, microvascular | | | |
| | | | disease, hypertension, stroke, and other diseases and disorders as | | | |
| | | | described in the “Cardiovascular Disorders” section below), | | | |
| | | | dyslipidemia, endocrine disorders (as described in the | | | |
| | | | “Endocrine Disorders” section below), neuropathy, vision | | | |
| | | | impairment (e.g., diabetic retinopathy and blindness), ulcers and | | | |
| | | | impaired wound healing, and infection (e.g., infectious diseases | | | |
| | | | and disorders as described in the “Infectious Diseases” section | | | |
| | | | below, especially of the urinary tract and skin). Highly preferred | | | |
| | | | indications also include obesity, weight gain, and weight loss, as | | | |
| | | | well as complications associated with obesity, weight gain, and | | | |
| | | | weight loss. Preferred embodiments of the invention include | | | |
| | | | methods of preventing, detecting, diagnosing, treating and/or | | | |
| | | | ameliorating the above mentioned conditions, disorders, and | | | |
| | | | diseases. (The U937 cell line is a human monocyte cell line | | | |
| | | | available through the ATCC as cell line number CRL-1593.2). | | | |
| 169 | HCNCA73 | Angiogenesis | Highly preferred indications include diagnosis, prevention, | AOSMC | ICAM | gb\|X06990\| |
| | | | treatment, and/or amelioration of diseases and disorders | | PAI | HSICAM1 |
| | | | involving angiogenesis, wound healing, neoplasia (particularly | | VCAM | gb\|X12701\| |
| | | | including, but not limited to, tumor metastases), and | | Vegf1 | HSENDPAI |
| | | | cardiovascular diseases and disorders; as described herein under | | | gb\|A30922\| |
| | | | the headings “Hyperproliferative Disorders,” “Regeneration,” | | | A30922 |
| | | | “Anti-Angiogenesis Activity,” “Diseases at the Cellular Level,” | | | gb\|AF024710\| |
| | | | and “Wound Healing and Epithelial Cell Proliferation.”(AOSMC | | | AF024710 |
| | | | cells are aortic smooth muscle cells). | | | |
| 169 | HCNCA73 | Angiogenesis | Highly preferred indications include diagnosis, prevention, | Caco-2 | ICAM | gb\|X06990\| |
| | | | treatment, and/or amelioration of diseases and disorders | | iNOS | HSICAM1 |
| | | | involving angiogenesis, wound healing, neoplasia (particularly | | TSP-1 | gb\|X85761\| |
| | | | including, but not limited to, tumor metastases), and | | | HSNOS2E3 |
| | | | cardiovascular diseases and disorders; as described herein under | | | gb\|X04665\| |
| | | | the headings “Hyperproliferative Disorders,” “Regeneration,” | | | HSTHROMR |
| | | | “Anti-Angiogenesis Activity,” “Diseases at the Cellular Level,” | | | |
| | | | and “Wound Healing and Epithelial Cell Proliferation.”(The | | | |
| | | | Caco-2 cell line is a human colorectal adenocarcinoma cell line | | | |
| | | | available through the ATCC as cell line number HTB-37). | | | |
| 169 | HCNCA73 | Angiogenesis | Highly preferred indications include diagnosis, prevention, | Daudi | Vegf1 | gb\|AF024710\| |
| | | | treatment, and/or amelioration of diseases and disorders | | | AF024710 |
| | | | involving angiogenesis, wound healing, neoplasia (particularly | | | |
| | | | including, but not limited to, tumor metastases), and | | | |
| | | | cardiovascular diseases and disorders; as described herein under | | | |
| | | | the headings “Hyperproliferative Disorders,” “Regeneration,” | | | |
| | | | “Anti-Angiogenesis Activity,” “Diseases at the Cellular Level,” | | | |
| | | | and “Wound Healing and Epithelial Cell Proliferation.”(The | | | |
| | | | Daudi cell line is a human B lymphoblast cell line available | | | |
| | | | through the ATCC as cell line number CCL-213). | | | |
| 169 | HCNCA73 | Angiogenesis | Highly preferred indications include diagnosis, prevention, | HEK293 | iNOS | gb\|X85761\| |
| | | | treatment, and/or amelioration of diseases and disorders | | TSP-1 | HSNOS2E3 |
| | | | involving angiogenesis, wound healing, neoplasia (particularly | | VCAM | gb\|X04665\| |
| | | | including, but not limited to, tumor metastases), and | | Vegf1 | HSTHROMR |
| | | | cardiovascular diseases and disorders; as described herein under | | | gb\|A30922\| |
| | | | the headings “Hyperproliferative Disorders,” “Regeneration,” | | | A30922 |
| | | | “Anti-Angiogenesis Activity,” “Diseases at the Cellular Level,” | | | gb\|AF024710\| |
| | | | and “Wound Healing and Epithelial Cell Proliferation.”(The | | | AF024710 |
| | | | HEK293 cell line is a human embryonal kidney epithelial cell | | | |
| | | | line available through the ATCC as cell line number CRL-1573). | | | |
| 169 | HCNCA73 | Angiogenesis | Highly preferred indications include diagnosis, prevention, | HUVEC | ICAM | gb\|X06990\| |
| | | | treatment, and/or amelioration of diseases and disorders | | VCAM | HSICAM1 |
| | | | involving angiogenesis, wound healing, neoplasia (particularly | | | gb\|A30922\| |
| | | | including, but not limited to, tumor metastases), and | | | A30922 |
| | | | cardiovascular diseases and disorders; as described herein under | | | |
| | | | the headings “Hyperproliferative Disorders,” “Regeneration,” | | | |
| | | | “Anti-Angiogenesis Activity,” “Diseases at the Cellular Level,” | | | |
| | | | and “Wound Healing and Epithelial Cell Proliferation.”(HUVEC | | | |
| | | | cells are human umbilical vein endothelial cells). | | | |
| 169 | HCNCA73 | Angiogenesis | Highly preferred indications include diagnosis, prevention, | Jurkat | Flt1 | gb\|AF063657\| |
| | | | treatment, and/or amelioration of diseases and disorders | | VCAM | AF063657 |
| | | | involving angiogenesis, wound healing, neoplasia (particularly | | | gb\|A30922\| |
| | | | including, but not limited to, tumor metastases), and | | | A30922 |
| | | | cardiovascular diseases and disorders; as described herein under | | | |
| | | | the headings “Hyperproliferative Disorders,” “Regeneration,” | | | |
| | | | “Anti-Angiogenesis Activity,” “Diseases at the Cellular Level,” | | | |
| | | | and “Wound Healing and Epithelial Cell Proliferation.”(The | | | |
| | | | Jurkat cell line is a human T lymphocyte cell line available | | | |
| | | | through the ATCC as cell line number TIB-152). | | | |
| 169 | HCNCA73 | Angiogenesis | Highly preferred indications include diagnosis, prevention, | Liver | VCAM | gb\|A30922\| |
| | | | treatment, and/or amelioration of diseases and disorders | | | A30922 |
| | | | involving angiogenesis, wound healing, neoplasia (particularly | | | |
| | | | including, but not limited to, tumor metastases), and | | | |
| | | | cardiovascular diseases and disorders; as described herein under | | | |
| | | | the headings “Hyperproliferative Disorders,” “Regeneration,” | | | |
| | | | “Anti-Angiogenesis Activity,” “Diseases at the Cellular Level,” | | | |
| | | | and “Wound Healing and Epithelial Cell Proliferation.” | | | |
| 169 | HCNCA73 | Angiogenesis | Highly preferred indications include diagnosis, prevention, | NHDF | VCAM | gb\|A30922\| |
| | | | treatment, and/or amelioration of diseases and disorders | | | A30922 |
| | | | involving angiogenesis, wound healing, neoplasia (particularly | | | |
| | | | including, but not limited to, tumor metastases), and | | | |
| | | | cardiovascular diseases and disorders; as described herein under | | | |
| | | | the headings “Hyperproliferative Disorders,” “Regeneration,” | | | |
| | | | “Anti-Angiogenesis Activity,” “Diseases at the Cellular Level,” | | | |
| | | | and “Wound Healing and Epithelial Cell Proliferation.”(NHDF | | | |
| | | | cells are normal human dermal fibroblasts). | | | |
| 169 | HCNCA73 | Angiogenesis | Highly preferred indications include diagnosis, prevention, | T cell | Flt1 | gb\|AF063657\| |
| | | | treatment, and/or amelioration of diseases and disorders | | PAI | AF063657 |
| | | | involving angiogenesis, wound healing, neoplasia (particularly | | TSP-1 | gb\|X12701\| |
| | | | including, but not limited to, tumor metastases), and | | | HSENDPAI |
| | | | cardiovascular diseases and disorders; as described herein under | | | gb\|X04665\| |
| | | | the headings “Hyperproliferative Disorders,” “Regeneration,” | | | HSTHROMR |
| | | | “Anti-Angiogenesis Activity,” “Diseases at the Cellular Level,” | | | |
| | | | and “Wound Healing and Epithelial Cell Proliferation.” | | | |
| 169 | HCNCA73 | Angiogenesis | Highly preferred indications include diagnosis, prevention, | U937 | ICAM | gb\|X06990\| |
| | | | treatment, and/or amelioration of diseases and disorders | | VCAM | HSICAM1 |
| | | | involving angiogenesis, wound healing, neoplasia (particularly | | | gb\|A30922\| |
| | | | including, but not limited to, tumor metastases), and | | | A30922 |
| | | | cardiovascular diseases and disorders; as described herein under | | | |
| | | | the headings “Hyperproliferative Disorders,” “Regeneration,” | | | |
| | | | “Anti-Angiogenesis Activity,” “Diseases at the Cellular Level,” | | | |
| | | | and “Wound Healing and Epithelial Cell Proliferation.”(The | | | |
| | | | U937 cell line is a human monocyte cell line available through | | | |
| | | | the ATCC as cell line number CRL-1593.2). | | | |
| 169 | HCNCA73 | Cancer | Highly preferred indications include neoplastic diseases (e.g. | Caco-2 | bcl-2 | gb\|X06487\| |
| | | | cancer) such as described herein under the heading | | c-fos | HSBCL2IG |
| | | | “Hyperproliferative disordersî (particularly including, but not | | Cyclin A1 | gb\|BC004490\| |
| | | | limited to, cancer involving cells of the gastrointestinal tract). | | | BC004490 |
| | | | Highly preferred embodiments of the invention include methods | | | gb\|U97680\| |
| | | | of preventing, detecting, diagnosing, treating and/or ameliorating | | | HSU97680 |
| | | | cancer and hyperproliferative disorders involving the | | | |
| | | | gastrointestinal tract. (The Caco-2 cell line is a human colorectal | | | |
| | | | adenocarcinoma cell line available through the ATCC as cell line | | | |
| | | | number HTB-37). | | | |
| 169 | HCNCA73 | Cancer | Highly preferred indications include neoplastic diseases (e.g. | HEK293 | Bax | gb\|AF250190\| |
| | | | cancer) such as described herein under the heading | | bcl-2 | AF250190 |
| | | | “Hyperproliferative disordersî (particularly including, but not | | c-jun | gb\|X06487\| |
| | | | limited to, cancers of epithelial cells or cancers involving the | | Cyclin A1 | HSBCL2IG |
| | | | renal system). Highly preferred embodiments of the invention | | Cyclin D | gb\|BC006175\| |
| | | | include methods of preventing, detecting, diagnosing, treating | | Cyclin D2 | BC006175 |
| | | | and/or ameliorating cancer and hyperproliferative disorders | | Egr1 | gb\|U97680\| |
| | | | involving epithelial cells or the renal system. (The 293 cell line | | p21 | HSU97680 |
| | | | human embryonal kidney epithelial cell line available through | | | gb\|BC000076\| |
| | | | the ATCC as cell line number CRL-1573). | | | BC000076 |
| | | | | | | gb\|X68452\| |
| | | | | | | HSCYCD2 |
| | | | | | | gb\|BC000275\| |
| | | | | | | BC000275 |
| 169 | HCNCA73 | Cancer | Highly preferred indications include neoplastic diseases (e.g. | HUVEC | Cyclin A1 | gb\|U97680\| |
| | | | cancer) such as described herein under the heading | | DHFR | HSU97680 |
| | | | “Hyperproliferative disordersî (particularly including, but not | | M1 RIBO | gb\|V00507\| |
| | | | limited to, cancers involving endothelial cells). Highly preferred | | R | HSDHFR |
| | | | embodiments of the invention include methods of preventing, | | | gb\|X59543\| |
| | | | detecting, diagnosing, treating and/or ameliorating cancer and | | | HSRIREM1 |
| | | | hyperproliferative disorders involving endothelial cells. | | | |
| | | | (HUVEC cells are human umbilical vein endothelial cells). | | | |
| 169 | HCNCA73 | Cancer | Highly preferred indications include neoplastic diseases (e.g. | Jurkat | Cyclin D | gb\|BC000076\| |
| | | | cancer) such as described herein under the heading | | Cyclin D2 | BC000076 |
| | | | “Hyperproliferative Disordersî (particularly including, but not | | Egr1 | gb\|X68452\| |
| | | | limited to, cancers of immune cells, such as T-cells). Highly | | | HSCYCD2 |
| | | | preferred embodiments of the invention include methods of | | | |
| | | | preventing, detecting, diagnosing, treating and/or ameliorating | | | |
| | | | cancer and hyperproliferative disorders involving immune cells | | | |
| | | | (such as T-cells). (The Jurkat cell line is a human T lymphocyte | | | |
| | | | cell line available through the ATCC as cell line number TIB- | | | |
| | | | 152). | | | |
| 169 | HCNCA73 | Cancer | Highly preferred indications include neoplastic diseases (e.g. | Liver | U66469 | |
| | | | cancer) such as described herein under the heading | | p53 | |
| | | | “Hyperproliferative Disordersî (particularly including, but not | | regulated | |
| | | | limited to, cancers involving cells of the hepatic system). Highly | | gene | |
| | | | preferred embodiments of the invention include methods of | | | |
| | | | preventing, detecting, diagnosing, treating and/or ameliorating | | | |
| | | | cancer and hyperproliferative disorders involving cells of the | | | |
| | | | hepatic system. | | | |
| 169 | HCNCA73 | Cancer | Highly preferred indications include neoplastic diseases (e.g. | NHDF | DHFR | gb\|V00507\| |
| | | | cancer) such as described herein under the heading | | TAA6 | HSDHFR |
| | | | “Hyperproliferative Disordersî (particularly including, but not | | | gb\|I34297\| |
| | | | limited to cancers involving cells of the skin). Highly preferred | | | I34297 |
| | | | embodiments of the invention include methods of preventing, | | | |
| | | | detecting, diagnosing, treating and/or ameliorating cancer and | | | |
| | | | hyperproliferative disorders involving skin cells. (NHDF cells | | | |
| | | | are normal human dermal fibroblasts). | | | |
| 169 | HCNCA73 | Cancer | Highly preferred indications include neoplastic diseases (e.g. | T cell | beta- | gb\|BC000076\| |
| | | | cancer) such as described herein under the heading | | catenin | BC000076 |
| | | | “Hyperproliferative Disordersî (particularly including, but not | | Cyclin D | gb\|BC000275\| |
| | | | limited to, cancers of immune cells, such as T-cells). Highly | | p21 | BC000275 |
| | | | preferred embodiments of the invention include methods of | | | |
| | | | preventing, detecting, diagnosing, treating and/or ameliorating | | | |
| | | | cancer and hyperproliferative disorders involving cells of the | | | |
| | | | immune system (such as T-cells). | | | |
| 169 | HCNCA73 | Cancer | Highly preferred indications include neoplastic diseases (e.g. | THP1 | c-fos | gb\|BC004490\| |
| | | | cancer) such-as described herein under the heading | | Cyclin A1 | BC004490 |
| | | | “Hyperproliferative Disordersî (particularly including, but not | | p21 | gb\|U97680\| |
| | | | limited to, cancers of immune cells, such as monocytes). Highly | | | HSU97680 |
| | | | preferred embodiments of the invention include methods of | | | gb\|BC000275\| |
| | | | preventing, detecting, diagnosing, treating and/or ameliorating | | | BC000275 |
| | | | cancer and hyperproliferative disorders involving cells of the | | | |
| | | | immune system (such as monocytes). (The THP-1 cell line is a | | | |
| | | | human monocyte cell line available through the ATCC as cell | | | |
| | | | line number TIB-202). | | | |
| 169 | HCNCA73 | Cancer | Highly preferred indications include neoplastic diseases (e.g. | U937 | Cyclin A1 | gb\|U97680\| |
| | | | cancer) such as described herein under the heading | | Cyclin D | HSU97680 |
| | | | “Hyperproliferative Disordersî (particularly including, but not | | Cyclin D2 | gb\|BC000076\| |
| | | | limited to, cancers of immune cells, such as monocytes). Highly | | | BC000076 |
| | | | preferred embodiments of the invention include methods of | | | gb\|X68452\| |
| | | | preventing, detecting, diagnosing, treating and/or ameliorating | | | HSCYCD2 |
| | | | cancer and hyperproliferative disorders involving cells of the | | | |
| | | | immune system (such as monocytes). (The U-937 cell line is a | | | |
| | | | human monocyte cell line available through the ATCC as cell | | | |
| | | | line number CRL-1593.2) | | | |
| 169 | HCNCA73 | Immune | Highly preferred indications include immunological disorders | AOSMC | CIS3 | gb\|AB006967\| |
| | | | such as described herein under the heading “Immune Activity” | | ICAM | AB006967 |
| | | | and/or “Blood-Related Disorders” (particularly including, but not | | Rag1 | gb\|X06990\| |
| | | | limited to, immune disorders involving muscle tissues and the | | VCAM | HSICAM1 |
| | | | cardiovascular system (e.g. heart, lungs, circulatory system)). | | | gb\|M29474\| |
| | | | Highly preferred embodiments of the invention include methods | | | HUMRAG1 |
| | | | of preventing, detecting, diagnosing, treating and/or ameliorating | | | gb\|A30922\| |
| | | | disorders of the immune system (particularly including, but not | | | A30922 |
| | | | limited to, immune disorders involving muscle tissue or the | | | |
| | | | cardiovascular system). (AOSMC cells are human aortic smooth | | | |
| | | | muscle cells). | | | |
| 169 | HCNCA73 | Immune | Highly preferred indications include immunological disorders | Caco-2 | ICAM | gb\|X06990\| |
| | | | such as described herein under the heading “Immune Activity” | | | HSICAM1 |
| | | | and/or “Blood-Related Disorders” (particularly including, but not | | | |
| | | | limited to, immune disorders involving the cells of the | | | |
| | | | gastrointestinal tract). Highly preferred embodiments of the | | | |
| | | | invention include methods of preventing, detecting, diagnosing, | | | |
| | | | treating and/or ameliorating disorders of the immune system | | | |
| | | | (particularly including, but not limited to, immune disorders | | | |
| | | | involving cells of the gastrointestinal tract). (The Caco-2 cell line | | | |
| | | | is a human colorectal adenocarcinoma cell line available through | | | |
| | | | the ATCC as cell line number HTB-37). | | | |
| 169 | HCNCA73 | Immune | Highly preferred indications include immunological disorders | Daudi | CD25 | gb\|X03137\| |
| | | | such as described herein under the heading “Immune Activity” | | Rag1 | HSIL2RG7 |
| | | | and/or “Blood-Related Disorders” (particularly including, but not | | Rag2 | gb\|M29474\| |
| | | | limited to, immune disorders involving the B-cells). Highly | | | HUMRAG1 |
| | | | preferred embodiments of the invention include methods of | | | gb\|AY011962\| |
| | | | preventing, detecting, diagnosing, treating and/or ameliorating | | | AY011962 |
| | | | disorders of the immune system (particularly including, but not | | | |
| | | | limited to, immune disorders involving B-cells). (The Daudi cell | | | |
| | | | line is a human B lymphoblast cell line available through the | | | |
| | | | ATCC as cell line number CCL-213). | | | |
| 169 | HCNCA73 | Immune | Highly preferred indications include immunological disorders | HEK293 | CD30 | gb\|X55037\| |
| | | | such as described herein under the heading “Immune Activity” | | GATA3 | HSGATA3 |
| | | | and/or “Blood-Related Disorders” (particularly including, but not | | HLA-c | gb\|AK027080\| |
| | | | limited to, immune disorders involving epithelial cells or the | | LTBR | AK027080 |
| | | | renal system). Highly preferred embodiments of the invention | | Rag1 | gb\|M29474\| |
| | | | include methods of preventing, detecting, diagnosing, treating | | VCAM | HUMRAG1 |
| | | | and/or ameliorating disorders of the immune system (particularly | | | gb\|A30922\| |
| | | | including, but not limited to, immune disorders involving | | | A30922 |
| | | | epithelial cells or the renal system). (The 293 cell line is a human | | | |
| | | | embryonal kidney epithelial cell line available through the ATCC | | | |
| | | | as cell line number CRL-1573). | | | |
| 169 | HCNCA73 | Immune | Highly preferred indications include immunological disorders | HUVEC | CD40 | gb\|AJ300189\| |
| | | | such as described herein under the heading “Immune Activity” | | CIS3 | HSA30018 |
| | | | and/or “Blood-Related Disorders” (particularly including, but not | | ICAM | gb\|AB006967\| |
| | | | limited to, immune disorders involving endothelial cells). Highly | | I16 | AB006967 |
| | | | preferred embodiments of the invention include methods of | | VCAM | gb\|X06990\| |
| | | | preventing, detecting, diagnosing, treating and/or ameliorating | | | HSICAM1 |
| | | | disorders of the immune system (particularly including, but not | | | gb\|X04403\| |
| | | | limited to, immune disorders involving endothelial cells). | | | HS26KDAR |
| | | | (HUVEC cells are human umbilical vein endothelial cells). | | | gb\|A30922\| |
| | | | | | | A30922 |
| 169 | HCNCA73 | Immune | Highly preferred indications include immunological disorders | Jurkat | IL5 | gb\|X12705\| |
| | | | such as described herein under the heading “Immune Activity” | | VCAM | HSBCDFIA |
| | | | and/or “Blood-Related Disorders” (particularly including, but not | | | gb\|A30922\| |
| | | | limited to, immune disorders involving T-cells). Highly | | | A30922 |
| | | | preferred embodiments of the invention include methods of | | | |
| | | | preventing, detecting, diagnosing, treating and/or ameliorating | | | |
| | | | disorders of the immune system (particularly including, but not | | | |
| | | | limited to, immune disorders involving T-cells). (The Jurkat cell | | | |
| | | | line is a human T lymphocyte cell line available through the | | | |
| | | | ATCC as cell line number TIB-152). | | | |
| 169 | HCNCA73 | Immune | Highly preferred indications include immunological disorders | Liver | VCAM | gb\|A30922\| |
| | | | such as described herein under the heading “Immune Activity” | | | A30922 |
| | | | and/or “Blood-Related Disorders” (particularly including, but not | | | |
| | | | limited to, immune disorders involving cells of the hepatic | | | |
| | | | system). Highly preferred embodiments of the invention include | | | |
| | | | methods of preventing, detecting, diagnosing, treating and/or | | | |
| | | | ameliorating disorders of the immune system (particularly | | | |
| | | | including, but not limited to, immune disorders involving cells of | | | |
| | | | the hepatic system). | | | |
| 169 | HCNCA73 | Immune | Highly preferred indications include immunological disorders | NHDF | GATA1 | gb\|X17254\| |
| | | | such as described herein under the heading “Immune Activity” | | I16 | HSERYF1 |
| | | | and/or “Blood-Related Disorders” (particularly including, but not | | VCAM | gb\|X0443\| |
| | | | limited to, immune disorders involving the skin). Highly | | | HS26KDAR |
| | | | preferred embodiments of the invention include methods of | | | gb\|A30922\| |
| | | | preventing, detecting, diagnosing, treating and/or ameliorating | | | A30922 |
| | | | disorders of the immune system (particularly including, but not | | | |
| | | | limited to, immune disorders involving the skin). (NHDF cells | | | |
| | | | are normal human dermal fibroblasts). | | | |
| 169 | HCNCA73 | Immune | Highly preferred indications include immunological disorders | T cell | CD40 | gb\|AJ300189\| |
| | | | such as described herein under the heading “Immune Activity” | | CD69 | HSA30018 |
| | | | and/or “Blood-Related Disorders” (particularly including, but not | | CXCR3 | gb\|Z22576\| |
| | | | limited to, immune disorders involving T-cells). Highly | | Granzyme | HSCD69GNA |
| | | | preferred embodiments of the invention include methods of | | B TNF | gb\|Z79783\| |
| | | | preventing, detecting, diagnosing, treating and/or ameliorating | | VLA4 | HSCKRL2 |
| | | | disorders of the immune system (particularly including, but not | | | gb\|J04071\| |
| | | | limited to, immune disorders involving T-cells). | | | HUMCSE gb\| |
| | | | | | | AJ270944\| |
| | | | | | | HSA27094 |
| | | | | | | gb\|X16983\| |
| | | | | | | HSINTAL4 |
| 169 | HCNCA73 | Immune | Highly preferred indications include immunological disorders | THP1 | CIS3 | gb\|AB006967\| |
| | | | such as described herein under the heading “Immune Activity” | | Rag1 | AB006967 |
| | | | and or “Blood-Related Disorders” (particularly including, but not | | TNF | gb\|M29474\| |
| | | | limited to, immune disorders involving monocytes). Highly | | | HUMRAG1 |
| | | | preferred embodiments of the invention include methods of | | | gb\|AJ270944\| |
| | | | preventing, detecting, diagnosing, treating and/or ameliorating | | | HSA27094 |
| | | | disorders of the immune system (particularly including, but not | | | |
| | | | limited to, immune disorders involving monocytes). (The THP1 | | | |
| | | | cell line is a human monocyte cell line available through the | | | |
| | | | ATCC as cell line number TIB-202). | | | |
| 169 | HCNCA73 | Immune | Highly preferred indications include immunological disorders | U937 | ICAM | gb\|X06990\| |
| | | | such as described herein under the heading “Immune Activity” | | IL1B | HSICAM1 |
| | | | and/or “Blood-Related Disorders” (particularly including, but not | | VCAM | gb\|X02532\| |
| | | | limited to, immune disorders involving monocytes). Highly | | | HSIL1BR |
| | | | preferred embodiments of the invention include methods of | | | gb\|A30922\| |
| | | | preventing, detecting, diagnosing, treating and/or ameliorating | | | A30922 |
| | | | disorders of the immune system (particularly including, but not | | | |
| | | | limited to, immune disorders involving monocytes). (The U937 | | | |
| | | | cell line is a human monocyte cell line available through the | | | |
| | | | ATCC as cell line number CRL-1593.2). | | | |
| 325 | HE9FX37 | Angiogenesis | Highly preferred indications include diagnosis, prevention, | Caco-2 | TSP-1 | gb\|X04665\| |
| | | | treatment, and/or amelioration of diseases and disorders | | Vegf1 | HSTHROMR |
| | | | involving angiogenesis, wound healing, neoplasia (particularly | | | gb\|AF024710\| |
| | | | including, but not limited to, tumor metastases), and | | | AF024710 |
| | | | cardiovascular diseases and disorders; as described herein under | | | |
| | | | the headings “Hyperproliferative Disorders,” “Regeneration,” | | | |
| | | | “Anti-Angiogenesis Activity,” “Diseases at the Cellular Level,” | | | |
| | | | and “Wound Healing and Epithelial Cell Proliferation.”(The | | | |
| | | | Caco-2 cell line is a human colorectal adenocarcinoma cell line | | | |
| | | | available through the ATCC as cell line number HTB-37). | | | |
| 325 | HE9FX37 | Angiogenesis | Highly preferred indications include diagnosis, prevention, | HEK293 | Cycloox | |
| | | | treatment, and/or amelioration of diseases and disorders | | | |
| | | | involving angiogenesis, wound healing, neoplasia (particularly | | | |
| | | | including, but not limited to, tumor metastases), and | | | |
| | | | cardiovascular diseases and disorders; as described herein under | | | |
| | | | the headings “Hyperproliferative Disorders,” “Regeneration,” | | | |
| | | | “Anti-Angiogenesis Activity,” “Diseases at the Cellular Level,” | | | |
| | | | and “Wound Healing and Epithelial Cell Proliferation.”(The | | | |
| | | | HEK293 cell line is a human embryonal kidney epithelial cell | | | |
| | | | line available through the ATCC as cell line number CRL-1573). | | | |
| 325 | HE9FX37 | Angiogenesis | Highly preferred indications include diagnosis, prevention, | HUVEC | ICAM | gb\|X06990\| |
| | | | treatment, and/or amelioration of diseases and disorders | | PAI | HSICAM1 |
| | | | involving angiogenesis, wound healing, neoplasia (particularly | | | gb\|X12701\| |
| | | | including, but not limited to, tumor metastases), and | | | HSENDPAI |
| | | | cardiovascular diseases and disorders; as described herein under | | | |
| | | | the headings “Hyperproliferative Disorders,” “Regeneration,” | | | |
| | | | “Anti-Angiogenesis Activity,” “Diseases at the Cellular Level,” | | | |
| | | | and “Wound Healing and Epithelial Cell Proliferation.”(HUVEC | | | |
| | | | cells are human umbilical vein endothelial cells). | | | |
| 325 | HE9FX37 | Angiogenesis | Highly preferred indications include diagnosis, prevention, | Jurkat | iNOS | gb\|X85761\| |
| | | | treatment, and/or amelioration of diseases and disorders | | VCAM | HSNOS2E3 |
| | | | involving angiogenesis, wound healing, neoplasia (particularly | | | gb\|A30922\| |
| | | | including, but not limited to, tumor metastases), and | | | A30922 |
| | | | cardiovascular diseases and disorders; as described herein under | | | |
| | | | the headings “Hyperproliferative Disorders,” “Regeneration,” | | | |
| | | | “Anti-Angiogenesis Activity,” “Diseases at the Cellular Level,” | | | |
| | | | and “Wound Healing and Epithelial Cell Proliferation.”(The | | | |
| | | | Jurkat cell line is a human T lymphocyte cell line available | | | |
| | | | through the ATCC as cell line number TIB-152). | | | |
| 325 | HE9FX37 | Angiogenesis | Highly preferred indications include diagnosis, prevention, | Liver | PAI | gb\|X12701\| |
| | | | treatment, and/or amelioration of diseases and disorders | | | HSENDPAI |
| | | | involving angiogenesis, wound healing, neoplasia (particularly | | | |
| | | | including, but not limited to, tumor metastases), and | | | |
| | | | cardiovascular diseases and disorders; as described herein under | | | |
| | | | the headings “Hyperproliferative Disorders,” “Regeneration,” | | | |
| | | | “Anti-Angiogenesis Activity,” “Diseases at the Cellular Level,” | | | |
| | | | and “Wound Healing and Epithelial Cell Proliferation.” | | | |
| 325 | HE9FX37 | Angiogenesis | Highly preferred indications include diagnosis, prevention, | NHDF | Vegf1 | gb\|AF024710\| |
| | | | treatment, and/or amelioration of diseases and disorders | | | AF024710 |
| | | | involving angiogenesis, wound healing, neoplasia (particularly | | | |
| | | | including, but not limited to, tumor metastases), and | | | |
| | | | cardiovascular diseases and disorders; as described herein under | | | |
| | | | the headings “Hyperproliferative Disorders,” “Regeneration,” | | | |
| | | | “Anti-Angiogenesis Activity,” “Diseases at the Cellular Level,” | | | |
| | | | and “Wound Healing and Epithelial Cell Proliferation.”(NHDF | | | |
| | | | cells are normal human dermal fibroblasts). | | | |
| 325 | HE9FX37 | Angiogenesis | Highly preferred indications include diagnosis, prevention, | SK-N-MC | Cycloox | |
| | | | treatment, and/or amelioration of diseases and disorders | neuroblastoma | | |
| | | | involving angiogenesis, wound healing, neoplasia (particularly | | | |
| | | | including, but not limited to, tumor metastases), and | | | |
| | | | cardiovascular diseases and disorders; as described herein under | | | |
| | | | the headings “Hyperproliferative Disorders,” “Regeneration,” | | | |
| | | | “Anti-Angiogenesis Activity,” “Diseases at the Cellular Level,” | | | |
| | | | and “Wound Healing and Epithelial Cell Proliferation.”(The SK- | | | |
| | | | N-MC neuroblastoma cell line is a cell line derived from human | | | |
| | | | brain tissue available through the ATCC as cell line number | | | |
| | | | HTB-10). | | | |
| 325 | HE9FX37 | Angiogenesis | Highly preferred indications include diagnosis, prevention, | Th2- | Cycloox | gb\|AF063657\| |
| | | | treatment, and/or amelioration of diseases and disorders | | Flt1 | AF063657 |
| | | | involving angiogenesis, wound healing, neoplasia (particularly | | | |
| | | | including, but not limited to, tumor metastases), and | | | |
| | | | cardiovascular diseases and disorders; as described herein under | | | |
| | | | the headings “Hyperproliferative Disorders,” “Regeneration,” | | | |
| | | | “Anti-Angiogenesis Activity,” “Diseases at the Cellular Level,” | | | |
| | | | and “Wound Healing and Epithelial Cell Proliferation.”(Th2 cells | | | |
| | | | are human T-cells). | | | |
| 325 | HE9FX37 | Cancer | Highly preferred indications include neoplastic diseases (e.g. | Caco-2 | bcl-2 | gb\|X06487\| |
| | | | cancer) such as described herein under the heading | | beta- | HSBCL2IG |
| | | | “Hyperproliferative Disordersî (particularly including, but not | | catenin | gb\|BC000076\| |
| | | | limited to, cancer involving cells of the gastrointestinal tract). | | Cyclin D | BC000076 |
| | | | Highly preferred embodiments of the invention include methods | | | |
| | | | of preventing, detecting, diagnosing, treating and/or ameliorating | | | |
| | | | cancer and hyperproliferative disorders involving the | | | |
| | | | gastrointestinal tract. (The Caco-2 cell line is a human colorectal | | | |
| | | | adenocarcinoma cell line available through the ATCC as cell line | | | |
| | | | number HTB-37). | | | |
| 325 | HE9FX37 | Cancer | Highly preferred indications include neoplastic diseases (e.g. | Daudi | Egr1 | |
| | | | cancer) such as described herein under the heading | | | |
| | | | “Hyperproliferative Disordersî (particularly including, but not | | | |
| | | | limited to, cancers of immune cells, such as B-cells). Highly | | | |
| | | | preferred embodiments of the invention include methods of | | | |
| | | | preventing, detecting, diagnosing, treating and/or ameliorating | | | |
| | | | cancer and hyperproliferative disorders involving immune cells | | | |
| | | | (such as B-cells). (The Daudi cell line is a human B lymphoblast | | | |
| | | | cell line available through the ATCC as cell line number CCL- | | | |
| | | | 213). | | | |
| 325 | HE9FX37 | Cancer | Highly preferred indications include neoplastic diseases (e.g. | HEK293 | c-jun | gb\|BC006175\| |
| | | | cancer) such as described herein under the heading | | Egr1 | BC006175 |
| | | | “Hyperproliferative Disordersî (particularly including, but not | | | |
| | | | limited to, cancers of epithelial cells or cancers involving the | | | |
| | | | renal system). Highly preferred embodiments of the invention | | | |
| | | | include methods of preventing, detecting, diagnosing, treating | | | |
| | | | and/or ameliorating cancer and hyperproliferative disorders | | | |
| | | | involving epithelial cells or the renal system. (The 293 cell line | | | |
| | | | human embryonal kidney epithelial cell line available through | | | |
| | | | the ATCC as cell line number CRL-1573). | | | |
| 325 | HE9FX37 | Cancer | Highly preferred indications include neoplastic diseases (e.g. | HUVEC | Cyclin D | gb\|BC000076\| |
| | | | cancer) such as described herein under the heading | | Egr1 | BC000076 |
| | | | “Hyperproliferative Disordersî (particularly including, but not | | | |
| | | | limited to, cancers involving endothelial cells). Highly preferred | | | |
| | | | embodiments of the invention include methods of preventing, | | | |
| | | | detecting, diagnosing, treating and/or ameliorating cancer and | | | |
| | | | hyperproliferative disorders involving endothelial cells. | | | |
| | | | (HUVEC cells are human umbilical vein endothelial cells). | | | |
| 325 | HE9FX37 | Cancer | Highly preferred indications include neoplastic diseases (e.g. | Jurkat | Cyclin A1 | gb\|U97680\| |
| | | | cancer) such as described herein under the heading | | Cyclin D2 | HSU97680 |
| | | | “Hyperproliferative Disordersî (particularly including, but not | | | gb\|X68452\| |
| | | | limited to, cancers of immune cells, such as T-cells). Highly | | | HSCYCD2 |
| | | | preferred embodiments of the invention include methods of | | | |
| | | | preventing, detecting, diagnosing, treating and/or ameliorating | | | |
| | | | cancer and hyperproliferative disorders involving immune cells | | | |
| | | | (such as T-cells). (The Jurkat cell line is a human T lymphocyte | | | |
| | | | cell line available through the ATCC as cell line number TIB- | | | |
| | | | 152). | | | |
| 325 | HE9FX37 | Cancer | Highly preferred indications include neoplastic diseases (e.g. | NHDF | bcl-2 | gb\|X06487\| |
| | | | cancer) such as described herein under the heading | | Cyclin D3 | HSBCL2IG |
| | | | “Hyperproliferative Disordersî (particularly including, but not | | DHFR | gb\|AR034832\| |
| | | | limited to cancers involving cells of the skin). Highly preferred | | M1 RIBO | AR034832 |
| | | | embodiments of the invention include methods of preventing, | | R U66469 | gb\|V00507\| |
| | | | detecting, diagnosing, treating and/or ameliorating cancer and | | p53 | HSDHFR |
| | | | hyperproliferative disorders involving skin cells. (NHDF cells | | regulated | gb\|X59543\| |
| | | | are normal human dermal fibroblasts). | | gene | HSRIREM1 |
| 325 | HE9FX37 | Cancer | Highly preferred indications include neoplastic diseases (e.g. | SK-N-MC | Cyclin A1 | gb\|U97680\| |
| | | | cancer) such as described herein under the heading | neuroblastoma | | HSU97680 |
| | | | “Hyperproliferative Disordersî (particularly including, but not | | | |
| | | | limited to cancers involving cells of the brain/central nervous | | | |
| | | | system (e.g. neural epithelium)). Highly preferred embodiments | | | |
| | | | of the invention include methods of preventing, detecting, | | | |
| | | | diagnosing, treating and/or ameliorating cancer and | | | |
| | | | hyperproliferative disorders involving the brain or central | | | |
| | | | nervous system. (The SK-N-MC neuroblastoma cell line is a cell | | | |
| | | | line derived from human brain tissue available through the | | | |
| | | | ATCC as cell line number HTB-10). | | | |
| 325 | HE9FX37 | Cancer | Highly preferred indications include neoplastic diseases (e.g. | U937 | bcl-2 | gb\|X06487\| |
| | | | cancer) such as described herein under the heading | | Egr1 | HSBCL2IG |
| | | | “Hyperproliferative Disordersî (particularly including, but not | | | |
| | | | limited to, cancers of immune cells, such as monocytes). Highly | | | |
| | | | preferred embodiments of the invention include methods of | | | |
| | | | preventing, detecting, diagnosing, treating and/or ameliorating | | | |
| | | | cancer and hyperproliferative disorders involving cells of the | | | |
| | | | immune system (such as monocytes). (THe U-937 cell line is a | | | |
| | | | human monocyte cell line available through the ATCC as cell | | | |
| | | | line number CRL-1593.2) | | | |
| 325 | HE9FX37 | Immune | Highly preferred indications include immunological disorders | AOSMC | TNF | gb\|AJ270944\| |
| | | | such as described herein under the heading “Immune Activity” | | VLA4 | HSA27094 |
| | | | and/or “Blood-Related Disorders” (particularly including, but not | | | gb\|X16983\| |
| | | | limited to, immune disorders involving muscle tissues and the | | | HSINTAL4 |
| | | | cardiovascular system (e.g. heart, lungs, circulatory system)). | | | |
| | | | Highly preferred embodiments of the invention include methods | | | |
| | | | of preventing, detecting, diagnosing, treating and/or ameliorating | | | |
| | | | disorders of the immune system (particularly including, but not | | | |
| | | | limited to, immune disorders involving muscle tissue or the | | | |
| | | | cardiovascular system). (AOSMC cells are human aortic smooth | | | |
| | | | muscle cells). | | | |
| 325 | HE9FX37 | Immune | Highly preferred indications include immunological disorders | Caco-2 | CD30 | gb\|AJ270944\| |
| | | | such as described herein under the heading “Immune Activity” | | TNF | HSA27094 |
| | | | and/or “Blood-Related Disorders” (particularly including, but not | | | |
| | | | limited to, immune disorders involving the cells of the | | | |
| | | | gastrointestinal tract). Highly preferred embodiments of the | | | |
| | | | invention include methods of preventing, detecting, diagnosing, | | | |
| | | | treating and/or ameliorating disorders of the immune system | | | |
| | | | (particularly including, but not limited to, immune disorders | | | |
| | | | involving cells of the gastrointestinal tract). (The Caco-2 cell line | | | |
| | | | is a human colorectal adenocarcinoma cell line available through | | | |
| | | | the ATCC as cell line number HTB-37). | | | |
| 325 | HE9FX37 | Immune | Highly preferred indications include immunological disorders | Daudi | GATA1 | gb\|X17254\| |
| | | | such as described herein under the heading “Immune Activity” | | | HSERYF1 |
| | | | and/or “Blood-Related Disorders” (particularly including, but not | | | |
| | | | limited to, immune disorders involving the B-cells). Highly | | | |
| | | | preferred embodiments of the invention include methods of | | | |
| | | | preventing, detecting, diagnosing, treating and/or ameliorating | | | |
| | | | disorders of the immune system (particularly including, but not | | | |
| | | | limited to, immune disorders involving B-cells). (The Daudi cell | | | |
| | | | line is a human B lymphoblast cell line available through the | | | |
| | | | ATCC as cell line number CCL-213). | | | |
| 325 | HE9FX37 | Immune | Highly preferred indications include immunological disorders | HEK293 | TNF | gb\|AJ270944\| |
| | | | such as described herein under the heading “Immune Activity” | | | HSA27094 |
| | | | and/or “Blood-Related Disorders” (particularly including, but not | | | |
| | | | limited to, immune disorders involving epithelial cells or the | | | |
| | | | renal system). Highly preferred embodiments of the invention | | | |
| | | | include methods of preventing, detecting, diagnosing, treating | | | |
| | | | and/or ameliorating disorders of the immune system (particularly | | | |
| | | | including, but not limited to, immune disorders involving | | | |
| | | | epithelial cells or the renal system). (The 293 cell line is a human | | | |
| | | | embryonal kidney epithelial cell line available through the ATCC | | | |
| | | | as cell line number CRL-1573). | | | |
| 325 | HE9FX37 | Immune | Highly preferred indications include immunological disorders | HUVEC | CIS3 | gb\|AB006967\| |
| | | | such as described herein under the heading “Immune Activity” | | GATA1 | AB006967 |
| | | | and/or “Blood-Related Disorders” (particularly including, but not | | ICAM | gb\|X17254\| |
| | | | limited to, immune disorders involving endothelial cells). Highly | | LTBR | HSERYF1 |
| | | | preferred embodiments of the invention include methods of | | | gb\|X06990\| |
| | | | preventing, detecting, diagnosing, treating and/or ameliorating | | | HSICAM1 |
| | | | disorders of the immune system (particularly including, but not | | | gb\|AK027080\| |
| | | | limited to, immune disorders involving endothelial cells). | | | AK027080 |
| | | | (HUVEC cells are human umbilical vein endothelial cells). | | | |
| 325 | HE9FX37 | Immune | Highly preferred indications include immunological disorders | Jurkat | CCR5 | gb\|AF161918\| |
| | | | such as described herein under the heading “Immune Activity” | | CD69 | AF1619188\| |
| | | | and/or “Blood-Related Disorders” (particularly including, but not | | GATA3 | AF161918 |
| | | | limited to, immune disorders involving T-cells). Highly | | Rag2 | gb\|Z22576\| |
| | | | preferred embodiments of the invention include methods of | | TNF | HSCD69GNA |
| | | | preventing, detecting, diagnosing, treating and/or ameliorating | | VCAM | gb\|X55037\| |
| | | | disorders of the immune system (particularly including, but not | | | HSGATA3 |
| | | | limited to, immune disorders involving T-cells). (The Jurkat cell | | | gb\|AY011962\| |
| | | | line is a human T lymphocyte cell line available through the | | | AY011962 |
| | | | ATCC as cell line number TIB-152). | | | gb\|AJ270944\| |
| | | | | | | HSA27094 |
| | | | | | | gb\|A30922\| |
| | | | | | | A30922 |
| 325 | HE9FX37 | Immune | Highly preferred indications include immunological disorders | NHDF | GATA1 | gb\|X17254\| |
| | | | such as described herein under the heading “Immune Activity” | | Il6 | HSERYF1 |
| | | | and/or “Blood-Related Disorders” (particularly including, but not | | TNF | gb\|X04403\| |
| | | | limited to, immune disorders involving the skin). Highly | | VLA4 | HS26KDAR |
| | | | preferred embodiments of the invention include methods of | | | gb\|AJ270944\| |
| | | | preventing, detecting, diagnosing, treating and/or ameliorating | | | HSA27094 |
| | | | disorders of the immune system (particularly including, but not | | | gb\|X16983\| |
| | | | limited to, immune disorders involving the skin). (NHDF cells | | | HSINTAL4 |
| | | | are normal human dermal fibroblasts). | | | HSINTAL4 |
| 325 | HE9FX37 | Immune | Highly preferred indications include immunological disorders | Th1- | TNF | gb\|AJ270944\| |
| | | | such as described herein under the heading “Immune Activity” | | | HSA27094 |
| | | | and/or “Blood-Related Disorders” (particularly including, but not | | | |
| | | | limited to, immune disorders involving T-cells). Highly | | | |
| | | | preferred embodiments of the invention include methods of | | | |
| | | | preventing, detecting, diagnosing, treating and/or ameliorating | | | |
| | | | disorders of the immune system (particularly including, but not | | | |
| | | | limited to, immune disorders involving T-cells). (Th1 cells are | | | |
| | | | human T-cells). | | | |
| 325 | HE9FX37 | Immune | Highly preferred indications include immunological disorders | Th2- | CTLA4 | gb\|AF316875\| |
| | | | such as described herein under the heading “Immune Activity” | | | AF316875 |
| | | | and/or “Blood-Related Disorders” (particularly including, but not | | | |
| | | | limited to, immune disorders involving T-cells). Highly. | | | |
| | | | preferred embodiments of the invention include methods of | | | |
| | | | preventing, detecting, diagnosing, treating and/or ameliorating | | | |
| | | | disorders of the immune system (particularly including, but not | | | |
| | | | limited to, immune disorders involving T-cells). (Th2 cells are | | | |
| | | | human T-cells). | | | |
| 356 | HEMCZ56 | Angiogenesis | Highly preferred indications include diagnosis, prevention, | HEK293 | Cycloox | |
| | | | treatment, and/or amelioration of diseases and disorders | | | |
| | | | involving angiogenesis, wound healing, neoplasia (particularly | | | |
| | | | including, but not limited to, tumor metastases), and | | | |
| | | | cardiovascular diseases and disorders; as described herein under | | | |
| | | | the headings “Hyperproliferative Disorders,” “Regeneration,” | | | |
| | | | “Anti-Angiogenesis Activity,” “Diseases at the Cellular Level,” | | | |
| | | | and “Wound Healing and Epithelial Cell Proliferation.”(The | | | |
| | | | HEK293 cell line is a human embryonal kidney epithelial cell | | | |
| | | | line available through the ATCC as cell line number CRL-1573). | | | |
| 356 | HEMCZ56 | Angiogenesis | Highly preferred indications include diagnosis, prevention, | Liver | ICAM | gb\|X06990\| |
| | | | treatment, and/or amelioration of diseases and disorders | | TSP-1 | HSICAM1 |
| | | | involving angiogenesis, wound healing, neoplasia (particularly | | Vegf1 | gb\|X04665\| |
| | | | including, but not limited to, tumor metastases), and | | | HSTHROMR |
| | | | cardiovascular diseases and disorders; as described herein under | | | gb\|AF024710\| |
| | | | the headings “Hyperproliferative Disorders,” “Regeneration,” | | | AF024710 |
| | | | “Anti-Angiogenesis Activity,” “Diseases at the Cellular Level,” | | | |
| | | | and “Wound Healing and Epithelial Cell Proliferation.” | | | |
| 356 | HEMCZ56 | Angiogenesis | Highly preferred indications include diagnosis, prevention, | Monocyte- | Cycloox | |
| | | | treatment, and/or amelioration of diseases and disorders | | | |
| | | | involving angiogenesis, wound healing, neoplasia (particularly | | | |
| | | | including, but not limited to, tumor metastases), and | | | |
| | | | cardiovascular diseases and disorders; as described herein under | | | |
| | | | the headings “Hyperproliferative Disorders,” “Regeneration,” | | | |
| | | | “Anti-Angiogenesis Activity,” “Diseases at the Cellular Level,” | | | |
| | | | and “Wound Healing and Epithelial Cell Proliferation.” | | | |
| 356 | HEMCZ56 | Angiogenesis | Highly preferred indications include diagnosis, prevention, | T cell | Cycloox | gb\|X04665\| |
| | | | treatment, and/or amelioration of diseases and disorders | | TSP-1 | HSTHROMR |
| | | | involving angiogenesis, wound healing, neoplasia (particularly | | VCAM | gb\|A30922\| |
| | | | including, but not limited to, tumor metastases), and | | Vegf1 | A30922 |
| | | | cardiovascular diseases and disorders; as described herein under | | | gb\|AF024710\| |
| | | | the headings “Hyperproliferative Disorders,” “Regeneration,“ | | | AF024710 |
| | | | “Anti-Angiogenesis Activity,” “Diseases at the Cellular Level,” | | | |
| | | | and “Wound Healing and Epithelial Cell Proliferation.” | | | |
| 356 | HEMCZ56 | Angiogenesis | Highly preferred indications include diagnosis, prevention, | T cell | Flt1 | gb\|AF063657\| |
| | | | treatment, and/or amelioration of diseases and disorders | Donor 61 | | AF063657 |
| | | | involving angiogenesis, wound healing, neoplasia (particularly | | | |
| | | | including, but not limited to, tumor metastases), and | | | |
| | | | cardiovascular diseases and disorders; as described herein under | | | |
| | | | the headings “Hyperproliferative Disorders,” “Regeneration,” | | | |
| | | | “Anti-Angiogenesis Activity,” “Diseases at the Cellular Level,” | | | |
| | | | and “Wound Healing and Epithelial Cell Proliferation.” | | | |
| 356 | HEMCZ56 | Angiogenesis | Highly preferred indications include diagnosis, prevention, | T-cell- | ENDO- | gb\|X06990\| |
| | | | treatment, and/or amelioration of diseases and disorders | Oct. 17, 2000 | THELIN | HSICAM1 |
| | | | involving angiogenesis, wound healing, neoplasia (particularly | | ICAM | |
| | | | including, but not limited to, tumor metastases), and | | | |
| | | | cardiovascular diseases and disorders; as described herein under | | | |
| | | | the headings “Hyperproliferative Disorders,” “Regeneration,” | | | |
| | | | “Anti-Angiogenesis Activity,” “Diseases at the Cellular Level,” | | | |
| | | | and “Wound Healing and Epithelial Cell Proliferation.” | | | |
| 356 | HEMCZ56 | Angiogenesis | Highly preferred indications include diagnosis, prevention, | Th2- | Cycloox | gb\|AF024710\| |
| | | | treatment, and/or amelioration of diseases and disorders | | Vegf1 | AF024710 |
| | | | involving angiogenesis, wound healing, neoplasia (particularly | | | |
| | | | including, but not limited to, tumor metastases), and | | | |
| | | | cardiovascular diseases and disorders; as described herein under | | | |
| | | | the headings “Hyperproliferative Disorders,” “Regeneration,” | | | |
| | | | “Anti-Angiogenesis Activity,” “Diseases at the Cellular Level,” | | | |
| | | | and “Wound Healing and Epithelial Cell Proliferation.”(Th2 cells | | | |
| | | | are human T-cells). | | | |
| 356 | HEMCZ56 | Cancer | Highly preferred indications include neoplastic diseases (e.g. | Caco-2 | p21 | gb\|BC000275\| |
| | | | cancer) such as described herein under the heading | | | BC000275 |
| | | | “Hyperproliferative Disordersî (particularly including, but not | | | |
| | | | limited to, cancer involving cells of the gastrointestinal tract). | | | |
| | | | Highly preferred embodiments of the invention include methods | | | |
| | | | of preventing, detecting, diagnosing, treating and/or ameliorating | | | |
| | | | cancer and hyperproliferative disorders involving the | | | |
| | | | gastrointestinal tract. (The Caco-2 cell line is a human colorectal | | | |
| | | | adenocarcinoma cell line available through the ATCC as cell line | | | |
| | | | number HTB-37). | | | |
| 356 | HEMCZ56 | Cancer | Highly preferred indications include neoplastic diseases (e.g. | Daudi | DHFR | gb\|V00507\| |
| | | | cancer) such as described herein under the heading | | | HSDHFR |
| | | | “Hyperproliferative Disordersî (particularly including, but not | | | |
| | | | limited to, cancers of immune cells, such as B-cells). Highly | | | |
| | | | preferred embodiments of the invention include methods of | | | |
| | | | preventing, detecting, diagnosing, treating and/or ameliorating | | | |
| | | | cancer and hyperproliferative disorders involving immune cells | | | |
| | | | (such as B-cells). (The Daudi cell line is a human B lymphoblast | | | |
| | | | cell line available through the ATCC as cell line number CCL- | | | |
| | | | 213). | | | |
| 356 | HEMCZ56 | Cancer | Highly preferred indications include neoplastic diseases (e.g. | HEK293 | beta- | gb\|X59543\| |
| | | | cancer) such as described herein under the heading | | catenin | HSRIREM1 |
| | | | “Hyperproliferative Disordersî (particularly including, but not | | M1 RIBO | |
| | | | limited to, cancers of epithelial cells or cancers involving the | | R | |
| | | | renal system). Highly preferred embodiments of the invention | | | |
| | | | include methods of preventing, detecting, diagnosing, treating | | | |
| | | | and/or ameliorating cancer and hyperproliferative disorders | | | |
| | | | involving epithelial cells or the renal system. (The 293 cell line | | | |
| | | | human embryonal kidney epithelial cell line available through | | | |
| | | | the ATCC as cell line number CRL-1573). | | | |
| 356 | HEMCZ56 | Cancer | Highly preferred indications include neoplastic diseases (e.g. | Liver | Cyclin D | gb\|BC000076\| |
| | | | cancer) such as described herein under the heading | | Cyclin D3 | BC000076 |
| | | | “Hyperproliferative Disordersî (particularly including, but not | | DHFR | gb\|AR034832\| |
| | | | limited to, cancers involving cells of the hepatic system). Highly | | p21 | AR034832 |
| | | | preferred embodiments of the invention include methods of | | | gb\|V00507\| |
| | | | preventing, detecting, diagnosing, treating and/or ameliorating | | | HSDHFR |
| | | | cancer and hyperproliferative disorders involving cells of the | | | gb\|BC000275\| |
| | | | hepatic system. | | | BC000275 |
| 356 | HEMCZ56 | Cancer | Highly preferred indications include neoplastic diseases (e.g. | T cell | Cyclin D | gb\|BC000076\| |
| | | | cancer) such as described herein under the heading | | Cyclin D2 | BC000076 |
| | | | “Hyperproliferative Disordersî (particularly including, but not | | Egr1 | gb\|X68452\| |
| | | | limited to, cancers of immune cells, such as T-cells). Highly | | | HSCYCD2 |
| | | | preferred embodiments of the invention include methods of | | | |
| | | | preventing, detecting, diagnosing, treating and/or ameliorating | | | |
| | | | cancer and hyperproliferative disorders involving cells of the | | | |
| | | | immune system (such as T-cells). | | | |
| 356 | HEMCZ56 | Cancer | Highly preferred indications include neoplastic diseases (e.g. | T cell | E-cadherin | gb\|Z35408\| |
| | | | cancer) such as described herein under the heading | Donor 61 | | HSECAD9 |
| | | | “Hyperproliferative Disordersî (particularly including, but not | | | |
| | | | limited to, cancers of immune cells, such as T-cells). Highly | | | |
| | | | preferred embodiments of the invention include methods of | | | |
| | | | preventing, detecting, diagnosing, treating and/or ameliorating | | | |
| | | | cancer and hyperproliferative disorders involving cells of the | | | |
| | | | immune system (such as T-cells). | | | |
| 356 | HEMCZ56 | Cancer | Highly preferred indications include neoplastic diseases (e.g. | T-cell- | Cyclin D | gb\|BC000076\| |
| | | | cancer) such as described herein under the heading | Oct. 17, 2000 | DHFR | BC000076 |
| | | | “Hyperproliferative Disordersî (particularly including, but not | | E-cadherin | gb\|V00507\| |
| | | | limited to, cancers of immune cells, such as T-cells). Highly | | M1 RIBO | HSDHFR |
| | | | preferred embodiments of the invention include methods of | | R | gb\|Z35408\| |
| | | | preventing, detecting, diagnosing, treating and/or ameliorating | | | HSECAD9 |
| | | | cancer and hyperproliferative disorders involving cells of the | | | gb\|X59543\| |
| | | | immune system (such as T-cells). | | | HSRIREM1 |
| 356 | HEMCZ56 | Cancer | Highly preferred indications include neoplastic diseases (e.g. | TF-1 | bcl-2 | gb\|X06487\| |
| | | | cancer) such as described herein under the heading | | c-jun | HSBCL2IG |
| | | | “Hyperproliferative Disordersî (particularly including, but not | | Cyclin D | gb\|BC006175\| |
| | | | limited to cancers involving erythrocytes). Highly preferred | | DHFR | BC006175 |
| | | | embodiments of the invention include methods of preventing, | | Egr1 | gb\|BC000076\| |
| | | | detecting, diagnosing, treating and/or ameliorating cancer and | | TAA6 | BC000076 |
| | | | hyperproliferative disorders involving erythrocytes. (The TF-1 | | | gb\|V00507\| |
| | | | cell line is a human erythroblast cell line available through the | | | HSDHFR |
| | | | ATCC as cell line number CRL-2003). | | | gb\|I34297\| |
| | | | | | | I34297 |
| 356 | HEMCZ56 | Cancer | Highly preferred indications include neoplastic diseases (e.g. | Th2- | E-cadherin | gb\|Z35408\| |
| | | | cancer) such as described herein under the heading | | | HSECAD9 |
| | | | “Hyperproliferative Disordersî (particularly including, but not | | | |
| | | | limited to, cancers of immune cells, such as T-cells). Highly | | | |
| | | | preferred embodiments of the invention include methods of | | | |
| | | | preventing, detecting, diagnosing, treating and/or ameliorating | | | |
| | | | cancer and hyperproliferative disorders involving cells of the | | | |
| | | | immune system (such as T-cells). (Th2 cells are human T cells). | | | |
| 356 | HEMCZ56 | Cancer | Highly preferred indications include neoplastic diseases (e.g. | U937 | c-jun | gb\|BC006175\| |
| | | | cancer) such as described herein under the heading | | | BC006175 |
| | | | “Hyperproliferative Disordersî (particularly including, but not | | | |
| | | | limited to, cancers of immune cells, such as monocytes). Highly | | | |
| | | | preferred embodiments of the invention include methods of | | | |
| | | | preventing, detecting, diagnosing, treating and/or ameliorating | | | |
| | | | cancer and hyperproliferative disorders involving cells of the | | | |
| | | | immune system (such as monocytes). (The U-937 cell line is a | | | |
| | | | human monocyte cell line available through the ATCC as cell | | | |
| | | | line number CRL-1593.2) | | | |
| 356 | HEMCZ56 | Immune | Highly preferred indications include immunological disorders | AOSMC | IL2 | gb\|X61155\| |
| | | | such as described herein under the heading “Immune Activity” | | | HSARTIL2 |
| | | | and/or “Blood-Related Disorders” (particularly including, but not | | | |
| | | | limited to, immune disorders involving muscle tissues and the | | | |
| | | | cardiovascular system (e.g. heart, lungs, circulatory system)). | | | |
| | | | Highly preferred embodiments of the invention include methods | | | |
| | | | of preventing, detecting, diagnosing, treating and/or ameliorating | | | |
| | | | disorders of the immune system (particularly including, but not | | | |
| | | | limited to, immune disorders involving muscle tissue or the | | | |
| | | | cardiovascular system). (AOSMC cells are human aortic smooth | | | |
| | | | muscle cells). | | | |
| 356 | HEMCZ56 | Immune | Highly preferred indications include immunological disorders | Caco-2 | GATA1 | gb\|X17254\| |
| | | | such as described herein under the heading “Immune Activity” | | GATA3 | HSERYF1 |
| | | | and/or “Blood-Related Disorders” (particularly including, but not | | | gb\|X55037\| |
| | | | limited to, immune disorders involving the cells of the | | | HSGATA3 |
| | | | gastrointestinal tract). Highly preferred embodiments of the | | | |
| | | | invention include methods of preventing, detecting, diagnosing, | | | |
| | | | treating and/or ameliorating disorders of the immune system | | | |
| | | | (particularly including, but not limited to, immune disorders | | | |
| | | | involving cells of the gastrointestinal tract). (The Caco-2 cell line | | | |
| | | | is a human colorectal adenocarcinoma cell line available through | | | |
| | | | the ATCC as cell line number HTB-37). | | | |
| 356 | HEMCZ56 | Immune | Highly preferred indications include immunological disorders | Daudi | GATA1 | gb\|X17254\| |
| | | | such as described herein under the heading “Immune Activity” | | TNF | HSERYF1 |
| | | | and/or “Blood-Related Disorders” (particularly including, but not | | VLA4 | gb\|AJ270944\| |
| | | | limited to, immune disorders involving the B-cells). Highly | | | HSA27094 |
| | | | preferred embodiments of the invention include methods of | | | gb\|X16983\| |
| | | | preventing, detecting, diagnosing, treating and/or ameliorating | | | HSINTAL4 |
| | | | disorders of the immune system (particularly including, but not | | | |
| | | | limited to, immune disorders involving B-cells). (The Daudi cell | | | |
| | | | line is a human B lymphoblast cell line available through the | | | |
| | | | ATCC as cell line number CCL-213). | | | |
| 356 | HEMCZ56 | Immune | Highly preferred indications include immunological disorders | HEK293 | c-maf | gb\|AF055377\| |
| | | | such as described herein under the heading “Immune Activity” | | | AF055377 |
| | | | and/or “Blood-Related Disorders” (particularly including, but not | | | |
| | | | limited to, immune disorders involving epithelial cells or the | | | |
| | | | renal system). Highly preferred embodiments of the invention | | | |
| | | | include methods of preventing, detecting, diagnosing, treating | | | |
| | | | and/or ameliorating disorders of the immune system (particularly | | | |
| | | | including, but not limited to, immune disorders involving | | | |
| | | | epithelial cells or the renal system). (The 293 cell line is a human | | | |
| | | | embryonal kidney epithelial cell line available through the ATCC | | | |
| | | | as cell line number CRL-1573). | | | |
| 356 | HEMCZ56 | Immune | Highly preferred indications include immunological disorders | HUVEC | c-maf | gb\|AF055377\| |
| | | | such as described herein under the heading “Immune Activity” | | | AF055377 |
| | | | and/or “Blood-Related Disorders” (particularly including, but not | | | |
| | | | limited to, immune disorders involving endothelial cells). Highly | | | |
| | | | preferred embodiments of the invention include methods of | | | |
| | | | preventing, detecting, diagnosing, treating and/or ameliorating | | | |
| | | | disorders of the immune system (particularly including, but not | | | |
| | | | limited to, immune disorders involving endothelial cells). | | | |
| | | | (HUVEC cells are human umbilical vein endothelial cells). | | | |
| 356 | HEMCZ56 | Immune | Highly preferred indications include immunological disorders | Jurkat | TNF | gb\|AJ270944\| |
| | | | such as described herein under the heading “Immune Activity” | | | HSA27094 |
| | | | and/or “Blood-Related Disorders” (particularly including, but not | | | |
| | | | limited to, immune disorders involving T-cells). Highly | | | |
| | | | preferred embodiments of the invention include methods of | | | |
| | | | preventing, detecting, diagnosing, treating and/or ameliorating | | | |
| | | | disorders of the immune system (particularly including, but not | | | |
| | | | limited to, immune disorders involving T-cells). (The Jurkat cell | | | |
| | | | line is a human T lymphocyte cell line available through the | | | |
| | | | ATCC as cell line number TIB-152). | | | |
| 356 | HEMCZ56 | Immune | Highly preferred indications include immunological disorders | Liver | CIS3 | gb\|AB006967\| |
| | | | such as described herein under the heading “Immune Activity” | | HLA-c | AB006967 |
| | | | and/or “Blood-Related Disorders” (particularly including, but not | | ICAM | gb\|X06990\| |
| | | | limited to, immune disorders involving cells of the hepatic | | LTBR | HSICAM1 |
| | | | system). Highly preferred embodiments of the invention include | | TNF | gb\|AK027080\| |
| | | | methods of preventing, detecting, diagnosing, treating and/or | | | AK027080 |
| | | | ameliorating disorders of the immune system (particularly | | | gb\|AJ270944\| |
| | | | including, but not limited to, immune disorders involving cells of | | | HSA27094 |
| | | | the hepatic system). | | | |
| 356 | HEMCZ56 | Immune | Highly preferred indications include immunological disorders | Monocyte- | CD25 | gb\|X03137\| |
| | | | such as described herein under the heading “Immune Activity” | | CD40 | HSIL2RG7 |
| | | | and/or “Blood-Related Disorders” (particularly including, but not | | | gb\|AJ300189\| |
| | | | limited to, immune disorders involving monocytes). Highly | | | HSA30018 |
| | | | preferred embodiments of the invention include methods of | | | |
| | | | preventing, detecting, diagnosing, treating and/or ameliorating | | | |
| | | | disorders of the immune system (particularly including, but not | | | |
| | | | limited to, immune disorders involving monocytes). | | | |
| 356 | HEMCZ56 | Immune | Highly preferred indications include immunological disorders | NHDF | TNF | gb\|AJ270944\| |
| | | | such as described herein under the heading “Immune Activity” | | | HSA27094 |
| | | | and/or “Blood-Related Disorders” (particularly including, but not | | | |
| | | | limited to, immune disorders involving the skin). Highly | | | |
| | | | preferred embodiments of the invention include methods of | | | |
| | | | preventing, detecting, diagnosing, treating and/or ameliorating | | | |
| | | | disorders of the immune system (particularly including, but not | | | |
| | | | limited to, immune disorders involving the skin). (NHDF cells | | | |
| | | | are normal human dermal fibroblasts). | | | |
| 356 | HEMCZ56 | Immune | Highly preferred indications include immunological disorders | T cell | CD25 | gb\|X03137\| |
| | | | such as described herein under the heading “Immune Activity” | | CD30 | HSIL2RG7 |
| | | | and/or “Blood-Related Disorders” (particularly including, but not | | IL1B | gb\|X02532\| |
| | | | limited to, immune disorders involving T-cells). Highly | | IL2 | HSIL1BR |
| | | | preferred embodiments of the invention include methods of | | Il6 | gb\|X61155\| |
| | | | preventing, detecting, diagnosing, treating and/or ameliorating | | LTBR | HSARTIL2 |
| | | | disorders of the immune system (particularly including, but not | | Rag1 | gb\|X04403\| |
| | | | limited to, immune disorders involving T-cells). | | TNF | HS26KDAR |
| | | | | | VCAM | gb\|AK027080\| |
| | | | | | | AK027080 |
| | | | | | | gb\|M29474\| |
| | | | | | | HUMRAG1 |
| | | | | | | gb\|AJ270944\| |
| | | | | | | HSA27094 |
| | | | | | | gb\|A30922\| |
| | | | | | | A30922 |
| 356 | HEMCZ56 | Immune | Highly preferred indications include immunological disorders | T cell | CD69 | gb\|Z22576\| |
| | | | such as described herein under the heading “Immune Activity” | Donor 61 | IFNg | HSCD69GNA |
| | | | and/or “Blood-Related Disorders” (particularly including, but not | | IL2 | gb\|X87308\| |
| | | | limited to, immune disorders involving T-cells). Highly | | | HSRNAIG |
| | | | preferred embodiments of the invention include methods of | | | gb\|X61155\| |
| | | | preventing, detecting, diagnosing, treating and/or ameliorating | | | HSARTIL2 |
| | | | disorders of the immune system (particularly including, but not | | | |
| | | | limited to, immune disorders involving T-cells). | | | |
| 356 | HEMCZ56 | Immune | Highly preferred indications include immunological disorders | T-cell- | CD69 | gb\|Z22576\| |
| | | | such as described herein under the heading “Immune Activity” | Oct. 17, 2000 | CTLA4 | HSCD69GNA |
| | | | and/or “Blood-Related Disorders” (particularly including, but not | | GATA1 | gb\|AF316875\| |
| | | | limited to, immune disorders involving T-cells). Highly | | ICAM | AF316875 |
| | | | preferred embodiments of the invention include methods of | | IL1B | gb\|X17254\| |
| | | | preventing, detecting, diagnosing, treating and/or ameliorating | | Il6 | HSERYF1 |
| | | | disorders of the immune system (particularly including, but not | | Rag2 | gb\|X06990\| |
| | | | limited to, immune disorders involving T-cells). | | | HSICAM1 |
| | | | | | | gb\|X02532\| |
| | | | | | | HSIL1BR |
| | | | | | | gb\|X04403\| |
| | | | | | | HS26KDAR |
| | | | | | | gb\|AY011962\| |
| | | | | | | AY011962 |
| 356 | HEMCZ56 | Immune | Highly preferred indications include immunological disorders | TF-1 | CD40 | gb\|AJ300189\| |
| | | | such as described herein under the heading “Immune Activity” | | GATA1 | HSA30018 |
| | | | and/or “Blood-Related Disorders” (particularly including, but not | | GM-CSF | gb\|X17254\| |
| | | | limited to, immune disorders involving erythrocytes). Highly | | | HSERYF1 |
| | | | preferred embodiments of the invention include methods of | | | |
| | | | preventing, detecting, diagnosing, treating and/or ameliorating | | | |
| | | | disorders of the immune system (particularly including, but not | | | |
| | | | limited to, immune disorders involving erythrocytes). (The TF-1 | | | |
| | | | cell line is a human erythroblast cell line available through the | | | |
| | | | ATCC as cell line number CRL-2003). | | | |
| 356 | HEMCZ56 | Immune | Highly preferred indications include immunological disorders | Th2- | GATA1 | gb\|X17254\| |
| | | | such as described herein under the heading “Immune Activity” | | GATA3 | HSERYF1 |
| | | | and/or “Blood-Related Disorders” (particularly including, but not | | | gb\|X55037\| |
| | | | limited to, immune disorders involving T-cells). Highly | | | HSGATA3 |
| | | | preferred embodiments of the invention include methods of | | | |
| | | | preventing, detecting, diagnosing, treating and/or ameliorating | | | |
| | | | disorders of the immune system (particularly including, but not | | | |
| | | | limited to, immune disorders involving T-cells). (Th2 cells are | | | |
| | | | human T-cells). | | | |
| 359 | HEMEM90 | Angiogenesis | Highly preferred indications include diagnosis, prevention, | TF-1 | Cycloox | |
| | | | treatment, and/or amelioration of diseases and disorders | | | |
| | | | involving angiogenesis, wound healing, neoplasia (particularly | | | |
| | | | including, but not limited to, tumor metastases), and | | | |
| | | | cardiovascular diseases and disorders; as described herein under | | | |
| | | | the headings “Hyperproliferative Disorders,” “Regeneration,” | | | |
| | | | “Anti-Angiogenesis Activity,” “Diseases at the Cellular Level,” | | | |
| | | | and “Wound Healing and Epithelial Cell Proliferation.”(The TF- | | | |
| | | | 1 cell line is a human erythroblast cell line available through the | | | |
| | | | ATCC as cell line number CRL-2003). | | | |
| 359 | HEMEM90 | Cancer | Highly preferred indications include neoplastic diseases (e.g. | U937 | c-jun | gb\|BC006175\| |
| | | | cancer) such as described herein under the heading | | Cyclin D | BC006175 |
| | | | “Hyperproliferative Disordersî (particularly including, but not | | | gb\|BC000076\| |
| | | | limited to, cancers of immune cells, such as monocytes). Highly | | | BC000076 |
| | | | preferred embodiments of the invention include methods of | | | |
| | | | preventing, detecting, diagnosing, treating and/or ameliorating | | | |
| | | | cancer and hyperproliferative disorders involving cells of the | | | |
| | | | immune system (such as monocytes). (THe U-937 cell line is a | | | |
| | | | human monocyte cell line available through the ATCC as cell | | | |
| | | | line number CRL-1593.2) | | | |
| 359 | HEMEM90 | Immune | Highly preferred indications include immunological disorders | U937 | IL1B | gb\|X02532\| |
| | | | such as described herein under the heading “Immune Activity” | | IL8 | HSIL1BR |
| | | | and/or “Blood-Related Disorders” (particularly including, but not | | LTBR | gb\|Z11686\| |
| | | | limited to, immune disorders involving monocytes). Highly | | TNF | HSINTLK8M |
| | | | preferred embodiments of the invention include methods of | | | gb\|AK027080\| |
| | | | preventing, detecting, diagnosing, treating and/or ameliorating | | | AK027080 |
| | | | disorders of the immune system (particularly including, but not | | | gb\|AJ270944\| |
| | | | limited to, immune disorders involving monocytes). (The U937 | | | HSA27094 |
| | | | cell line is a human monocyte cell line available through the | | | |
| | | | ATCC as cell line number CRL-1593.2). | | | |
| 430 | HFTCF50 | Angiogenesis | Highly preferred indications include diagnosis, prevention, | AOSMC | PAI | gb\|X12701\| |
| | | | treatment, and/or amelioration of diseases and disorders | | | HSENDPAI |
| | | | involving angiogenesis, wound healing, neoplasia (particularly | | | |
| | | | including, but not limited to, tumor metastases), and | | | |
| | | | cardiovascular diseases and disorders; as described herein under | | | |
| | | | the headings “Hyperproliferative Disorders,” “Regeneration,” | | | |
| | | | “Anti-Angiogenesis Activity,” “Diseases at the Cellular Level,” | | | |
| | | | and “Wound Healing and Epithelial Cell Proliferation.”(AOSMC | | | |
| | | | cells are aortic smooth muscle cells). | | | |
| 430 | HFTCF50 | Angiogenesis | Highly preferred indications include diagnosis, prevention, | H9 | Cycloox | gb\|A30922\| |
| | | | treatment, and/or amelioration of diseases and disorders | | VCAM | A30922 |
| | | | involving angiogenesis, wound healing, neoplasia (particularly | | | |
| | | | including, but not limited to, tumor metastases), and | | | |
| | | | cardiovascular diseases and disorders; as described herein under | | | |
| | | | the headings “Hyperproliferative Disorders,” “Regeneration,” | | | |
| | | | “Anti-Angiogenesis Activity,” “Diseases at the Cellular Level,” | | | |
| | | | and “Wound Healing and Epithelial Cell Proliferation.”(The H9 | | | |
| | | | cell line is a human T lymphocyte cell line available through the | | | |
| | | | ATCC as cell line number HTB-176). | | | |
| 430 | HFTCF50 | Angiogenesis | Highly preferred indications include diagnosis, prevention, | NHDF | Vegf1 | gb\|AF024710\| |
| | | | treatment, and/or amelioration of diseases and disorders | | | AF024710 |
| | | | involving angiogenesis, wound healing, neoplasia (particularly | | | |
| | | | including, but not limited to, tumor metastases), and | | | |
| | | | cardiovascular diseases and disorders; as described herein under | | | |
| | | | the headings “Hyperproliferative Disorders,” “Regeneration,” | | | |
| | | | “Anti-Angiogenesis Activity,” “Diseases at the Cellular Level,” | | | |
| | | | and “Wound Healing and Epithelial Cell Proliferation.”(NHDF | | | |
| | | | cells are normal human dermal fibroblasts). | | | |
| 430 | HFTCF50 | Angiogenesis | Highly preferred indications include diagnosis, prevention, | THP1 | ICAM | gb\|X06990\| |
| | | | treatment, and/or amelioration of diseases and disorders | | | HSICAM1 |
| | | | involving angiogenesis, wound healing, neoplasia (particularly | | | |
| | | | including, but not limited to, tumor metastases), and | | | |
| | | | cardiovascular diseases and disorders; as described herein under | | | |
| | | | the headings “Hyperproliferative Disorders,” “Regeneration,” | | | |
| | | | “Anti-Angiogenesis Activity,” “Diseases at the Cellular Level,” | | | |
| | | | and “Wound Healing and Epithelial Cell Proliferation.”(The | | | |
| | | | THP-1 cell line is a human monocyte cell line available through | | | |
| | | | the ATCC as cell line number TIB-202). | | | |
| 430 | HFTCF50 | Cancer | Highly preferred indications include neoplastic diseases (e.g. | AOSMC | DHFR | gb\|V00507\| |
| | | | cancer) such as described herein under the heading | | | HSDHFR |
| | | | “Hyperproliferative Disordersî (particularly including, but not | | | |
| | | | limited to, cancers of muscle tissues and the cardiovascular | | | |
| | | | system (e.g. heart, lungs, circulatory system)). Highly preferred | | | |
| | | | embodiments of the invention include methods of preventing, | | | |
| | | | detecting, diagnosing, treating and/or ameliorating cancer and | | | |
| | | | hyperproliferative disorders. (AOSMC cells are aortic smooth | | | |
| | | | muscle cells). | | | |
| 430 | HFTCF50 | Cancer | Highly preferred indications include neoplastic diseases (e.g. | H9 | c-jun | gb\|BC006175\| |
| | | | cancer) such as described herein under the heading | | Cyclin A1 | BC006175 |
| | | | “Hyperproliferative Disordersî (particularly including, but not | | Egr1 | gb\|U97680\| |
| | | | limited to, cancers of immune cells, such as T-cells). Highly | | p21 | HSU97680 |
| | | | preferred embodiments of the invention include methods of | | | gb\|BC000275\| |
| | | | preventing, detecting, diagnosing, treating and/or ameliorating | | | BC000275 |
| | | | cancer and hyperproliferative disorders involving immune cells | | | |
| | | | (such as T-cells). (The H9 cell line is a human T lymphocyte cell | | | |
| | | | line available through the ATCC as cell line number HTB-176). | | | |
| 430 | HFTCF50 | Cancer | Highly preferred indications include neoplastic diseases (e.g. | Liver | Cyclin A1 | gb\|U97680\| |
| | | | cancer) such as described herein under the heading | | | HSU97680 |
| | | | “Hyperproliferative Disordersî (particularly including, but not | | | |
| | | | limited to, cancers involving cells of the hepatic system). Highly | | | |
| | | | preferred embodiments of the invention include methods of | | | |
| | | | preventing, detecting, diagnosing, treating and/or ameliorating | | | |
| | | | cancer and hyperproliferative disorders involving cells of the | | | |
| | | | hepatic system. | | | |
| 430 | HFTCF50 | Cancer | Highly preferred indications include neoplastic diseases (e.g. | Molt4 | Cyclin D2 | gb\|X68452\| |
| | | | cancer) such as described herein under the heading | | | HSCYCD2 |
| | | | “Hyperproliferative Disordersî (particularly including, but not | | | |
| | | | limited to, cancers of immune cells, such as T-cells). Highly | | | |
| | | | preferred embodiments of the invention include methods of | | | |
| | | | preventing, detecting, diagnosing, treating and/or ameliorating | | | |
| | | | cancer and hyperproliferative disorders involving immune cells | | | |
| | | | (such as T-cells). (The Molt-4 cell line is a human T-cell line | | | |
| | | | available through the ATCC as cell line number CRL-1582). | | | |
| 430 | HFTCF50 | Cancer | Highly preferred indications include neoplastic diseases (e.g. | NHDF | TAA6 | gb\|I34297\| |
| | | | cancer) such as described herein under the heading | | | I34297 |
| | | | “Hyperproliferative Disordersî (particularly including, but not | | | |
| | | | limited to cancers involving cells of the skin). Highly preferred | | | |
| | | | embodiments of the invention include methods of preventing, | | | |
| | | | detecting, diagnosing, treating and/or ameliorating cancer and | | | |
| | | | hyperproliferative disorders involving skin cells. (NHDF cells | | | |
| | | | are normal human dermal fibroblasts). | | | |
| 430 | HFTCF50 | Cancer | Highly preferred indications include neoplastic diseases (e.g. | SUPT | Cyclin A1 | gb\|U97680\| |
| | | | cancer) such as described herein under the heading | | Cyclin D2 | HSU97680 |
| | | | “Hyperproliferative Disordersî (particularly including, but not | | DHFR | gb\|X68452\| |
| | | | limited to, cancers of immune cells, such as T-cells). Highly | | | HSCYCD2 |
| | | | preferred embodiments of the invention include methods of | | | gb\|V00507\| |
| | | | preventing, detecting, diagnosing, treating and/or ameliorating | | | HSDHFR |
| | | | cancer and hyperproliferative disorders involving cells of the | | | |
| | | | immune system (such as T-cells). (SUPT is a human T-cell line). | | | |
| 430 | HFTCF50 | Cancer | Highly preferred indications include neoplastic diseases (e.g. | U937 | p21 | gb\|BC000275\| |
| | | | cancer) such as described herein under the heading | | | BC000275 |
| | | | “Hyperproliferative Disordersî (particularly including, but not | | | |
| | | | limited to, cancers of immune cells, such as monocytes). Highly | | | |
| | | | preferred embodiments of the invention include methods of | | | |
| | | | preventing, detecting, diagnosing, treating and/or ameliorating | | | |
| | | | cancer and hyperproliferative disorders involving cells of the | | | |
| | | | immune system (such as monocytes). (The U-937 cell line is a | | | |
| | | | human monocyte cell line available through the ATCC as cell | | | |
| | | | line number CRL-1593.2) | | | |
| 430 | HFTCF50 | Immune | Highly preferred indications include immunological disorders | AOSMC | CD40 | gb\|AJ300189\| |
| | | | such as described herein under the heading “Immune Activity” | | CIS3 | HSA30018 |
| | | | and/or “Blood-Related Disorders” (particularly including, but not | | IL5 | gb\|AB006967\| |
| | | | limited to, immune disorders involving muscle tissues and the | | | AB006967 |
| | | | cardiovascular system (e.g. heart, lungs, circulatory system)). | | | gb\|X12705\| |
| | | | Highly preferred embodiments of the invention include methods | | | HSBCDFIA |
| | | | of preventing, detecting, diagnosing, treating and/or ameliorating | | | |
| | | | disorders of the immune system (particularly including, but not | | | |
| | | | limited to, immune disorders involving muscle tissue or the | | | |
| | | | cardiovascular system). (AOSMC cells are human aortic smooth | | | |
| | | | muscle cells). | | | |
| 430 | HFTCF50 | Immune | Highly preferred indications include immunological disorders | Caco-2 | CCR4 | gb\|AB023888\| |
| | | | such as described herein under the heading “Immune Activity” | | | AB023888 |
| | | | and/or “Blood-Related Disorders” (particularly including, but not | | | |
| | | | limited to, immune disorders involving the cells of the | | | |
| | | | gastrointestinal tract). Highly preferred embodiments of the | | | |
| | | | invention include methods of preventing, detecting, diagnosing, | | | |
| | | | treating and/or ameliorating disorders of the immune system | | | |
| | | | (particularly including, but not limited to, immune disorders | | | |
| | | | involving cells of the gastrointestinal tract). (The Caco-2 cell line | | | |
| | | | is a human colorectal adenocarcinoma cell line available through | | | |
| | | | the ATCC as cell line number HTB-37). | | | |
| 430 | HFTCF50 | Immune | Highly preferred indications include immunological disorders | H9 | CCR4 | gb\|AB023888\| |
| | | | such as described herein under the heading “Immune Activity” | | IL2 | AB023888 |
| | | | and/or “Blood-Related Disorders” (particularly including, but not | | TNF | gb\|X61155\| |
| | | | limited to, immune disorders involving the T-cells). Highly | | VCAM | HSARTIL2 |
| | | | preferred embodiments of the invention include methods of | | | gb\|AJ270944\| |
| | | | preventing, detecting, diagnosing, treating and/or ameliorating | | | HSA27094 |
| | | | disorders of the immune system (particularly including, but not | | | gb\|A30922\| |
| | | | limited to, immune disorders involving T-cells). (The H9 cell | | | A30922 |
| | | | line is a human T lymphocyte cell line available through the | | | |
| | | | ATCC as cell line number HTB-176). | | | |
| 430 | HFTCF50 | Immune | Highly preferred indications include immunological disorders | HEK293 | Rag1 | gb\|M29474\| |
| | | | such as described herein under the heading “Immune Activity” | | VLA4 | HUMRAG1 |
| | | | and/or “Blood-Related Disorders” (particularly including, but not | | | gb\|X16983\| |
| | | | limited to, immune disorders involving epithelial cells or the | | | HSINTAL4 |
| | | | renal system). Highly preferred embodiments of the invention | | | |
| | | | include methods of preventing, detecting, diagnosing, treating | | | |
| | | | and/or ameliorating disorders of the immune system (particularly | | | |
| | | | including, but not limited to, immune disorders involving | | | |
| | | | epithelial cells or the renal system). (The 293 cell line is a human | | | |
| | | | embryonal kidney epithelial cell line available through the ATCC | | | |
| | | | as cell line number CRL-1573). | | | |
| 430 | HFTCF50 | Immune | Highly preferred indications include immunological disorders | HUVEC | GATA1 | gb\|X17254\| |
| | | | such as described herein under the heading “Immune Activity” | | | HSERYF1 |
| | | | and/or “Blood-Related Disorders” (particularly including, but not | | | |
| | | | limited to, immune disorders involving endothelial cells). Highly | | | |
| | | | preferred embodiments of the invention include methods of | | | |
| | | | preventing, detecting, diagnosing, treating and/or ameliorating | | | |
| | | | disorders of the immune system (particularly including, but not | | | |
| | | | limited to, immune disorders involving endothelial cells). | | | |
| | | | (HUVEC cells are human umbilical vein endothelial cells). | | | |
| 430 | HFTCF50 | Immune | Highly preferred indications include immunological disorders | Jurkat | Rag2 | gb\|AY011962\| |
| | | | such as described herein under the heading “Immune Activity” | | | AY011962 |
| | | | and/or “Blood-Related Disorders” (particularly including, but not | | | |
| | | | limited to, immune disorders involving T-cells). Highly | | | |
| | | | preferred embodiments of the invention include methods of | | | |
| | | | preventing, detecting, diagnosing, treating and/or ameliorating | | | |
| | | | disorders of the immune system (particularly including, but not | | | |
| | | | limited to, immune disorders involving T-cells). (The Jurkat cell | | | |
| | | | line is a human T lymphocyte cell line available through the | | | |
| | | | ATCC as cell line number TIB-152). | | | |
| 430 | HFTCF50 | Immune | Highly preferred indications include immunological disorders | Liver | CTLA4 | gb\|AF316875\| |
| | | | such as described herein under the heading “Immune Activity” | | Rag2 | AF316875 |
| | | | and/or “Blood-Related Disorders” (particularly including, but not | | | gb\|AY011962\| |
| | | | limited to, immune disorders involving cells of the hepatic | | | AY011962 |
| | | | system). Highly preferred embodiments of the invention include | | | |
| | | | methods of preventing, detecting, diagnosing, treating and/or | | | |
| | | | ameliorating disorders of the immune system (particularly | | | |
| | | | including, but not limited to, immune disorders involving cells of | | | |
| | | | the hepatic system). | | | |
| 430 | HFTCF50 | Immune | Highly preferred indications include immunological disorders | Molt4 | CD25 | gb\|X03137\| |
| | | | such as described herein under the heading “Immune Activity” | | CD28 | HSIL2RG7 |
| | | | and/or “Blood-Related Disorders” (particularly including, but not | | GATA3 | gb\|AF222342\| |
| | | | limited to, immune disorders involving T-cells). Highly | | | AF222342 |
| | | | preferred embodiments of the invention include methods of | | | gb\|X55037\| |
| | | | preventing, detecting, diagnosing, treating and/or ameliorating | | | HSGATA3 |
| | | | disorders of the immune system (particularly including, but not | | | |
| | | | limited to, immune disorders involving T-cells). (The Molt-4 cell | | | |
| | | | line is a human T-cell line available through the ATCC as cell | | | |
| | | | line number CRL-1582). | | | |
| 430 | HFTCF50 | Immune | Highly preferred indications include immunological disorders | NHDF | CD28 | gb\|AF222342\| |
| | | | such as described herein under the heading “Immune Activity” | | CD40 | AF222342 |
| | | | and/or “Blood-Related Disorders” (particularly including, but not | | IL5 | gb\|AJ300189\| |
| | | | limited to, immune disorders involving the skin). Highly | | | HSA30018 |
| | | | preferred embodiments of the invention include methods of | | | gb\|X12705\| |
| | | | preventing, detecting, diagnosing, treating and/or ameliorating | | | HSBCDFIA |
| | | | disorders of the immune system (particularly including, but not | | | |
| | | | limited to, immune disorders involving the skin). (NHDF cells | | | |
| | | | are normal human dermal fibroblasts). | | | |
| 430 | HFTCF50 | Immune | Highly preferred indications include immunological disorders | SUPT | TNF | gb\|AJ270944\| |
| | | | such as described herein under the heading “Immune Activity” | | | HSA27094 |
| | | | and/or “Blood-Related Disorders” (particularly including, but not | | | |
| | | | limited to, immune disorders involving T-cells). Highly | | | |
| | | | preferred embodiments of the invention include methods of | | | |
| | | | preventing, detecting, diagnosing, treating and/or ameliorating | | | |
| | | | disorders of the immune system (particularly including, but not | | | |
| | | | limited to, immune disorders involving T-cells). (The SUPT cell | | | |
| | | | line is a human T-cell line). | | | |
| 430 | HFTCF50 | Immune | Highly preferred indications include immunological disorders | THP1 | CXCR3 | gb\|Z79783\| |
| | | | such as described herein under the heading “Immune Activity” | | Granzyme | HSCKRL2 |
| | | | and/or “Blood-Related Disorders” (particularly including, but not | | B ICAM | gb\|J04071\| |
| | | | limited to, immune disorders involving monocytes). Highly | | IL1B | HUMCSE |
| | | | preferred embodiments of the invention include methods of | | | gb\|X06990\| |
| | | | preventing, detecting, diagnosing, treating and/or ameliorating | | | HSICAM1 |
| | | | disorders of the immune system (particularly including, but not | | | gb\|X02532\| |
| | | | limited to, immune disorders involving monocytes). (The THP1 | | | HSIL1BR |
| | | | cell line is a human monocyte cell line available through the | | | |
| | | | ATCC as cell line number TIB-202). | | | |
| 430 | HFTCF50 | Immune | Highly preferred indications include immunological disorders | U937 | CD69 | gb\|Z22576\| |
| | | | such as described herein under the heading “Immune Activity” | | TNF | HSCD69GNA |
| | | | and/or “Blood-Related Disorders” (particularly including, but not | | | gb\|AJ270944\| |
| | | | limited to, immune disorders involving monocytes). Highly | | | HSA27094 |
| | | | preferred embodiments of the invention include methods of | | | |
| | | | preventing, detecting, diagnosing, treating and/or ameliorating | | | |
| | | | disorders of the immune system (particularly including, but not | | | |
| | | | limited to, immune disorders involving monocytes). (The U937 | | | |
| | | | cell line is a human monocyte cell line available through the | | | |
| | | | ATCC as cell line number CRL-1593.2). | | | |
| 515 | HHSBL18 | Angiogenesis | Highly preferred indications include diagnosis, prevention, | AOSMC | Cycloox | gb\|X06990\| |
| | | | treatment, and/or amelioration of diseases and disorders | | ICAM | HSICAM1 |
| | | | involving angiogenesis, wound healing, neoplasia (particularly | | Vegf1 | gb\|AF024710\| |
| | | | including, but not limited to, tumor metastases), and | | | AF024710 |
| | | | cardiovascular diseases and disorders; as described herein under | | | |
| | | | the headings “Hyperproliferative Disorders,” “Regeneration,” | | | |
| | | | “Anti-Angiogenesis Activity,” “Diseases at the Cellular Level,” | | | |
| | | | and “Wound Healing and Epithelial Cell Proliferation.”(AOSMC | | | |
| | | | cells are aortic smooth muscle cells). | | | |
| 515 | HHSBL18 | Angiogenesis | Highly preferred indications include diagnosis, prevention, | Caco-2 | ICAM | gb\|X06990\| |
| | | | treatment, and/or amelioration of diseases and disorders | | TSP-1 | HSICAM1 |
| | | | involving angiogenesis, wound healing, neoplasia (particularly | | | gb\|X04665\| |
| | | | including, but not limited to, tumor metastases), and | | | HSTHROMR |
| | | | cardiovascular diseases and disorders; as described herein under | | | |
| | | | the headings “Hyperproliferative Disorders,” “Regeneration,” | | | |
| | | | “Anti-Angiogenesis Activity,” “Diseases at the Cellular Level,” | | | |
| | | | and “Wound Healing and Epithelial Cell Proliferation.”(The | | | |
| | | | Caco-2 cell line is a human colorectal adenocarcinoma cell line | | | |
| | | | available through the ATCC as cell line number HTB-37). | | | |
| 515 | HHSBL18 | Angiogenesis | Highly preferred indications include diagnosis, prevention, | Daudi | ICAM | gb\|X06990\| |
| | | | treatment, and/or amelioration of diseases and disorders | | VCAM | HSICAM1 |
| | | | involving angiogenesis, wound healing, neoplasia (particularly | | | gb\|A30922\| |
| | | | including, but not limited to, tumor metastases), and | | | A30922 |
| | | | cardiovascular diseases and disorders; as described herein under | | | |
| | | | the headings “Hyperproliferative Disorders,” “Regeneration,” | | | |
| | | | “Anti-Angiogenesis Activity,” “Diseases at the Cellular Level,” | | | |
| | | | and “Wound Healing and Epithelial Cell Proliferation.”(The | | | |
| | | | Daudi cell line is a human B lymphoblast cell line available | | | |
| | | | through the ATCC as cell line number CCL-213). | | | |
| 515 | HHSBL18 | Angiogenesis | Highly preferred indications include diagnosis, prevention, | HEK293 | Flt1 | gb\|AF063657\| |
| | | | treatment, and/or amelioration of diseases and disorders | | iNOS | AF063657 |
| | | | involving angiogenesis, wound healing, neoplasia (particularly | | TSP-1 | gb\|X85761\| |
| | | | including, but not limited to, tumor metastases), and | | VCAM | HSNOS2E3 |
| | | | cardiovascular diseases and disorders; as described herein under | | Vegf1 | gb\|X04665\| |
| | | | the headings “Hyperproliferative Disorders,” “Regeneration,” | | | HSTHROMR |
| | | | “Anti-Angiogenesis Activity,” “Diseases at the Cellular Level,” | | | gb\|A30922\| |
| | | | and “Wound Healing and Epithelial Cell Proliferation.”(The | | | A30922 |
| | | | HEK293 cell line is a human embryonal kidney epithelial cell | | | gb\|AF024710\| |
| | | | line available through the ATCC as cell line number CRL-1573). | | | AF024710 |
| 515 | HHSBL18 | Angiogenesis | Highly preferred indications include diagnosis, prevention, | HUVEC | Vegf1 | gb\|AF024710\| |
| | | | treatment, and/or amelioration of diseases and disorders | | | AF024710 |
| | | | involving angiogenesis, wound healing, neoplasia (particularly | | | |
| | | | including, but not limited to, tumor metastases), and | | | |
| | | | cardiovascular diseases and disorders; as described herein under | | | |
| | | | the headings “Hyperproliferative Disorders,” “Regeneration,” | | | |
| | | | “Anti-Angiogenesis Activity,” “Diseases at the Cellular Level,” | | | |
| | | | and “Wound Healing and Epithelial Cell Proliferation.”(HUVEC | | | |
| | | | cells are human umbilical vein endothelial cells). | | | |
| 515 | HHSBL18 | Angiogenesis | Highly preferred indications include diagnosis, prevention, | Jurkat | Vegf1 | gb\|AF024710\| |
| | | | treatment, and/or amelioration of diseases and disorders | | | AF024710 |
| | | | involving angiogenesis, wound healing, neoplasia (particularly | | | |
| | | | including, but not limited to, tumor metastases), and | | | |
| | | | cardiovascular diseases and disorders; as described herein under | | | |
| | | | the headings “Hyperproliferative Disorders,” “Regeneration,” | | | |
| | | | “Anti-Angiogenesis Activity,” “Diseases at the Cellular Level,” | | | |
| | | | and “Wound Healing and Epithelial Cell Proliferation.”(The | | | |
| | | | Jurkat cell line is a human T lymphocyte cell line available | | | |
| | | | through the ATCC as cell line number TIB-152). | | | |
| 515 | HHSBL18 | Angiogenesis | Highly preferred indications include diagnosis, prevention, | Liver | ICAM | gb\|X06990\| |
| | | | treatment, and/or amelioration of diseases and disorders | | | HSICAM1 |
| | | | involving angiogenesis, wound healing, neoplasia (particularly | | | |
| | | | including, but not limited to, tumor metastases), and | | | |
| | | | cardiovascular diseases and disorders; as described herein under | | | |
| | | | the headings “Hyperproliferative Disorders,” “Regeneration,” | | | |
| | | | “Anti-Angiogenesis Activity,” “Diseases at the Cellular Level,” | | | |
| | | | and “Wound Healing and Epithelial Cell Proliferation.” | | | |
| 515 | HHSBL18 | Angiogenesis | Highly preferred indications include diagnosis, prevention, | NHDF | PAI | gb\|X12701\| |
| | | | treatment, and/or amelioration of diseases and disorders | | TSP-1 | HSENDPAI |
| | | | involving angiogenesis, wound healing, neoplasia (particularly | | Vegf1 | gb\|X04665\| |
| | | | including, but not limited to, tumor metastases), and | | | HSTHROMR |
| | | | cardiovascular diseases and disorders; as described herein under | | | gb\|AF024710\| |
| | | | the headings “Hyperproliferative Disorders,” “Regeneration,” | | | AF024710 |
| | | | “Anti-Angiogenesis Activity,” “Diseases at the Cellular Level,” | | | |
| | | | and “Wound Healing and Epithelial Cell Proliferation.”(NHDF | | | |
| | | | cells are normal human dermal fibroblasts). | | | |
| 515 | HHSBL18 | Angiogenesis | Highly preferred indications include diagnosis, prevention, | THP1 | VCAM | gb\|A30922\| |
| | | | treatment, and/or amelioration of diseases and disorders | | | A30922 |
| | | | involving angiogenesis, wound healing, neoplasia (particularly | | | |
| | | | including, but not limited to, tumor metastases), and | | | |
| | | | cardiovascular diseases and disorders; as described herein under | | | |
| | | | the headings “Hyperproliferative Disorders,” “Regeneration,” | | | |
| | | | “Anti-Angiogenesis Activity,” “Diseases at the Cellular Level,” | | | |
| | | | and “Wound Healing and Epithelial Cell Proliferation.”(The | | | |
| | | | THP-1 cell line is a human monocyte cell line available through | | | |
| | | | the ATCC as cell line number TIB-202). | | | |
| 515 | HHSBL18 | Cancer | Highly preferred indications include neoplastic diseases (e.g. | AOSMC | bcl-2 | gb\|X06487\| |
| | | | cancer) such as described herein under the heading | | Cyclin D2 | HSBCL2IG |
| | | | “Hyperproliferative Disordersî (particularly including, but not | | Cyclin D3 | gb\|X68452\| |
| | | | limited to, cancers of muscle tissues and the cardiovascular | | p53 | HSCYCD2 |
| | | | system (e.g. heart, lungs, circulatory system)). Highly preferred | | | gb\|AR034832\| |
| | | | embodiments of the invention include methods of preventing, | | | AR034832 |
| | | | detecting, diagnosing, treating and/or ameliorating cancer and | | | gb\|X60011\| |
| | | | hyperproliferative disorders. (AOSMC cells are aortic smooth | | | HSP53002 |
| | | | muscle cells). | | | |
| 515 | HHSBL18 | Cancer | Highly preferred indications include neoplastic diseases (e.g. | Caco-2 | Bax | gb\|AF250190\| |
| | | | cancer) such as described herein under the heading | | DHFR | AF250190 |
| | | | “Hyperproliferative Disordersî (particularly including, but not | | | gb\|V00507\| |
| | | | limited to, cancer involving cells of the gastrointestinal tract). | | | HSDHFR |
| | | | Highly preferred embodiments of the invention include methods | | | |
| | | | of preventing, detecting, diagnosing, treating and/or ameliorating | | | |
| | | | cancer and hyperproliferative disorders involving the | | | |
| | | | gastrointestinal tract. (The Caco-2 cell line is a human colorectal | | | |
| | | | adenocarcinoma cell line available through the ATCC as cell line | | | |
| | | | number HTB-37). | | | |
| 515 | HHSBL18 | Cancer | Highly preferred indications include neoplastic diseases (e.g. | Daudi | c-jun | gb\|BC006175\| |
| | | | cancer) such as described herein under the heading | | Cyclin A1 | BC006175 |
| | | | “Hyperproliferative Disordersî (particularly including, but not | | Cyclin D2 | gb\|U97680\| |
| | | | limited to, cancers of immune cells, such as B-cells). Highly | | Egr1 | HSU97680 |
| | | | preferred embodiments of the invention include methods of | | | gb\|X68452\| |
| | | | preventing, detecting, diagnosing, treating and/or ameliorating | | | HSCYCD2 |
| | | | cancer and hyperproliferative disorders involving immune cells | | | |
| | | | (such as B-cells). (The Daudi cell line is a human B lymphoblast | | | |
| | | | cell line available through the ATCC as cell line number CCL- | | | |
| | | | 213). | | | |
| 515 | HHSBL18 | Cancer | Highly preferred indications include neoplastic diseases (e.g. | HEK293 | beta- | gb\|BC006175\| |
| | | | cancer) such as described herein under the heading | | catenin | BC006175 |
| | | | “Hyperproliferative Disordersî (particularly including, but not | | c-jun | gb\|AR034832\| |
| | | | limited to, cancers of epithelial cells or cancers involving the | | Cyclin D3 | AR034832 |
| | | | renal system). Highly preferred embodiments of the invention | | DHFR | gb\|V00507\| |
| | | | include methods of preventing, detecting, diagnosing, treating | | E-cadherin | HSDHFR |
| | | | and/or ameliorating cancer and hyperproliferative disorders | | Egr1 M1 | gb\|Z35408\| |
| | | | involving epithelial cells or the renal system. (The 293 cell line | | REBO R | HSECAD9 |
| | | | human embryonal kidney epithelial cell line available through | | p53 | gb\|X59543\| |
| | | | the ATCC as cell line number CRL-1573). | | U66469 | HSRIREM1 |
| | | | | | p53 | gb\|X60011\| |
| | | | | | regulated | HSP53002 |
| | | | | | gene | |
| 515 | HHSBL18 | Cancer | Highly preferred indications include neoplastic diseases (e.g. | HUVEC | beta- | gb\|BC006175\| |
| | | | cancer) such as described herein under the heading | | catenin | BC006175 |
| | | | “Hyperproliferative Disordersî (particularly including, but not | | c-jun | gb\|U97680\| |
| | | | limited to, cancers involving endothelial cells). Highly preferred | | Cyclin A1 | HSU97680 |
| | | | embodiments of the invention include methods of preventing, | | | |
| | | | detecting, diagnosing, treating and/or ameliorating cancer and | | | |
| | | | hyperproliferative disorders involving endothelial cells. | | | |
| | | | (HUVEC cells are human umbilical vein endothelial cells). | | | |
| 515 | HHSBL18 | Cancer | Highly preferred indications include neoplastic diseases (e.g. | Jurkat | Cyclin D2 | gb\|X68452\| |
| | | | cancer) such as described herein under the heading | | | HSCYCD2 |
| | | | “Hyperproliferative Disordersî (particularly including, but not | | | |
| | | | limited to, cancers of immune cells, such as T-cells). Highly | | | |
| | | | preferred embodiments of the invention include methods of | | | |
| | | | preventing, detecting, diagnosing, treating and/or ameliorating | | | |
| | | | cancer and hyperproliferative disorders involving immune cells | | | |
| | | | (such as T-cells). (The Jurkat cell line is a human T lymphocyte | | | |
| | | | cell line available through the ATCC as cell line number TIB- | | | |
| | | | 152). | | | |
| 515 | HHSBL18 | Cancer | Highly preferred indications include neoplastic diseases (e.g. | Liver | bcl-2 | gb\|X06487\| |
| | | | cancer) such as described herein under the heading | | Cyclin D3 | HSBCL2IG |
| | | | “Hyperproliferative Disordersî (particularly including, but not | | | gb\|AR034832\| |
| | | | limited to, cancers involving cells of the hepatic system). Highly | | | AR034832 |
| | | | preferred embodiments of the invention include methods of | | | |
| | | | preventing, detecting, diagnosing, treating and/or ameliorating | | | |
| | | | cancer and hyperproliferative disorders involving cells of the | | | |
| | | | hepatic system. | | | |
| 515 | HHSBL18 | Cancer | Highly preferred indications include neoplastic diseases (e.g. | NHDF | Cyclin A1 | gb\|U97680\| |
| | | | cancer) such as described herein under the heading | | Cyclin D2 | HSU97680 |
| | | | “Hyperproliferative Disordersî (particularly including, but not | | DHFR | gb\|X68452\| |
| | | | limited to cancers involving cells of the skin). Highly preferred | | Egr1 | HSCYCD2 |
| | | | embodiments of the invention include methods of preventing, | | | gb\|V00507\| |
| | | | detecting, diagnosing, treating and/or ameliorating cancer and | | | HSDHFR |
| | | | hyperproliferative disorders involving skin cells. (NHDF cells | | | |
| | | | are normal human dermal fibroblasts). | | | |
| 515 | HHSBL18 | Cancer | Highly preferred indications include neoplastic diseases (e.g. | THP1 | bcl-2 | gb\|X06487\| |
| | | | cancer) such as described herein under the heading | | c-jun | HSBCL2IG |
| | | | “Hyperproliferative Disordersî (particularly including, but not | | Cyclin A1 | gb\|BC006175\| |
| | | | limited to, cancers of immune cells, such as monocytes). Highly | | Cyclin D | BC006175 |
| | | | preferred embodiments of the invention include methods of | | DHFR | gb\|U97680\| |
| | | | preventing, detecting, diagnosing, treating and/or ameliorating | | E-cadherin | HSU97680 |
| | | | cancer and hyperproliferative disorders involving cells of the | | M1 RIBO | gb\|BC000076\| |
| | | | immune system (such as monocytes). (The THP-1 cell line is a | | R U66469 | BC000076 |
| | | | human monocyte cell line available through the ATCC as cell | | p53 | gb\|V00507\| |
| | | | line number TIB-202). | | regulated | HSDHFR |
| | | | | | gene | gb\|Z35408\| |
| | | | | | | HSECAD9 |
| | | | | | | gb\|X59543\| |
| | | | | | | HSRIREM1 |
| 515 | HHSBL18 | Cancer | Highly preferred indications include neoplastic diseases (e.g. | U937 | Cyclin A1 | gb\|U97680\| |
| | | | cancer) such as described herein under the heading | | | HSU97680 |
| | | | “Hyperproliferative Disordersî (particularly including, but not | | | |
| | | | limited to, cancers of immune cells, such as monocytes). Highly | | | |
| | | | preferred embodiments of the invention include methods of | | | |
| | | | preventing, detecting, diagnosing, treating and/or ameliorating | | | |
| | | | cancer and hyperproliferative disorders involving cells of the | | | |
| | | | immune system (such as monocytes). (The U-937 cell line is a | | | |
| | | | human monocyte cell line available through the ATCC as cell | | | |
| | | | line number CRL-1593.2) | | | |
| 515 | HHSBL18 | Diabetes | A highly preferred indication is diabetes. Additional highly | Adipocytes- | Acyl CoA | gb\|L09229\| |
| | | | preferred indications include complications associated with | Mar. 12, 2001 | synthetase | HUMFACAL |
| | | | diabetes (e.g., diabetic retinopathy, diabetic nephropathy, kidney | | CAP | gb\|AF136380\| |
| | | | disease (e.g., renal failure, nephropathy and/or other diseases and | | IRS1 | AF136380 |
| | | | disorders as described in the “Renal Disorders” section below), | | | |
| | | | diabetic neuropathy, nerve disease and nerve damage (e.g., due | | | |
| | | | to diabetic neuropathy), blood vessel blockage, heart disease, | | | |
| | | | stoke, impotence (e.g., due to diabetic neuropathy or blood | | | |
| | | | vessel blockage), seizures, mental confusion, drowsiness, | | | |
| | | | nonketotic hyperglycemic-hyperosmolar coma, cardiovascular | | | |
| | | | disease (e.g., heart disease, atherosclerosis, microvascular | | | |
| | | | disease, hypertension, stroke, and other diseases and disorders as | | | |
| | | | described in the “Cardiovascular Disorders” section below), | | | |
| | | | dyslipidemia, endocrine disorders (as described in the | | | |
| | | | “Endocrine Disorders” section below), neuropathy, vision | | | |
| | | | impairment (e.g., diabetic retinopathy and blindness), ulcers and | | | |
| | | | impaired wound healing, and infection (e.g., infectious diseases | | | |
| | | | and disorders as described in the “Infectious Diseases” section | | | |
| | | | below, especially of the urinary tract and skin). Highly preferred | | | |
| | | | indications also include obesity, weight gain, and weight loss, as | | | |
| | | | well as complications associated with obesity, weight gain, and | | | |
| | | | weight loss. Preferred embodiments of the invention include | | | |
| | | | methods of preventing, detecting, diagnosing, treating and/or | | | |
| | | | ameliorating the above mentioned conditions, disorders, and | | | |
| | | | diseases. | | | |
| 515 | HHSBL18 | Immune | Highly preferred indications include immunological disorders | AOSMC | CD40 | gb\|AJ300189\| |
| | | | such as described herein under the heading “Immune Activity” | | ICAM | HSA30018 |
| | | | and/or “Blood-Related Disorders” (particularly including, but not | | | gb\|X06990\| |
| | | | limited to, immune disorders involving muscle tissues and the | | | HSICAM1 |
| | | | cardiovascular system (e.g. heart, lungs, circulatory system)). | | | |
| | | | Highly preferred embodiments of the invention include methods | | | |
| | | | of preventing, detecting, diagnosing, treating and/or ameliorating | | | |
| | | | disorders of the immune system (particularly including, but not | | | |
| | | | limited to, immune disorders involving muscle tissue or the | | | |
| | | | cardiovascular system). (AOSMC cells are human aortic smooth | | | |
| | | | muscle cells). | | | |
| 515 | HHSBL18 | Immune | Highly preferred indications include immunological disorders | Caco-2 | CCR4 | gb\|AB023888\| |
| | | | such as described herein under the heading “Immune Activity” | | CCR5 | AB023888 |
| | | | and/or “Blood-Related Disorders” (particularly including, but not | | CTLA4 | gb\|AF161918\| |
| | | | limited to, immune disorders involving the cells of the | | ICAM | AF161918 |
| | | | gastrointestinal tract). Highly preferred embodiments of the | | | gb\|AF316875\| |
| | | | invention include methods of preventing, detecting, diagnosing, | | | AF316875 |
| | | | treating and/or ameliorating disorders of the immune system | | | gb\|X06990\| |
| | | | (particularly including, but not limited to, immune disorders | | | HSICAM1 |
| | | | involving cells of the gastrointestinal tract). (The Caco-2 cell line | | | |
| | | | is a human colorectal adenocarcinoma cell line available through | | | |
| | | | the ATCC as cell line number HTB-37). | | | |
| 515 | HHSBL18 | Immune | Highly preferred indications include immunological disorders | Daudi | c-maf | gb\|AF055377\| |
| | | | such as described herein under the heading “Immune Activity” | | CIS3 | AF055377 |
| | | | and/or “Blood-Related Disorders” (particularly including, but not | | GATA3 | gb\|AB006967\| |
| | | | limited to, immune disorders involving the B-cells). Highly | | ICAM | AB006967 |
| | | | preferred embodiments of the invention include methods of | | Rag1 | gb\|X55037\| |
| | | | preventing, detecting, diagnosing, treating and/or ameliorating | | TNF | HSGATA3 |
| | | | disorders of the immune system (particularly including, but not | | VCAM | gb\|X06990\| |
| | | | limited to, immune disorders involving B-cells). (The Daudi cell | | | HSICAM1 |
| | | | line is a human B lymphoblast cell line available through the | | | gb\|M29474\| |
| | | | ATCC as cell line number CCL-213). | | | HUMRAG1 |
| | | | | | | gb\|AJ270944\| |
| | | | | | | HSA27094 |
| | | | | | | gb\|A30922\| |
| | | | | | | A30922 |
| 515 | HHSBL18 | Immune | Highly preferred indications include immunological disorders | HEK293 | CCR4 | gb\|AB023888\| |
| | | | such as described herein under the heading “Immune Activity” | | CCR7 | AB023888 |
| | | | and/or “Blood-Related Disorders” (particularly including, but not | | CD25 | gb\|X84702\| |
| | | | limited to, immune disorders involving epithelial cells or the | | CD30 | HSDNABLR2 |
| | | | renal system). Highly preferred embodiments of the invention | | GATA3 | gb\|X03137\| |
| | | | include methods of preventing, detecting, diagnosing, treating | | Rag1 | HSIL2RG7 |
| | | | and/or ameliorating disorders of the immune system (particularly | | Rag2 | gb\|X55037\| |
| | | | including, but not limited to, immune disorders involving | | VCAM | HSGATA3 |
| | | | epithelial cells or the renal system). (The 293 cell line is a human | | | gb\|M29474\| |
| | | | embryonal kidney epithelial cell line available through the ATCC | | | HUMRAG1 |
| | | | as cell line number CRL-1573). | | | gb\|AY011962\| |
| | | | | | | AY011962 |
| | | | | | | gb\|A30922\| |
| | | | | | | A30922 |
| 515 | HHSBL18 | Immune | Highly preferred indications include immunological disorders | HUVEC | TNF | gb\|AJ270944\| |
| | | | such as described herein under the heading “Immune Activity” | | | HSA27094 |
| | | | and/or “Blood-Related Disorders” (particularly including, but not | | | |
| | | | limited to, immune disorders involving endothelial cells). Highly | | | |
| | | | preferred embodiments of the invention include methods of | | | |
| | | | preventing, detecting, diagnosing, treating and/or ameliorating | | | |
| | | | disorders of the immune system (particularly including, but not | | | |
| | | | limited to, immune disorders involving endothelial cells). | | | |
| | | | (HUVEC cells are human umbilical vein endothelial cells). | | | |
| 515 | HHSBL18 | Immune | Highly preferred indications include immunological disorders | Jurkat | CCR4 | gb\|AB023888\| |
| | | | such as described herein under the heading “Immune Activity” | | CCR5 | AB023888 |
| | | | and/or “Blood-Related Disorders” (particularly including, but not | | Rag2 | gb\|AF161918\| |
| | | | limited to, immune disorders involving T-cells). Highly | | TNF | AF161918 |
| | | | preferred embodiments of the invention include methods of | | | gb\|AY011962\| |
| | | | preventing, detecting, diagnosing, treating and/or ameliorating | | | AY011962 |
| | | | disorders of the immune system (particularly including, but not | | | gb\|AJ270944\| |
| | | | limited to, immune disorders involving T-cells). (The Jurkat cell | | | HSA27094 |
| | | | line is a human T lymphocyte cell line available through the | | | |
| | | | ATCC as cell line number TIB-152). | | | |
| 515 | HHSBL18 | Immune | Highly preferred indications include immunological disorders | Liver | CCR7 | gb\|X84702\| |
| | | | such as described herein under the heading “Immune Activity” | | CD30 | HSDNABLR2 |
| | | | and/or “Blood-Related Disorders” (particularly including, but not | | CD40 | gb\|AJ300189\| |
| | | | limited to, immune disorders involving cells of the hepatic | | CIS3 | HSA30018 |
| | | | system). Highly preferred embodiments of the invention include | | ICAM | gb\|AB006967\| |
| | | | methods of preventing, detecting, diagnosing, treating and/or | | | AB006967 |
| | | | ameliorating disorders of the immune system (particularly | | | gb\|X06990\| |
| | | | including, but not limited to, immune disorders involving cells of | | | HSICAM1 |
| | | | the hepatic system). | | | |
| 515 | HHSBL18 | Immune | Highly preferred indications include immunological disorders | NHDF | VLA4 | gb\|X16983\| |
| | | | such as described herein under the heading “Immune Activity” | | | HSINTAL4 |
| | | | and/or “Blood-Related Disorders” (particularly including, but not | | | |
| | | | limited to, immune disorders involving the skin). Highly | | | |
| | | | preferred embodiments of the invention include methods of | | | |
| | | | preventing, detecting, diagnosing, treating and/or ameliorating | | | |
| | | | disorders of the immune system (particularly including, but not | | | |
| | | | limited to, immune disorders involving the skin). (NHDF cells | | | |
| | | | are normal human dermal fibroblasts). | | | |
| 515 | HHSBL18 | Immune | Highly preferred indications include immunological disorders | THP1 | CCR5 | gb\|AF161918\| |
| | | | such as described herein under the heading “Immune Activity” | | CCR7 | AF161918 |
| | | | and/or “Blood-Related Disorders” (particularly including, but not | | CD25 | gb\|X84702\| |
| | | | limited to, immune disorders involving monocytes). Highly | | CD30 | HSDNABLR2 |
| | | | preferred embodiments of the invention include methods of | | CD40 | gb\|X03137\| |
| | | | preventing, detecting, diagnosing, treating and/or ameliorating | | CIS3 | HSIL2RG7 |
| | | | disorders of the immune system (particularly including, but not | | CTLA4 | gb\|AJ300189\| |
| | | | limited to, immune disorders involving monocytes). (The THP1 | | IL1B | HSA30018 |
| | | | cell line is a human monocyte cell line available through the | | Rag2 | gb\|AB006967\| |
| | | | ATCC as cell line number TIB-202). | | VCAM | AB006967 |
| | | | | | | gb\|AF316875\| |
| | | | | | | AF316875 |
| | | | | | | gb\|X02532\| |
| | | | | | | HSIL1BR |
| | | | | | | gb\|AY011962\| |
| | | | | | | AY011962 |
| | | | | | | gb\|A30922\| |
| | | | | | | A30922 |
| 515 | HHSBL18 | Immune | Highly preferred indications include immunological disorders | U937 | CCR4 | gb\|AB023888\| |
| | | | such as described herein under the heading “Immune Activity” | | | AB023888 |
| | | | and/or “Blood-Related Disorders” (particularly including, but not | | | |
| | | | limited to, immune disorders involving monocytes). Highly | | | |
| | | | preferred embodiments of the invention include methods of | | | |
| | | | preventing, detecting, diagnosing, treating and/or ameliorating | | | |
| | | | disorders of the immune system (particularly including, but not | | | |
| | | | limited to, immune disorders involving monocytes). (The U937 | | | |
| | | | cell line is a human monocyte cell line available through the | | | |
| | | | ATCC as cell line number CRL-1593.2). | | | |
| 565 | HKAPI15 | Angiogenesis | Highly preferred indications include diagnosis, prevention, | Caco-2 | Cycloox | gb\|X04665\| |
| | | | treatment, and/or amelioration of diseases and disorders | | TSP-1 | HSTHROMR |
| | | | involving angiogenesis, wound healing, neoplasia (particularly | | Vegf1 | gb\|AF024710\| |
| | | | including, but not limited to, tumor metastases), and | | | AF024710 |
| | | | cardiovascular diseases and disorders; as described herein under | | | |
| | | | the headings “Hyperproliferative Disorders,” “Regeneration,” | | | |
| | | | “Anti-Angiogenesis Activity,” “Diseases at the Cellular Level,” | | | |
| | | | and “Wound Healing and Epithelial Cell Proliferation.”(The | | | |
| | | | Caco-2 cell line is a human colorectal adenocarcinoma cell line | | | |
| | | | available through the ATCC as cell line number HTB-37). | | | |
| 565 | HKAPI15 | Angiogenesis | Highly preferred indications include diagnosis, prevention, | HEK293 | Flt1 | gb\|AF063657\| |
| | | | treatment, and/or amelioration of diseases and disorders | | TSP-1 | AF063657 |
| | | | involving angiogenesis, wound healing, neoplasia (particularly | | | gb\|X04665\| |
| | | | including, but not limited to, tumor metastases), and | | | HSTHROMR |
| | | | cardiovascular diseases and disorders; as described herein under | | | |
| | | | the headings “Hyperproliferative Disorders,” “Regeneration,” | | | |
| | | | “Anti-Angiogenesis Activity,” “Diseases at the Cellular Level,” | | | |
| | | | and “Wound Healing and Epithelial Cell Proliferation.”(The | | | |
| | | | HEK293 cell line is a human embryonal kidney epithelial cell | | | |
| | | | line available through the ATCC as cell line number CRL-1573). | | | |
| 565 | HKAPI15 | Angiogenesis | Highly preferred indications include diagnosis, prevention, | HUVEC | Flt1 | gb\|AF063657\| |
| | | | treatment, and/or amelioration of diseases and disorders | | ICAM | AF063657 |
| | | | involving angiogenesis, wound healing, neoplasia (particularly | | Vegf1 | gb\|X06990\| |
| | | | including, but not limited to, tumor metastases), and | | | HSICAM1 |
| | | | cardiovascular diseases and disorders; as described herein under | | | gb\|AF024710\| |
| | | | the headings “Hyperproliferative Disorders,” “Regeneration,” | | | AF024710 |
| | | | “Anti-Angiogenesis Activity,” “Diseases at the Cellular Level,” | | | |
| | | | and “Wound Healing and Epithelial Cell Proliferation.”(HUVEC | | | |
| | | | cells are human umbilical vein endothelial cells). | | | |
| 565 | HKAPI15 | Angiogenesis | Highly preferred indications include diagnosis, prevention, | Jurkat | Vegf1 | gb\|AF024710\| |
| | | | treatment, and/or amelioration of diseases and disorders | | | AF024710 |
| | | | involving angiogenesis, wound healing, neoplasia (particularly | | | |
| | | | including, but not limited to, tumor metastases), and | | | |
| | | | cardiovascular diseases and disorders; as described herein under | | | |
| | | | the headings “Hyperproliferative Disorders,” “Regeneration,” | | | |
| | | | “Anti-Angiogenesis Activity,” “Diseases at the Cellular Level,” | | | |
| | | | and “Wound Healing and Epithelial Cell Proliferation.”(The | | | |
| | | | Jurkat cell line is a human T lymphocyte cell line available | | | |
| | | | through the ATCC as cell line number TIB-152). | | | |
| 565 | HKAPI15 | Cancer | Highly preferred indications include neoplastic diseases (e.g. | AOSMC | c-jun | gb\|BC006175\| |
| | | | cancer) such as described herein under the heading | | Cyclin A1 | BC006175 |
| | | | “Hyperproliferative Disordersî (particularly including, but not | | Egr1 | gb\|U97680\| |
| | | | limited to, cancers of muscle tissues and the cardiovascular | | | HSU97680 |
| | | | system (e.g. heart, lungs, circulatory system)). Highly preferred | | | |
| | | | embodiments of the invention include methods of preventing, | | | |
| | | | detecting, diagnosing, treating and/or ameliorating cancer and | | | |
| | | | hyperproliferative disorders. (AOSMC cells are aortic smooth | | | |
| | | | muscle cells). | | | |
| 565 | HKAPI15 | Cancer | Highly preferred indications include neoplastic diseases (e.g. | Caco-2 | Bax | gb\|AF250190\| |
| | | | cancer) such as described herein under the heading | | beta- | AF250190 |
| | | | “Hyperproliferative Disordersî (particularly including, but not | | catenin | gb\|BC006175\| |
| | | | limited to, cancer involving cells of the gastrointestinal tract). | | c-jun | BC006175 |
| | | | Highly preferred embodiments of the invention include methods | | Cyclin D | gb\|BC000076\| |
| | | | of preventing, detecting, diagnosing, treating and/or ameliorating | | Cyclin D3 | BC000076 |
| | | | cancer and hyperproliferative disorders involving the | | DHFR | gb\|AR034832\| |
| | | | gastrointestinal tract. (The Caco-2 cell line is a human colorectal | | Egr1 p53 | AR034832 |
| | | | adenocarcinoma cell line available through the ATCC as cell line | | | gb\|V00507\| |
| | | | number HTB-37). | | | HSDHFR |
| | | | | | | gb\|X60011\| |
| | | | | | | HSP53002 |
| 565 | HKAPI15 | Cancer | Highly preferred indications include neoplastic diseases (e.g. | Daudi | Bax | gb\|AF250190\| |
| | | | cancer) such as described herein under the heading | | Cyclin D2 | AF250190 |
| | | | “Hyperproliferative Disordersî (particularly including, but not | | | gb\|X68452\| |
| | | | limited to, cancers of immune cells, such as B-cells). Highly | | | HSCYCD2 |
| | | | preferred embodiments of the invention include methods of | | | |
| | | | preventing, detecting, diagnosing, treating and/or ameliorating | | | |
| | | | cancer and hyperproliferative disorders involving immune cells | | | |
| | | | (such as B-cells). (The Daudi cell line is a human B lymphoblast | | | |
| | | | cell line available through the ATCC as cell line number CCL- | | | |
| | | | 213). | | | |
| 565 | HKAPI15 | Cancer | Highly preferred indications include neoplastic diseases (e.g. | HEK293 | DHFR | gb\|V00507\| |
| | | | cancer) such as described herein under the heading | | p53 | HSDHFR |
| | | | “Hyperproliferative Disordersî (particularly including, but not | | | gb\|X60011\| |
| | | | limited to, cancers of epithelial cells or cancers involving the | | | HSP53002 |
| | | | renal system). Highly preferred embodiments of the invention | | | |
| | | | include methods of preventing, detecting, diagnosing, treating | | | |
| | | | and/or ameliorating cancer and hyperproliferative disorders | | | |
| | | | involving epithelial cells or the renal system. (The 293 cell line | | | |
| | | | human embryonal kidney epithelial cell line available through | | | |
| | | | the ATCC as cell line number CRL-1573). | | | |
| 565 | HKAPI15 | Cancer | Highly preferred indications include neoplastic diseases (e.g. | Jurkat | Egr1 | gb\|BC000275\| |
| | | | cancer) such as described herein under the heading | | p21 | BC000275 |
| | | | “Hyperproliferative Disordersî (particularly including, but not | | | |
| | | | limited to, cancers of immune cells, such as T-cells). Highly | | | |
| | | | preferred embodiments of the invention include methods of | | | |
| | | | preventing, detecting, diagnosing, treating and/or ameliorating | | | |
| | | | cancer and hyperproliferative disorders involving immune cells | | | |
| | | | (such as T-cells). (The Jurkat cell line is a human T lymphocyte | | | |
| | | | cell line available through the ATCC as cell line number TIB- | | | |
| | | | 152). | | | |
| 565 | HKAPI15 | Immune | Highly preferred indications include immunological disorders | AOSMC | IL5 | gb\|X12705\| |
| | | | such as described herein under the heading “Immune Activity” | | | HSBCDFIA |
| | | | and/or “Blood-Related Disorders” (particularly including, but not | | | |
| | | | limited to, immune disorders involving muscle tissues and the | | | |
| | | | cardiovascular system (e.g. heart, lungs, circulatory system)). | | | |
| | | | Highly preferred embodiments of the invention include methods | | | |
| | | | of preventing, detecting, diagnosing, treating and/or ameliorating | | | |
| | | | disorders of the immune system (particularly including, but not | | | |
| | | | limited to, immune disorders involving muscle tissue or the | | | |
| | | | cardiovascular system). (AOSMC cells are human aortic smooth | | | |
| | | | muscle cells). | | | |
| 565 | HKAPI15 | Immune | Highly preferred indications include immunological disorders | Caco-2 | HLA-c | gb\|AK027080\| |
| | | | such as described herein under the heading “Immune Activity” | | LTBR | AK027080 |
| | | | and/or “Blood-Related Disorders” (particularly including, but not | | | |
| | | | limited to, immune disorders involving the cells of the | | | |
| | | | gastrointestinal tract). Highly preferred embodiments of the | | | |
| | | | invention include methods of preventing, detecting, diagnosing, | | | |
| | | | treating and/or ameliorating disorders of the immune system | | | |
| | | | (particularly including, but not limited to, immune disorders | | | |
| | | | involving cells of the gastrointestinal tract). (The Caco-2 cell line | | | |
| | | | is a human colorectal adenocarcinoma cell line available through | | | |
| | | | the ATCC as cell line number HTB-37). | | | |
| 565 | HKAPI15 | Immune | Highly preferred indications include immunological disorders | Daudi | CD30 | |
| | | | such as described herein under the heading “Immune Activity” | | | |
| | | | and/or “Blood-Related Disorders” (particularly including, but not | | | |
| | | | limited to, immune disorders involving the B-cells). Highly | | | |
| | | | preferred embodiments of the invention include methods of | | | |
| | | | preventing, detecting, diagnosing, treating and/or ameliorating | | | |
| | | | disorders of the immune system (particularly including, but not | | | |
| | | | limited to, immune disorders involving B-cells). (The Daudi cell | | | |
| | | | line is a human B lymphoblast cell line available through the | | | |
| | | | ATCC as cell line number CCL-213). | | | |
| 565 | HKAPI15 | Immune | Highly preferred indications include immunological disorders | HEK293 | c-maf | gb\|AF055377\| |
| | | | such as described herein under the heading “Immune Activity” | | GATA1 | AF055377 |
| | | | and/or “Blood-Related Disorders” (particularly including, but not | | LTBR | gb\|X17254\| |
| | | | limited to, immune disorders involving epithelial cells or the | | TNF | HSERYF1 |
| | | | renal system). Highly preferred embodiments of the invention | | | gb\|AK027080\| |
| | | | include methods of preventing, detecting, diagnosing, treating | | | AK027080 |
| | | | and/or ameliorating disorders of the immune system (particularly | | | gb\|AJ270944\| |
| | | | including, but not limited to, immune disorders involving | | | HSA27094 |
| | | | epithelial cells or the renal system). (The 293 cell line is a human | | | |
| | | | embryonal kidney epithelial cell line available through the ATCC | | | |
| | | | as cell line number CRL-1573). | | | |
| 565 | HKAPI15 | Immune | Highly preferred indications include immunological disorders | HUVEC | c-maf | gb\|AF055377\| |
| | | | such as described herein under the heading “Immune Activity” | | CIS3 | AF055377 |
| | | | and/or “Blood-Related Disorders” (particularly including, but not | | ICAM | gb\|AB006967\| |
| | | | limited to, immune disorders involving endothelial cells). Highly | | TNF | AB006967 |
| | | | preferred embodiments of the invention include methods of | | | gb\|X06990\| |
| | | | preventing, detecting, diagnosing, treating and/or ameliorating | | | HSICAM1 |
| | | | disorders of the immune system (particularly including, but not | | | gb\|AJ270944\| |
| | | | limited to, immune disorders involving endothelial cells). | | | HSA27094 |
| | | | (HUVEC cells are human umbilical vein endothelial cells). | | | |
| 565 | HKAPI15 | Immune | Highly preferred indications include immunological disorders | Jurkat | CD28 | gb\|AF222342\| |
| | | | such as described herein under the heading “Immune Activity” | | Rag1 | AF222342 |
| | | | and/or “Blood-Related Disorders” (particularly including, but not | | | gb\|M29474\| |
| | | | limited to, immune disorders involving T-cells). Highly | | | HUMRAG1 |
| | | | preferred embodiments of the invention include methods of | | | |
| | | | preventing, detecting, diagnosing, treating and/or ameliorating | | | |
| | | | disorders of the immune system (particularly including, but not | | | |
| | | | limited to, immune disorders involving T-cells). (The Jurkat cell | | | |
| | | | line is a human T lymphocyte cell line available through the | | | |
| | | | ATCC as cell line number TIB-152). | | | |
| 599 | HLDOU18 | Angiogenesis | Highly preferred indications include diagnosis, prevention, | AOSMC | TSP-1 | gb\|X04665\| |
| | | | treatment, and/or amelioration of diseases and disorders | | | HSTHROMR |
| | | | involving angiogenesis, wound healing, neoplasia (particularly | | | |
| | | | including, but not limited to, tumor metastases), and | | | |
| | | | cardiovascular diseases and disorders; as described herein under | | | |
| | | | the headings “Hyperproliferative Disorders,” “Regeneration,” | | | |
| | | | “Anti-Angiogenesis Activity,” “Diseases at the Cellular Level,” | | | |
| | | | and “Wound Healing and Epithelial Cell Proliferation.”(AOSMC | | | |
| | | | cells are aortic smooth muscle cells). | | | |
| 599 | HLDOU18 | Angiogenesis | Highly preferred indications include diagnosis, prevention, | Caco-2 | TSP-1 | gb\|X04665\| |
| | | | treatment, and/or amelioration of diseases and disorders | | | HSTHROMR |
| | | | involving angiogenesis, wound healing, neoplasia (particularly | | | |
| | | | including, but not limited to, tumor metastases), and | | | |
| | | | cardiovascular diseases and disorders; as described herein under | | | |
| | | | the headings “Hyperproliferative Disorders,” “Regeneration,” | | | |
| | | | “Anti-Angiogenesis Activity,” “Diseases at the Cellular Level,” | | | |
| | | | and “Wound Healing and Epithelial Cell Proliferation.”(The | | | |
| | | | Caco-2 cell line is a human colorectal adenocarcinoma cell line | | | |
| | | | available through the ATCC as cell line number HTB-37). | | | |
| 599 | HLDOU18 | Angiogenesis | Highly preferred indications include diagnosis, prevention, | Daudi | VCAM | gb\|A30922\| |
| | | | treatment, and/or amelioration of diseases and disorders | | | A30922 |
| | | | involving angiogenesis, wound healing, neoplasia (particularly | | | |
| | | | including, but not limited to, tumor metastases), and | | | |
| | | | cardiovascular diseases and disorders; as described herein under | | | |
| | | | the headings “Hyperproliferative Disorders,” “Regeneration,” | | | |
| | | | “Anti-Angiogenesis Activity,” “Diseases at the Cellular Level,” | | | |
| | | | and “Wound Healing and Epithelial Cell Proliferation.”(The | | | |
| | | | Daudi cell line is a human B lymphoblast cell line available | | | |
| | | | through the ATCC as cell line number CCL-213). | | | |
| 599 | HLDOU18 | Angiogenesis | Highly preferred indications include diagnosis, prevention, | HUVEC | Cycloox | gb\|AF024710\| |
| | | | treatment, and/or amelioration of diseases and disorders | | Vegf1 | AF024710 |
| | | | involving angiogenesis, wound healing, neoplasia (particularly | | | |
| | | | including, but not limited to, tumor metastases), and | | | |
| | | | cardiovascular diseases and disorders; as described herein under | | | |
| | | | the headings “Hyperproliferative Disorders,” “Regeneration,” | | | |
| | | | “Anti-Angiogenesis Activity,” “Diseases at the Cellular Level,” | | | |
| | | | and “Wound Healing and Epithelial Cell Proliferation.”(HUVEC | | | |
| | | | cells are human umbilical vein endothelial cells). | | | |
| 599 | HLDOU18 | Angiogenesis | Highly preferred indications include diagnosis, prevention, | Jurkat | Flt1 | gb\|AF063657\| |
| | | | treatment, and/or amelioration of diseases and disorders | | | AF063657 |
| | | | involving angiogenesis, wound healing, neoplasia (particularly | | | |
| | | | including, but not limited to, tumor metastases), and | | | |
| | | | cardiovascular diseases and disorders; as described herein under | | | |
| | | | the headings “Hyperproliferative Disorders,” “Regeneration,” | | | |
| | | | “Anti-Angiogenesis Activity,” “Diseases at the Cellular Level,” | | | |
| | | | and “Wound Healing and Epithelial Cell Proliferation.”(The | | | |
| | | | Jurkat cell line is a human T lymphocyte cell line available | | | |
| | | | through the ATCC as cell line number TIB-152). | | | |
| 599 | HLDOU18 | Angiogenesis | Highly preferred indications include diagnosis, prevention, | Liver | ICAM | gb\|X06990\| |
| | | | treatment, and/or amelioration of diseases and disorders | | | HSICAM1 |
| | | | involving angiogenesis, wound healing, neoplasia (particularly | | | |
| | | | including, but not limited to, tumor metastases), and | | | |
| | | | cardiovascular diseases and disorders; as described herein under | | | |
| | | | the headings “Hyperproliferative Disorders,” “Regeneration,” | | | |
| | | | “Anti-Angiogenesis Activity,” “Diseases at the Cellular Level,” | | | |
| | | | and “Wound Healing and Epithelial Cell Proliferation.” | | | |
| 599 | HLDOU18 | Angiogenesis | Highly preferred indications include diagnosis, prevention, | U937 | VCAM | gb\|A30922\| |
| | | | treatment, and/or amelioration of diseases and disorders | | | A30922 |
| | | | involving angiogenesis, wound healing, neoplasia (particularly | | | |
| | | | including, but not limited to, tumor metastases), and | | | |
| | | | cardiovascular diseases and disorders; as described herein under | | | |
| | | | the headings “Hyperproliferative Disorders,” “Regeneration,” | | | |
| | | | “Anti-Angiogenesis Activity,” “Diseases at the Cellular Level,” | | | |
| | | | and “Wound Healing and Epithelial Cell Proliferation.”(The | | | |
| | | | U937 cell line is a human monocyte cell line available through | | | |
| | | | the ATCC as cell line number CRL-1593.2). | | | |
| 599 | HLDOU18 | Cancer | Highly preferred indications include neoplastic diseases (e.g. | AOSMC | bcl-2 | gb\|X06487\| |
| | | | cancer) such as described herein under the heading | | DHFR | HSBCL2IG |
| | | | “Hyperproliferative Disordersî (particularly including, but not | | TAA6 | gb\|V00507\| |
| | | | limited to, cancers of muscle tissues and the cardiovascular | | | HSDHFR |
| | | | system (e.g. heart, lungs, circulatory system)). Highly preferred | | | gb\|I34297\| |
| | | | embodiments of the invention include methods of preventing, | | | I34297 |
| | | | detecting, diagnosing, treating and/or ameliorating cancer and | | | |
| | | | hyperproliferative disorders. (AOSMC cells are aortic smooth | | | |
| | | | muscle cells). | | | |
| 599 | HLDOU18 | Cancer | Highly preferred indications include neoplastic diseases (e.g. | Caco-2 | bcl-2 | gb\|X06487\| |
| | | | cancer) such as described herein under the heading | | DHFR | HSBCL2IG |
| | | | “Hyperproliferative Disordersî (particularly including, but not | | TAA6 | gb\|V00507\| |
| | | | limited to, cancer involving cells of the gastrointestinal tract). | | | HSDHFR |
| | | | Highly preferred embodiments of the invention include methods | | | gb\|I34297\| |
| | | | of preventing, detecting, diagnosing, treating and/or ameliorating | | | I34297 |
| | | | cancer and hyperproliferative disorders involving the | | | |
| | | | gastrointestinal tract. (The Caco-2 cell line is a human colorectal | | | |
| | | | adenocarcinoma cell line available through the ATCC as cell line | | | |
| | | | number HTB-37). | | | |
| 599 | HLDOU18 | Cancer | Highly preferred indications include neoplastic diseases (e.g. | Daudi | TAA6 | gb\|I34297\| |
| | | | cancer) such as described herein under the heading | | | I34297 |
| | | | “Hyperproliferative Disordersî (particularly including, but not | | | |
| | | | limited to, cancers of immune cells, such as B-cells). Highly | | | |
| | | | preferred embodiments of the invention include methods of | | | |
| | | | preventing, detecting, diagnosing, treating and/or ameliorating | | | |
| | | | cancer and hyperproliferative disorders involving immune cells | | | |
| | | | (such as B-cells). (The Daudi cell line is a human B lymphoblast | | | |
| | | | cell line available through the ATCC as cell line number CCL- | | | |
| | | | 213). | | | |
| 599 | HLDOU18 | Cancer | Highly preferred indications include neoplastic diseases (e.g. | HUVEC | bcl-2 | gb\|X06487\| |
| | | | cancer) such as described herein under the heading | | E-cadherin | HSBCL2IG |
| | | | “Hyperproliferative Disordersî (particularly including, but not | | p21 | gb\|Z35408\| |
| | | | limited to, cancers involving endothelial cells). Highly preferred | | TAA6 | HSECAD9 |
| | | | embodiments of the invention include methods of preventing, | | | gb\|BC000275\| |
| | | | detecting, diagnosing, treating and/or ameliorating cancer and | | | BC000275 |
| | | | hyperproliferafive disorders involving endothelial cells. | | | gb\|I34297\| |
| | | | (HUVEC cells are human umbilical vein endothelial cells). | | | I34297 |
| 599 | HLDOU18 | Cancer | Highly preferred indications include neoplastic diseases (e.g. | Jurkat | Cyclin D3 | gb\|AR034832\| |
| | | | cancer) such as described herein under the heading | | DHFR | AR034832 |
| | | | “Hyperproliferative Disordersî (particularly including, but not | | p53 | gb\|V00507\| |
| | | | limited to, cancers of immune cells, such as T-cells). Highly | | | HSDHFR |
| | | | preferred embodiments of the invention include methods of | | | gb\|X60011\| |
| | | | preventing, detecting, diagnosing, treating and/or ameliorating | | | HSP53002 |
| | | | cancer and hyperproliferative disorders involving immune cells | | | |
| | | | (such as T-cells). (The Jurkat cell line is a human T lymphocyte | | | |
| | | | cell line available through the ATCC as cell line number TIB- | | | |
| | | | 152). | | | |
| 599 | HLDOU18 | Cancer | Highly preferred indications include neoplastic diseases (e.g. | Liver | Cyclin D | gb\|BC000076\| |
| | | | cancer) such as described herein under the heading | | DHFR | BC000076 |
| | | | “Hyperproliferative Disordersî (particularly including, but not | | Egr1 | gb\|V00507\| |
| | | | limited to, cancers involving cells of the hepatic system). Highly | | | HSDHFR |
| | | | preferred embodiments of the invention include methods of | | | |
| | | | preventing, detecting, diagnosing, treating and/or ameliorating | | | |
| | | | cancer and hyperproliferative disorders involving cells of the | | | |
| | | | hepatic system. | | | |
| 599 | HLDOU18 | Cancer | Highly preferred indications include neoplastic diseases (e.g. | U937 | c-jun | gb\|BC006175\| |
| | | | cancer) such as described herein under the heading | | Cyclin D2 | BC006175 |
| | | | “Hyperproliferative Disordersî (particularly including, but not | | Egr1 | gb\|X68452\| |
| | | | limited to, cancers of immune cells, such as monocytes). Highly | | M1 RIBO | HSCYCD2 |
| | | | preferred embodiments of the invention include methods of | | R | gb\|X59543\| |
| | | | preventing, detecting, diagnosing, treating and/or ameliorating | | | HSRIREM1 |
| | | | cancer and hyperproliferative disorders involving cells of the | | | |
| | | | immune system (such as monocytes). (The U-937 cell line is a | | | |
| | | | human monocyte cell line available through the ATCC as cell | | | |
| | | | line number CRL-1593.2) | | | |
| 599 | HLDOU18 | Diabetes | A highly preferred indication is diabetes. Additional highly | Adipocytes- | CAP | gb\|AF136380\| |
| | | | preferred indications include complications associated with | Mar. 12, 2001 | GLUT4 | AF136380 |
| | | | diabetes (e.g., diabetic retinopathy, diabetic nephropathy, kidney | | Hexo- | gb\|M20747\| |
| | | | disease (e.g., renal failure, nephropathy and/or other diseases and | | kinase II | HUMIRGT |
| | | | disorders as described in the “Renal Disorders” section below), | | IRS1 | gb\|Z46354\| |
| | | | diabetic neuropathy, nerve disease and nerve damage (e.g., due | | PPARg | HSHKEX1 |
| | | | to diabetic neuropathy), blood vessel blockage, heart disease, | | UNCP2 | gb\|X90563\| |
| | | | stroke, impotence (e.g., due to diabetic neuropathy or blood | | | HSPPARGAM |
| | | | vessel blockage), seizures, mental confusion, drowsiness, | | | gb\|AK025742\| |
| | | | nonketotic hyperglycemic-hyperosmolar coma, cardiovascular | | | AK025742 |
| | | | disease (e.g., heart disease, atherosclerosis, microvascular | | | |
| | | | disease, hypertension, stroke, and other diseases and disorders as | | | |
| | | | described in the “Cardiovascular Disorders” section below), | | | |
| | | | dyslipidemia, endocrine disorders (as described in the | | | |
| | | | “Endocrine Disorders” section below), neuropathy, vision | | | |
| | | | impairment (e.g., diabetic retinopathy and blindness), ulcers and | | | |
| | | | impaired wound healing, and infection (e.g., infectious diseases | | | |
| | | | and disorders as described in the “Infectious Diseases” section | | | |
| | | | below, especially of the urinary tract and skin). Highly preferred | | | |
| | | | indications also include obesity, weight gain, and weight loss, as | | | |
| | | | well as complications associated with obesity, weight gain, and | | | |
| | | | weight loss. Preferred embodiments of the invention include | | | |
| | | | methods of preventing, detecting, diagnosing, treating and/or | | | |
| | | | ameliorating the above mentioned conditions, disorders, and | | | |
| | | | diseases. | | | |
| 599 | HLDOU18 | Diabetes | A highly preferred indication is diabetes. Additional highly | AOSMC | Acyl CoA | gb\|L09229\| |
| | | | preferred indications include complications associated with | | synthetase | HUMFACAL |
| | | | diabetes (e.g., diabetic retinopathy, diabetic nephropathy, kidney | | IRS2 | gb\|AB000732\| |
| | | | disease (e.g., renal failure, nephropathy and/or other diseases and | | PPARg | AB000732 |
| | | | disorders as described in the “Renal Disorders” section below), | | UNCP2 | gb\|X90563\| |
| | | | diabetic neuropathy, nerve disease and nerve damage (e.g., due | | | HSPPARGAM |
| | | | to diabetic neuropathy), blood vessel blockage, heart disease, | | | gb\|AK025742\| |
| | | | stroke, impotence (e.g., due to diabetic neuropathy or blood | | | AK025742 |
| | | | vessel blockage), seizures, mental confusion, drowsiness, | | | |
| | | | nonketotic hyperglycemic-hyperosmolar coma, cardiovascular | | | |
| | | | disease (e.g., heart disease, atherosclerosis, microvascular | | | |
| | | | disease, hypertension, stroke, and other diseases and disorders as | | | |
| | | | described in the “Cardiovascular Disorders” section below), | | | |
| | | | dyslipidemia, endocrine disorders (as described in the | | | |
| | | | “Endocrine Disorders” section below), neuropathy, vision | | | |
| | | | impairment (e.g., diabetic retinopathy and blindness), ulcers and | | | |
| | | | impaired wound healing, and infection (e.g., infectious diseases | | | |
| | | | and disorders as described in the “Infectious Diseases” section | | | |
| | | | below, especially of the urinary tract and skin). Highly preferred | | | |
| | | | indications also include obesity, weight gain, and weight loss, as | | | |
| | | | well as complications associated with obesity, weight gain, and | | | |
| | | | weight loss. Preferred embodiments of the invention include | | | |
| | | | methods of preventing, detecting, diagnosing, treating and/or | | | |
| | | | ameliorating the above mentioned conditions, disorders, and | | | |
| | | | diseases. (AOSMC cells are human aortic smooth muscle cells). | | | |
| 599 | HLDOU18 | Diabetes | A highly preferred indication is diabetes. Additional highly | Caco-2 | Insulin | gb\|X70508\| |
| | | | preferred indications include complications associated with | | | HSPPI |
| | | | diabetes (e.g., diabetic retinopathy, diabetic nephropathy, kidney | | | |
| | | | disease (e.g., renal failure, nephropathy and/or other diseases and | | | |
| | | | disorders as described in the “Renal Disorders” section below), | | | |
| | | | diabetic neuropathy, nerve disease and nerve damage (e.g., due | | | |
| | | | to diabetic neuropathy), blood vessel blockage, heart disease, | | | |
| | | | stroke, impotence (e.g., due to diabetic neuropathy or blood | | | |
| | | | vessel blockage), seizures, mental confusion, drowsiness, | | | |
| | | | nonketotic hyperglycemic-hyperosmolar coma, cardiovascular | | | |
| | | | disease (e.g., heart disease, atherosclerosis, microvascular | | | |
| | | | disease, hypertension, stroke, and other diseases and disorders as | | | |
| | | | described in the “Cardiovascular Disorders” section below), | | | |
| | | | dyslipidemia, endocrine disorders (as described in the | | | |
| | | | “Endocrine Disorders” section below), neuropathy, vision | | | |
| | | | impairment (e.g., diabetic retinopathy and blindness), ulcers and | | | |
| | | | impaired wound healing, and infection (e.g., infectious diseases | | | |
| | | | and disorders as described in the “Infectious Diseases” section | | | |
| | | | below, especially of the urinary tract and skin). Highly preferred | | | |
| | | | indications also include obesity, weight gain, and weight loss, as | | | |
| | | | well as complications associated with obesity, weight gain, and | | | |
| | | | weight loss. Preferred embodiments of the invention include | | | |
| | | | methods of preventing, detecting, diagnosing, treating and/or | | | |
| | | | ameliorating the above mentioned conditions, disorders, and | | | |
| | | | diseases. (The Caco-2 cell line is a human colorectal | | | |
| | | | adenocarcinoma cell line available through the ATCC as cell line | | | |
| | | | number HTB-37). | | | |
| 599 | HLDOU18 | Diabetes | A highly preferred indication is diabetes. Additional highly | Daudi | Insulin | gb\|X70508\| |
| | | | preferred indications include complications associated with | | | HSPPI |
| | | | diabetes (e.g., diabetic retinopathy, diabetic nephropathy, kidney | | | |
| | | | disease (e.g., renal failure, nephropathy and/or other diseases and | | | |
| | | | disorders as described in the “Renal Disorders” section below), | | | |
| | | | diabetic neuropathy, nerve disease and nerve damage (e.g., due | | | |
| | | | to diabetic neuropathy), blood vessel blockage, heart disease, | | | |
| | | | stroke, impotence (e.g., due to diabetic neuropathy or blood | | | |
| | | | vessel blockage), seizures, mental confusion, drowsiness, | | | |
| | | | nonketotic hyperglycemic-hyperosmolar coma, cardiovascular | | | |
| | | | disease (e.g., heart disease, atherosclerosis, microvascular | | | |
| | | | disease, hypertension, stroke, and other diseases and disorders as | | | |
| | | | described in the “Cardiovascular Disorders” section below), | | | |
| | | | dyslipidemia, endocrine disorders (as described in the | | | |
| | | | “Endocrine Disorders” section below), neuropathy, vision | | | |
| | | | impairment (e.g., diabetic retinopathy and blindness), ulcers and | | | |
| | | | impaired wound healing, and infection (e.g., infectious diseases | | | |
| | | | and disorders as described in the “Infectious Diseases” section | | | |
| | | | below, especially of the urinary tract and skin). Highly preferred | | | |
| | | | indications also include obesity, weight gain, and weight loss, as | | | |
| | | | well as complications associated with obesity, weight gain, and | | | |
| | | | weight loss. Preferred embodiments of the invention include | | | |
| | | | methods of preventing, detecting, diagnosing, treating and/or | | | |
| | | | ameliorating the above mentioned conditions, disorders, and | | | |
| | | | diseases. (The Daudi cell line is a human B lymphoblast cell line | | | |
| | | | available through the ATCC as cell line number CCL-213). | | | |
| 599 | HLDOU18 | Diabetes | A highly preferred indication is diabetes. Additional highly | HUVEC | Leptin | gb\|AF281943\| |
| | | | preferred indications include complications associated with | | | AF281943 |
| | | | diabetes (e.g., diabetic retinopathy, diabetic nephropathy, kidney | | | |
| | | | disease (e.g., renal failure, nephropathy and/or other diseases and | | | |
| | | | disorders as described in the “Renal Disorders” section below), | | | |
| | | | diabetic neuropathy, nerve disease and nerve damage (e.g., due | | | |
| | | | to diabetic neuropathy), blood vessel blockage, heart disease, | | | |
| | | | stroke, impotence (e.g., due to diabetic neuropathy or blood | | | |
| | | | vessel blockage), seizures, mental confusion, drowsiness, | | | |
| | | | nonketotic hyperglycemic-hyperosmolar coma, cardiovascular | | | |
| | | | disease (e.g., heart disease, atherosclerosis, microvascular | | | |
| | | | disease, hypertension, stroke, and other diseases and disorders as | | | |
| | | | described in the “Cardiovascular Disorders” section below), | | | |
| | | | dyslipidemia, endocrine disorders (as described in the | | | |
| | | | “Endocrine Disorders” section below), neuropathy, vision | | | |
| | | | impairment (e.g., diabetic retinopathy and blindness), ulcers and | | | |
| | | | impaired wound healing, and infection (e.g., infectious diseases | | | |
| | | | and disorders as described in the “Infectious Diseases” section | | | |
| | | | below, especially of the urinary tract and skin). Highly preferred | | | |
| | | | indications also include obesity, weight gain, and weight loss, as | | | |
| | | | well as complications associated with obesity, weight gain, and | | | |
| | | | weight loss. Preferred embodiments of the invention include | | | |
| | | | methods of preventing, detecting, diagnosing, treating and/or | | | |
| | | | ameliorating the above mentioned conditions, disorders, and | | | |
| | | | diseases. (HUVEC cells are human umbilical vein endothelial | | | |
| | | | cells). | | | |
| 599 | HLDOU18 | Diabetes | A highly preferred indication is diabetes. Additional highly | Jurkat | Insulin | gb\|X70508\| |
| | | | preferred indications include complications associated with | | Resistin | HSPPI |
| | | | diabetes (e.g., diabetic retinopathy, diabetic nephropathy, kidney | | | gb\|AF205952\| |
| | | | disease (e.g., renal failure, nephropathy and/or other diseases and | | | AF205952 |
| | | | disorders as described in the “Renal Disorders” section below), | | | |
| | | | diabetic neuropathy, nerve disease and nerve damage (e.g., due | | | |
| | | | to diabetic neuropathy), blood vessel blockage, heart disease, | | | |
| | | | stroke, impotence (e.g., due to diabetic neuropathy or blood | | | |
| | | | vessel blockage), seizures, mental confusion, drowsiness, | | | |
| | | | nonketotic hyperglycemic-hyperosmolar coma, cardiovascular | | | |
| | | | disease (e.g., heart disease, atherosclerosis, microvascular | | | |
| | | | disease, hypertension, stroke, and other diseases and disorders as | | | |
| | | | described in the “Cardiovascular Disorders” section below), | | | |
| | | | dyslipidemia, endocrine disorders (as described in the | | | |
| | | | “Endocrine Disorders” section below), neuropathy, vision | | | |
| | | | impairment (e.g., diabetic retinopathy and blindness), ulcers and | | | |
| | | | impaired wound healing, and infection (e.g., infectious diseases | | | |
| | | | and disorders as described in the “Infectious Diseases” section | | | |
| | | | below, especially of the urinary tract and skin). Highly preferred | | | |
| | | | indications also include obesity, weight gain, and weight loss, as | | | |
| | | | well as complications associated with obesity, weight gain, and | | | |
| | | | weight loss. Preferred embodiments of the invention include | | | |
| | | | methods of preventing, detecting, diagnosing, treating and/or | | | |
| | | | ameliorating the above mentioned conditions, disorders, and | | | |
| | | | diseases. (The Jurkat cell line is a human T lymphocyte cell line | | | |
| | | | available through the ATCC as cell line number TIB-152). | | | |
| 599 | HLDOU18 | Diabetes | A highly preferred indication is diabetes. Additional highly | Liver | ADD/ | gb\|AP001747\| |
| | | | preferred indications include complications associated with | | SREBP | AP001747 |
| | | | diabetes (e.g., diabetic retinopathy, diabetic nephropathy, kidney | | CAP | gb\|AF136380\| |
| | | | disease (e.g., renal failure, nephropathy and/or other diseases and | | Glucose6 | AF136380 |
| | | | disorders as described in the “Renal Disorders” section below), | | phospha- | gb\|U91844\| |
| | | | diabetic neuropathy, nerve disease and nerve damage (e.g., due | | tase | CFU91844 |
| | | | to diabetic neuropathy), blood vessel blockage, heart disease, | | GLUT2 | gb\|L09683\| |
| | | | stroke, impotence (e.g., due to diabetic neuropathy or blood | | GLUT4 | UMGLUT2S10 |
| | | | vessel blockage), seizures, mental confusion, drowsiness, | | Hexoki- | gb\|M20747\| |
| | | | nonketotic hyperglycemic-hyperosmolar coma, cardiovascular | | nase II | HUMIRGT |
| | | | disease (e.g., heart disease, atherosclerosis, microvascular | | IRS1 | gb\|Z46354\| |
| | | | disease, hypertension, stroke, and other diseases and disorders as | | PEPCK1 | HSHKEX1 |
| | | | described in the “Cardiovascular Disorders” section below), | | PPARg | gb\|L05144\| |
| | | | dyslipidemia, endocrine disorders (as described in the | | Pyruvate | HUMPHOCAR |
| | | | “Endocrine Disorders” section below), neuropathy, vision | | Kinase L | gb\|X90563\| |
| | | | impairment (e.g., diabetic retinopathy and blindness), ulcers and | | UNCP2 | HSPPARGAM |
| | | | impaired wound healing, and infection (e.g., infectious diseases | | | gb\|D13243\| |
| | | | and disorders as described in the “Infectious Diseases” section | | | AB01598S12 |
| | | | below, especially of the urinary tract and skin). Highly preferred | | | gb\|AK025742\| |
| | | | indications also include obesity, weight gain, and weight loss, as | | | AK025742 |
| | | | well as complications associated-with obesity, weight gain, and | | | |
| | | | weight loss. Preferred embodiments of the invention include | | | |
| | | | methods of preventing, detecting, diagnosing, treating and/or | | | |
| | | | ameliorating the above mentioned conditions, disorders, and | | | |
| | | | diseases. | | | |
| 599 | HLDOU18 | Immune | Highly preferred indications include immunological disorders | AOSMC | CCR7 | gb\|X84702\| |
| | | | such as described herein under the heading “Immune Activity” | | CIS3 | HSDNABLR2 |
| | | | and/or “Blood-Related Disorders” (particularly including, but not | | | gb\|AB006967\| |
| | | | limited to, immune disorders involving muscle tissues and the | | | AB006967 |
| | | | cardiovascular system (e.g. heart, lungs, circulatory system)). | | | |
| | | | Highly preferred embodiments of the invention include methods | | | |
| | | | of preventing, detecting, diagnosing, treating and/or ameliorating | | | |
| | | | disorders of the immune system (particularly including, but not | | | |
| | | | limited to, immune disorders involving muscle tissue or the | | | |
| | | | cardiovascular system). (AOSMC cells are human aortic smooth | | | |
| | | | muscle cells). | | | |
| 599 | HLDOU18 | Immune | Highly preferred indications include immunological disorders | Caco-2 | CCR7 | gb\|X84702\| |
| | | | such as described herein under the heading “Immune Activity” | | CIS3 | HSDNABLR2 |
| | | | and/or “Blood-Related Disorders” (particularly including, but not | | | gb\|AB006967\| |
| | | | limited to, immune disorders involving the cells of the | | | AB006967 |
| | | | gastrointestinal tract). Highly preferred embodiments of the | | | |
| | | | invention include methods of preventing, detecting, diagnosing, | | | |
| | | | treating and/or ameliorating disorders of the immune system | | | |
| | | | (particularly including, but not limited to, immune disorders | | | |
| | | | involving cells of the gastrointestinal tract). (The Caco-2 cell line | | | |
| | | | is a human colorectal adenocarcinoma cell line available through | | | |
| | | | the ATCC as cell line number HTB-37). | | | |
| 599 | HLDOU18 | Immune | Highly preferred indications include immunological disorders | Daudi | CD69 | gb\|Z22576\| |
| | | | such as described herein under the heading “Immune Activity” | | GATA3 | HSCD69GNA |
| | | | and/or “Blood-Related Disorders” (particularly including, but not | | Rag1 | gb\|X55037\| |
| | | | limited to, immune disorders involving the B-cells). Highly | | Rantes | HSGATA3 |
| | | | preferred embodiments of the invention include methods of | | VCAM | gb\|M29474\| |
| | | | preventing, detecting, diagnosing, treating and/or ameliorating | | | HUMRAG1 |
| | | | disorders of the immune system (particularly including, but not | | | gb\|AF043341\| |
| | | | limited to, immune disorders involving B-cells). (The Daudi cell | | | AF043341 |
| | | | line is a human B lymphoblast cell line available through the | | | gb\|A30922\| |
| | | | ATCC as cell line number CCL-213). | | | A30922 |
| 599 | HLDOU18 | Immune | Highly preferred indications include immunological disorders | HUVEC | GATA3 | gb\|X55037\| |
| | | | such as described herein under the heading “Immune Activity” | | Rag1 | HSGATA3 |
| | | | and/or “Blood-Related Disorders” (particularly including, but not | | TNF | gb\|M29474\| |
| | | | limited to, immune disorders involving endothelial cells). Highly | | | HUMRAG1 |
| | | | preferred embodiments of the invention include methods of | | | gb\|AJ270944\| |
| | | | preventing, detecting, diagnosing, treating and/or ameliorating | | | HSA27094 |
| | | | disorders of the immune system (particularly including, but not | | | |
| | | | limited to, immune disorders involving endothelial cells). | | | |
| | | | (HUVEC cells are human umbilical vein endothelial cells). | | | |
| 599 | HLDOU18 | Immune | Highly preferred indications include immunological disorders | Jurkat | c-maf | gb\|AF055377\| |
| | | | such as described herein under the heading “Immune Activity” | | CCR5 | AF055377 |
| | | | and/or “Blood-Related Disorders” (particularly including, but not | | CCR7 | gb\|AF161918\| |
| | | | limited to, immune disorders involving T-cells). Highly | | CD69 | AF161918 |
| | | | preferred embodiments of the invention include methods of | | CXCR3 | gb\|X84702\| |
| | | | preventing, detecting, diagnosing, treating and/or ameliorating | | Rag1 | HSDNABLR2 |
| | | | disorders of the immune system (particularly including, but not | | Rag2 | gb\|Z22576\| |
| | | | limited to, immune disorders involving T-cells). (The Jurkat cell | | | HSCD69GNA |
| | | | line is a human T lymphocyte cell line available through the | | | gb\|Z79783\| |
| | | | ATCC as cell line number TIB-152). | | | HSCKRL2 |
| | | | | | | gb\|M29474\| |
| | | | | | | HUMRAG1 |
| | | | | | | gb\|AY011962\| |
| | | | | | | AY011962 |
| 599 | HLDOU18 | Immune | Highly preferred indications include immunological disorders | Liver | ICAM | gb\|X06990\| |
| | | | such as described herein under the heading “Immune Activity” | | | HSICAM1 |
| | | | and/or “Blood-Related Disorders” (particularly including, but not | | | |
| | | | limited to, immune disorders involving cells of the hepatic | | | |
| | | | system). Highly preferred embodiments of the invention include | | | |
| | | | methods of preventing, detecting, diagnosing, treating and/or | | | |
| | | | ameliorating disorders of the immune system (particularly | | | |
| | | | including, but not limited to, immune disorders involving cells of | | | |
| | | | the hepatic system). | | | |
| 599 | HLDOU18 | Immune | Highly preferred indications include immunological disorders | U937 | CD28 | gb\|AF222342\| |
| | | | such as described herein under the heading “Immune Activity” | | IL1B | AF222342 |
| | | | and/or “Blood-Related Disorders” (particularly including, but not | | Rag1 | gb\|X02532\| |
| | | | limited to, immune disorders involving monocytes). Highly | | Rag2 | HSIL1BR |
| | | | preferred embodiments of the invention include methods of | | VCAM | gb\|M29474\| |
| | | | preventing, detecting, diagnosing, treating and/or ameliorating | | | HUMRAG1 |
| | | | disorders of the immune system (particularly including, but not | | | gb\|AY011962\| |
| | | | limited to, immune disorders involving monocytes). (The U937 | | | AY011962 |
| | | | cell line is a human monocyte cell line available through the | | | gb\|A30922\| |
| | | | ATCC as cell line number CRL-1593.2). | | | A30922 |
| 629 | HLQDH74 | Immune | Highly preferred indications include immunological disorders | Th1- | GATA1 | gb\|X17254\| |
| | | | such as described herein under the heading “Immune Activity” | Aug. 02, 2000 | | HSERYF1 |
| | | | and/or “Blood-Related Disorders” (particularly including, but not | | | |
| | | | limited to, immune disorders involving T-cells). Highly | | | |
| | | | preferred embodiments of the invention include methods of | | | |
| | | | preventing, detecting, diagnosing, treating and/or ameliorating | | | |
| | | | disorders of the immune system (particularly including, but not | | | |
| | | | limited to, immune disorders involving T-cells). (Th1 cells are T- | | | |
| | | | cells). | | | |
| 632 | HLTBT71 | Angiogenesis | Highly preferred indications include diagnosis, prevention, | Daudi | Vegf1 | gb\|AF024710\| |
| | | | treatment, and/or amelioration of diseases and disorders | | | AF024710 |
| | | | involving angiogenesis, wound healing, neoplasia (particularly | | | |
| | | | including, but not limited to, tumor metastases), and | | | |
| | | | cardiovascular diseases and disorders; as described herein under | | | |
| | | | the headings “Hyperproliferative Disorders,” “Regeneration,” | | | |
| | | | “Anti-Angiogenesis Activity,” “Diseases at the Cellular Level,” | | | |
| | | | and “Wound Healing and Epithelial Cell Proliferation.”(The | | | |
| | | | Daudi cell line is a human B lymphoblast cell line available | | | |
| | | | through the ATCC as cell line number CCL-213). | | | |
| 632 | HLTBT71 | Angiogenesis | Highly preferred indications include diagnosis, prevention, | HEK293 | Flt1 | gb\|AF063657\| |
| | | | treatment, and/or amelioration of diseases and disorders | | | AF063657 |
| | | | involving angiogenesis, wound healing, neoplasia (particularly | | | |
| | | | including, but not limited to, tumor metastases), and | | | |
| | | | cardiovascular diseases and disorders; as described herein under | | | |
| | | | the headings “Hyperproliferative Disorders,” “Regeneration,” | | | |
| | | | “Anti-Angiogenesis Activity,” “Diseases at the Cellular Level,” | | | |
| | | | and “Wound Healing and Epithelial Cell Proliferation.”(The | | | |
| | | | HEK293 cell line is a human embryonal kidney epithelial cell | | | |
| | | | line available through the ATCC as cell line number CRL-1573). | | | |
| 632 | HLTBT71 | Angiogenesis | Highly preferred indications include diagnosis, prevention, | Jurkat | ICAM | gb\|X06990\| |
| | | | treatment, and/or amelioration of diseases and disorders | | Vegf1 | HSICAM1 |
| | | | involving angiogenesis, wound healing, neoplasia (particularly | | | gb\|AF024710\| |
| | | | including, but not limited to, tumor metastases), and | | | AF024710 |
| | | | cardiovascular diseases and disorders; as described herein under | | | |
| | | | the headings “Hyperproliferative Disorders,” “Regeneration,” | | | |
| | | | “Anti-Angiogenesis Activity,” “Diseases at the Cellular Level,” | | | |
| | | | and “Wound Healing and Epithelial Cell Proliferation.”(The | | | |
| | | | Jurkat cell line is a human T lymphocyte cell line available | | | |
| | | | through the ATCC as cell line number TIB-152). | | | |
| 632 | HLTBT71 | Angiogenesis | Highly preferred indications include diagnosis, prevention, | NHDF | Cycloox | gb\|AF063657\| |
| | | | treatment, and/or amelioration of diseases and disorders | | Flt1 | AF063657 |
| | | | involving angiogenesis, wound healing, neoplasia (particularly | | | |
| | | | including, but not limited to, tumor metastases), and | | | |
| | | | cardiovascular diseases and disorders; as described herein under | | | |
| | | | the headings “Hyperproliferative Disorders,” “Regeneration,” | | | |
| | | | “Anti-Angiogenesis Activity,” “Diseases at the Cellular Level,” | | | |
| | | | and “Wound Healing and Epithelial Cell Proliferation.”(NHDF | | | |
| | | | cells are normal human dermal fibroblasts). | | | |
| 632 | HLTBT71 | Cancer | Highly preferred indications include neoplastic diseases (e.g. | Daudi | Bax | gb\|AF250190\| |
| | | | cancer) such as described herein under the heading | | DHFR | AF250190 |
| | | | “Hyperproliferative Disordersî (particularly including, but not | | | gb\|V00507\| |
| | | | limited to, cancers of immune cells, such as B-cells). Highly | | | HSDHFR |
| | | | preferred embodiments of the invention include methods of | | | |
| | | | preventing, detecting, diagnosing, treating and/or ameliorating | | | |
| | | | cancer and hyperproliferative disorders involving immune cells | | | |
| | | | (such as B-cells). (The Daudi cell line is a human B lymphoblast | | | |
| | | | cell line available through the ATCC as cell line number CCL- | | | |
| | | | 213). | | | |
| 632 | HLTBT71 | Cancer | Highly preferred indications include neoplastic diseases (e.g. | U937 | p21 | gb\|BC000275\| |
| | | | cancer) such as described herein under the heading | | U66469 | BC000275 |
| | | | “Hyperproliferative Disordersî (particularly including, but not | | p53 | |
| | | | limited to, cancers of immune cells, such as monocytes). Highly | | regulated | |
| | | | preferred embodiments of the invention include methods of | | gene | |
| | | | preventing, detecting, diagnosing, treating and/or ameliorating | | | |
| | | | cancer and hyperproliferative disorders involving cells of the | | | |
| | | | immune system (such as monocytes). (The U-937 cell line is a | | | |
| | | | human monocyte cell line available through the ATCC as cell | | | |
| | | | line number CRL-1593.2) | | | |
| 632 | HLTBT71 | Immune | Highly preferred indications include immunological disorders | AOSMC | GATA1 | gb\|X17254\| |
| | | | such as described herein under the heading “Immune Activity” | | | HSERYF1 |
| | | | and/or “Blood-Related Disorders” (particularly including, but not | | | |
| | | | limited to, immune disorders involving muscle tissues and the | | | |
| | | | cardiovascular system (e.g. heart, lungs, circulatory system)). | | | |
| | | | Highly preferred embodiments of the invention include methods | | | |
| | | | of preventing, detecting, diagnosing, treating and/or ameliorating | | | |
| | | | disorders of the immune system (particularly including, but not | | | |
| | | | limited to, immune disorders involving muscle tissue or the | | | |
| | | | cardiovascular system). (AOSMC cells are human aortic smooth | | | |
| | | | muscle cells). | | | |
| 632 | HLTBT71 | Immune | Highly preferred indications include immunological disorders | Caco-2 | GATA1 | gb\|X17254\| |
| | | | such as described herein under the heading “Immune Activity” | | | HSERYF1 |
| | | | and/or “Blood-Related Disorders” (particularly including, but not | | | |
| | | | limited to, immune disorders involving the cells of the | | | |
| | | | gastrointestinal tract). Highly preferred embodiments of the | | | |
| | | | invention include methods of preventing, detecting, diagnosing, | | | |
| | | | treating and/or ameliorating disorders of the immune system | | | |
| | | | (particularly including, but not limited to, immune disorders | | | |
| | | | involving cells of the gastrointestinal tract). (The Caco-2 cell line | | | |
| | | | is a human colorectal adenocarcinoma cell line available through | | | |
| | | | the ATCC as cell line number HTB-37). | | | |
| 632 | HLTBT71 | Immune | Highly preferred indications include immunological disorders | Daudi | GATA1 | gb\|X17254\| |
| | | | such as described herein under the heading “Immune Activity” | | TNF | HSERYF1 |
| | | | and/or “Blood-Related Disorders” (particularly including, but not | | | gb\|AJ270944\| |
| | | | limited to, immune disorders involving the B-cells). Highly | | | HSA27094 |
| | | | preferred embodiments of the invention include methods of | | | |
| | | | preventing, detecting, diagnosing, treating and/or ameliorating | | | |
| | | | disorders of the immune system (particularly including, but not | | | |
| | | | limited to, immune disorders involving B-cells). (The Daudi cell | | | |
| | | | line is a human B lymphoblast cell line available through the | | | |
| | | | ATCC as cell line number CCL-213). | | | |
| 632 | HLTBT71 | Immune | Highly preferred indications include immunological disorders | HEK293 | CCR4 | gb\|AB023888\| |
| | | | such as described herein under the heading “Immune Activity” | | | AB023888 |
| | | | and/or “Blood-Related Disorders” (particularly including, but not | | | |
| | | | limited to, immune disorders involving epithelial cells or the | | | |
| | | | renal system). Highly preferred embodiments of the invention | | | |
| | | | include methods of preventing, detecting, diagnosing, treating | | | |
| | | | and/or ameliorating disorders of the immune system (particularly | | | |
| | | | including, but not limited to, immune disorders involving | | | |
| | | | epithelial cells or the renal system). (The 293 cell line is a human | | | |
| | | | embryonal kidney epithelial cell line available through the ATCC | | | |
| | | | as cell line number CRL-1573). | | | |
| 632 | HLTBT71 | Immune | Highly preferred indications include immunological disorders | HUVEC | GATA1 | gb\|X17254\| |
| | | | such as described herein under the heading “Immune Activity” | | | HSERYF1 |
| | | | and/or “Blood-Related Disorders” (particularly including, but not | | | |
| | | | limited to, immune disorders involving endothelial cells). Highly | | | |
| | | | preferred embodiments of the invention include methods of | | | |
| | | | preventing, detecting, diagnosing, treating and/or ameliorating | | | |
| | | | disorders of the immune system (particularly including, but not | | | |
| | | | limited to, immune disorders involving endothelial cells). | | | |
| | | | (HUVEC cells are human umbilical vein endothelial cells). | | | |
| 632 | HLTBT71 | Immune | Highly preferred indications include immunological disorders | Jurkat | ICAM | gb\|X06990\| |
| | | | such as described herein under the heading “Immune Activity” | | TNF | HSICAM1 |
| | | | and/or “Blood-Related Disorders” (particularly including, but not | | | gb\|AJ270944\| |
| | | | limited to, immune disorders involving T-cells). Highly | | | HSA27094 |
| | | | preferred embodiments of the invention include methods of | | | |
| | | | preventing, detecting, diagnosing, treating and/or ameliorating | | | |
| | | | disorders of the immune system (particularly including, but not | | | |
| | | | limited to, immune disorders involving T-cells). (The Jurkat cell | | | |
| | | | line is a human T lymphocyte cell line available through the | | | |
| | | | ATCC as cell line, number TIB-152). | | | |
| 632 | HLTBT71 | Immune | Highly preferred indications include immunological disorders | TF-1 | Rantes | gb\|AF043341\| |
| | | | such as described herein under the heading “Immune Activity” | | | AF043341 |
| | | | and/or “Blood-Related Disorders” (particularly including, but not | | | |
| | | | limited to, immune disorders involving erythrocytes). Highly | | | |
| | | | preferred embodiments of the invention include methods of | | | |
| | | | preventing, detecting, diagnosing, treating and/or ameliorating | | | |
| | | | disorders of the immune system (particularly including, but not | | | |
| | | | limited to, immune disorders involving erythrocytes). (The TF-1 | | | |
| | | | cell line is a human erythroblast cell line available through the | | | |
| | | | ATCC as cell line number CRL-2003). | | | |
| 632 | HLTBT71 | Immune | Highly preferred indications include immunological disorders | U937 | GATA1 | gb\|X17254\| |
| | | | such as described herein under the heading “Immune Activity” | | IL1B | HSERYF1 |
| | | | and/or “Blood-Related Disorders” (particularly including, but not | | IL5 | gb\|X02532\| |
| | | | limited to, immune disorders involving monocytes). Highly | | | HSIL1BR |
| | | | preferred embodiments of the invention include methods of | | | gb\|X12705\| |
| | | | preventing, detecting, diagnosing, treating and/or ameliorating | | | HSBCDFIA |
| | | | disorders of the immune system (particularly including, but not | | | |
| | | | limited to, immune disorders involving monocytes). (The U937 | | | |
| | | | cell line is a human monocyte cell line available through the | | | |
| | | | ATCC as cell line number CRL-1593.2). | | | |
| 702 | HMSIB42 | Angiogenesis | Highly preferred indications include diagnosis, prevention, | Caco-2 | Flt1 | gb\|AF063657\| |
| | | | treatment, and/or amelioration of diseases and disorders | | | AF0636577\| |
| | | | involving angiogenesis, wound healing, neoplasia (particularly | | | AF063657 |
| | | | including, but not limited to, tumor metastases), and | | | |
| | | | cardiovascular diseases and disorders; as described herein under | | | |
| | | | the headings “Hyperproliferative Disorders,” “Regeneration,” | | | |
| | | | “Anti-Angiogenesis Activity,” “Diseases at the Cellular Level,” | | | |
| | | | and “Wound Healing and Epithelial Cell Proliferation.”(The | | | |
| | | | Caco-2 cell line is a human colorectal adenocarcinoma cell line | | | |
| | | | available through the ATCC as cell line number HTB-37). | | | |
| 702 | HMSIB42 | Angiogenesis | Highly preferred indications include diagnosis, prevention, | HEK293 | Cycloox | gb\|AF063657\| |
| | | | treatment, and/or amelioration of diseases and disorders | | Flt1 | AF063657 |
| | | | involving angiogenesis, wound healing, neoplasia (particularly | | Vegf1 | gb\|AF024710\| |
| | | | including, but not limited to, tumor metastases), and | | | AF024710 |
| | | | cardiovascular diseases and disorders; as described herein under | | | |
| | | | the headings “Hyperproliferative Disorders,” “Regeneration,” | | | |
| | | | “Anti-Angiogenesis Activity,” “Diseases at the Cellular Level,” | | | |
| | | | and “Wound Healing and Epithelial Cell Proliferation.”(The | | | |
| | | | HEK293 cell line is a human embryonal kidney epithelial cell | | | |
| | | | line available through the ATCC as cell line number CRL-1573). | | | |
| 702 | HMSIB42 | Angiogenesis | Highly preferred indications include diagnosis, prevention, | HUVEC | ICAM | gb\|X06990\| |
| | | | treatment, and/or amelioration of diseases and disorders | | VCAM | HSICAM1 |
| | | | involving angiogenesis, wound healing, neoplasia (particularly | | | gb\|A30922\| |
| | | | including, but not limited to, tumor metastases), and | | | A30922 |
| | | | cardiovascular diseases and disorders; as described herein under | | | |
| | | | the headings “Hyperproliferative Disorders,” “Regeneration,” | | | |
| | | | “Anti-Angiogenesis Activity,” “Diseases at the Cellular Level,” | | | |
| | | | and “Wound Healing and Epithelial Cell Proliferation.”(HUVEC | | | |
| | | | cells are human umbilical vein endothelial cells). | | | |
| 702 | HMSIB42 | Cancer | Highly preferred indications include neoplastic diseases (e.g. | AOSMC | c-jun | gb\|BC006175\| |
| | | | cancer) such as described herein under the heading | | Egr1 | BC006175 |
| | | | “Hyperproliferative Disordersî (particularly including, but not | | | |
| | | | limited to, cancers of muscle tissues and the cardiovascular | | | |
| | | | system (e.g. heart, lungs, circulatory system)). Highly preferred | | | |
| | | | embodiments of the invention include methods of preventing, | | | |
| | | | detecting, diagnosing, treating and/or ameliorating cancer and | | | |
| | | | hyperproliferative disorders. (AOSMC cells are aortic smooth | | | |
| | | | muscle cells). | | | |
| 702 | HMSIB42 | Cancer | Highly preferred indications include neoplastic diseases (e.g. | Daudi | Egr1 | |
| | | | cancer) such as described herein under the heading | | | |
| | | | “Hyperproliferative Disordersî (particularly including, but not | | | |
| | | | limited to, cancers of immune cells, such as B-cells). Highly | | | |
| | | | preferred embodiments of the invention include methods of | | | |
| | | | preventing, detecting, diagnosing, treating and/or ameliorating | | | |
| | | | cancer and hyperproliferative disorders involving immune cells | | | |
| | | | (such as B-cells). (The Daudi cell line is a human B lymphoblast | | | |
| | | | cell line available through the ATCC as cell line number CCL- | | | |
| | | | 213). | | | |
| 702 | HMSIB42 | Cancer | Highly preferred indications include neoplastic diseases (e.g. | HUVEC | p21 | gb\|BC000275\| |
| | | | cancer) such as described herein under the heading | | | BC000275 |
| | | | “Hyperproliferative Disordersî (particularly including, but not | | | |
| | | | limited to, cancers involving endothelial cells). Highly preferred | | | |
| | | | embodiments of the invention include methods of preventing, | | | |
| | | | detecting, diagnosing, treating and/or ameliorating cancer and | | | |
| | | | hyperproliferative disorders involving endothelial cells. | | | |
| | | | (HUVEC cells are human umbilical vein endothelial cells). | | | |
| 702 | HMSIB42 | Cancer | Highly preferred indications include neoplastic diseases (e.g. | Jurkat | Egr1 | |
| | | | cancer) such as described herein under the heading | | | |
| | | | “Hyperproliferative Disordersî (particularly including, but not | | | |
| | | | limited to, cancers of immune cells, such as T-cells). Highly | | | |
| | | | preferred embodiments of the invention include methods of | | | |
| | | | preventing, detecting, diagnosing, treating and/or ameliorating | | | |
| | | | cancer and hyperproliferative disorders involving immune cells | | | |
| | | | (such as T-cells). (The Jurkat cell line is a human T lymphocyte | | | |
| | | | cell line available through the ATCC as cell line number TIB- | | | |
| | | | 152). | | | |
| 702 | HMSIB42 | Cancer | Highly preferred indications include neoplastic diseases (e.g. | SK-N-MC | bcl-2 | gb\|X06487\| |
| | | | cancer) such as described herein under the heading | neuroblastoma | | HSBCL2IG |
| | | | “Hyperproliferative Disordersî (particularly including, but not | | | |
| | | | limited to cancers involving cells of the brain/central nervous | | | |
| | | | system (e.g. neural epithelium)). Highly preferred embodiments | | | |
| | | | of the invention include methods of preventing, detecting, | | | |
| | | | diagnosing, treating and/or ameliorating cancer and | | | |
| | | | hyperproliferative disorders involving the brain or central | | | |
| | | | nervous system. (The SK-N-MC neuroblastoma cell line is a cell | | | |
| | | | line derived from human brain tissue available through the | | | |
| | | | ATCC as cell line number HTB-10). | | | |
| 702 | HMSIB42 | Cancer | Highly preferred indications include neoplastic diseases (e.g. | U937 | p21 | gb\|BC000275\| |
| | | | cancer) such as described herein under the heading | | | BC000275 |
| | | | “Hyperproliferative Disordersî (particularly including, but not | | | |
| | | | limited to, cancers of immune cells, such as monocytes). Highly | | | |
| | | | preferred embodiments of the invention include methods of | | | |
| | | | preventing, detecting, diagnosing, treating and/or ameliorating | | | |
| | | | cancer and hyperproliferative disorders involving cells of the | | | |
| | | | immune system (such as monocytes). (The U-937 cell line is a | | | |
| | | | human monocyte cell line available through the ATCC as cell | | | |
| | | | line number CRL-1593.2) | | | |
| 702 | HMSIB42 | Diabetes | A highly preferred indication is diabetes. Additional highly | AOSMC | GAPDH | |
| | | | preferred indications include complications associated with | | | |
| | | | diabetes (e.g., diabetic retinopathy, diabetic nephropathy, kidney | | | |
| | | | disease (e.g., renal failure, nephropathy and/or other diseases and | | | |
| | | | disorders as described in the “Renal Disorders” section below), | | | |
| | | | diabetic neuropathy, nerve disease and nerve damage (e.g., due | | | |
| | | | to diabetic neuropathy), blood vessel blockage, heart disease, | | | |
| | | | stroke, impotence (e.g., due to diabetic neuropathy or blood | | | |
| | | | vessel blockage), seizures, mental confusion, drowsiness, | | | |
| | | | nonketotic hyperglycemic-hyperosmolar coma, cardiovascular | | | |
| | | | disease (e.g., heart disease, atherosclerosis, microvascular | | | |
| | | | disease, hypertension, stroke, and other diseases and disorders as | | | |
| | | | described in the “Cardiovascular Disorders” section below), | | | |
| | | | dyslipidemia, endocrine disorders (as described in the | | | |
| | | | “Endocrine Disorders” section below), neuropathy, vision | | | |
| | | | impairment (e.g., diabetic retinopathy and blindness), ulcers and | | | |
| | | | impaired wound healing, and infection (e.g., infectious diseases | | | |
| | | | and disorders as described in the “Infectious Diseases” section | | | |
| | | | below, especially of the urinary tract and skin). Highly preferred | | | |
| | | | indications also include obesity, weight gain, and weight loss, as | | | |
| | | | well as complications associated with obesity, weight gain, and | | | |
| | | | weight loss. Preferred embodiments of the invention include | | | |
| | | | methods of preventing, detecting, diagnosing, treating and/or | | | |
| | | | ameliorating the above mentioned conditions, disorders, and | | | |
| | | | diseases. (AOSMC cells are human aortic smooth muscle cells). | | | |
| 702 | HMSIB42 | Immune | Highly preferred indications include immunological disorders | AOSMC | CIS3 | gb\|AB006967\| |
| | | | such as described herein under the heading “Immune Activity” | | IL1B | AB006967 |
| | | | and/or “Blood-Related Disorders” (particularly including, but not | | | gb\|X02532\| |
| | | | limited to, immune disorders involving muscle tissues and the | | | HSIL1BR |
| | | | cardiovascular system (e.g. heart, lungs, circulatory system)). | | | |
| | | | Highly preferred embodiments of the invention include methods | | | |
| | | | of preventing, detecting, diagnosing, treating and/or ameliorating | | | |
| | | | disorders of the immune system (particularly including, but not | | | |
| | | | limited to, immune disorders involving muscle tissue or the | | | |
| | | | cardiovascular system). (AOSMC cells are human aortic smooth | | | |
| | | | muscle cells). | | | |
| 702 | HMSIB42 | Immune | Highly preferred indications include immunological disorders | Daudi | CD69 | gb\|Z22576\| |
| | | | such as described herein under the heading “Immune Activity” | | VLA4 | HSCD69GNA |
| | | | and/or “Blood-Related Disorders” (particularly including, but not | | | gb\|X16983\| |
| | | | limited to, immune disorders involving the B-cells). Highly | | | HSINTAL4 |
| | | | preferred embodiments of the invention include methods of | | | |
| | | | preventing, detecting, diagnosing, treating and/or ameliorating | | | |
| | | | disorders of the immune system (particularly including, but not | | | |
| | | | limited to, immune disorders involving B-cells). (The Daudi cell | | | |
| | | | line is a human B lymphoblast cell line available through the | | | |
| | | | ATCC as cell line number CCL-213). | | | |
| 702 | HMSIB42 | Immune | Highly preferred indications include immunological disorders | HEK293 | c-maf | gb\|AF055377\| |
| | | | such as described herein under the heading “Immune Activity” | | CCR4 | AF055377 |
| | | | and/or “Blood-Related Disorders” (particularly including, but not | | CIS3 | gb\|AB023888\| |
| | | | limited to, immune disorders involving epithelial cells or the | | GATA3 | AB023888 |
| | | | renal system). Highly preferred embodiments of the invention | | HLA-c | gb\|AB006967\| |
| | | | include methods of preventing, detecting, diagnosing, treating | | LTBR | AB006967 |
| | | | and/or ameliorating disorders of the immune system (particularly | | TNF | gb\|X55037\| |
| | | | including, but not limited to, immune disorders involving | | | HSGATA3 |
| | | | epithelial cells or the renal system). (The 293 cell line is a human | | | gb\|AK027080\| |
| | | | embryonal kidney epithelial cell line available through the ATCC | | | AK027080 |
| | | | as cell line number CRL-1573). | | | gb\|AJ270944\| |
| | | | | | | HSA27094 |
| 702 | HMSIB42 | Immune | Highly preferred indications include immunological disorders | HUVEC | CD40 | gb\|AJ300189\| |
| | | | such as described herein under the heading “Immune Activity” | | ICAM | HSA30018 |
| | | | and/or “Blood-Related Disorders” (particularly including, but not | | Rag1 | gb\|X06990\| |
| | | | limited to, immune disorders involving endothelial cells). Highly | | TNF | HSICAM1 |
| | | | preferred embodiments of the invention include methods of | | VCAM | gb\|M29474\| |
| | | | preventing, detecting, diagnosing, treating and/or ameliorating | | | HUMRAG1 |
| | | | disorders of the immune system (particularly including, but not | | | gb\|AJ270944\| |
| | | | limited to, immune disorders involving endothelial cells). | | | HSA27094 |
| | | | (HUVEC cells are human umbilical vein endothelial cells). | | | gb\|A30922\| |
| | | | | | | A30922 |
| 702 | HMSIB42 | Immune | Highly preferred indications include immunological disorders | Jurkat | TNF | gb\|AJ270944\| |
| | | | such as described herein under the heading “Immune Activity” | | | HSA27094 |
| | | | and/or “Blood-Related Disorders” (particularly including, but not | | | |
| | | | limited to, immune disorders involving T-cells). Highly | | | |
| | | | preferred embodiments of the invention include methods of | | | |
| | | | preventing, detecting, diagnosing, treating and/or ameliorating | | | |
| | | | disorders of the immune system (particularly including, but not | | | |
| | | | limited to, immune disorders involving T-cells). (The Jurkat cell | | | |
| | | | line is a human T lymphocyte cell line available through the | | | |
| | | | ATCC as cell line number TIB-152). | | | |
| 702 | HMSIB42 | Immune | Highly preferred indications include immunological disorders | Liver | TNF | gb\|AJ270944\| |
| | | | such as described herein under the heading “Immune Activity” | | | HSA27094 |
| | | | and/or “Blood-Related Disorders” (particularly including, but not | | | |
| | | | limited to, immune disorders involving cells of the hepatic | | | |
| | | | system). Highly preferred embodiments of the invention include | | | |
| | | | methods of preventing, detecting, diagnosing, treating and/or | | | |
| | | | ameliorating disorders of the immune system (particularly | | | |
| | | | including, but not limited to, immune disorders involving cells of | | | |
| | | | the hepatic system). | | | |
| 702 | HMSIB42 | Immune | Highly preferred indications include immunological disorders | NHDF | TNF | gb\|AJ270944\| |
| | | | such as described herein under the heading “Immune Activity” | | | HSA27094 |
| | | | and/or “Blood-Related Disorders” (particularly including, but not | | | |
| | | | limited to, immune disorders involving the skin). Highly | | | |
| | | | preferred embodiments of the invention include methods of | | | |
| | | | preventing, detecting, diagnosing, treating and/or ameliorating | | | |
| | | | disorders of the immune system (particularly including, but not | | | |
| | | | limited to, immune disorders involving the skin). (NHDF cells | | | |
| | | | are normal human dermal fibroblasts). | | | |
| 702 | HMSIB42 | Immune | Highly preferred indications include immunological disorders | SK-N-MC | TNF | gb\|AJ270944\| |
| | | | such as described herein under the heading “Immune Activity” | neuroblastoma | | HSA27094 |
| | | | and/or “Blood-Related Disorders” (particularly including, but not | | | |
| | | | limited to, immune disorders involving the central nervous | | | |
| | | | system). Highly preferred embodiments of the invention include | | | |
| | | | methods of preventing, detecting, diagnosing, treating and/or | | | |
| | | | ameliorating disorders of the immune system (particularly | | | |
| | | | including, but not limited to, immune disorders involving the | | | |
| | | | central nervous sytem). (The SK-N-MC neuroblastoma cell line | | | |
| | | | is a cell line derived from human brain tissue and is available | | | |
| | | | through the ATCC as cell line number HTB-10). | | | |
| 702 | HMSIB42 | Immune | Highly preferred indications include immunological disorders | U937 | TNF | gb\|AJ270944\| |
| | | | such as described herein under the heading “Immune Activity” | | | HSA27094 |
| | | | and/or “Blood-Related Disorders” (particularly including, but not | | | |
| | | | limited to, immune disorders involving monocytes). Highly | | | |
| | | | preferred embodiments of the invention include methods of | | | |
| | | | preventing, detecting, diagnosing, treating and/or ameliorating | | | |
| | | | disorders of the immune system (particularly including, but not | | | |
| | | | limited to, immune disorders involving monocytes). (The U937 | | | |
| | | | cell line is a human monocyte cell line available through the | | | |
| | | | ATCC as cell line number CRL-1593.2). | | | |
| 730 | HNFGV86 | Angiogenesis | Highly preferred indications include diagnosis, prevention, | Caco-2 | Vegf1 | gb\|AF024710\| |
| | | | treatment, and/or amelioration of diseases and disorders | | | AF024710 |
| | | | involving angiogenesis, wound healing, neoplasia (particularly | | | |
| | | | including, but not limited to, tumor metastases), and | | | |
| | | | cardiovascular diseases and disorders; as described herein under | | | |
| | | | the headings “Hyperproliferative Disorders,” “Regeneration,” | | | |
| | | | “Anti-Angiogenesis Activity,” “Diseases at the Cellular Level,” | | | |
| | | | and “Wound Healing and Epithelial Cell Proliferation.”(The | | | |
| | | | Caco-2 cell line is a human colorectal adenocarcinoma cell line | | | |
| | | | available through the ATCC as cell line number HTB-37). | | | |
| 730 | HNFGV86 | Angiogenesis | Highly preferred indications include diagnosis, prevention, | HUVEC | ICAM | gb\|X06990\| |
| | | | treatment, and/or amelioration of diseases and disorders | | | HSICAM1 |
| | | | involving angiogenesis, wound healing, neoplasia (particularly | | | |
| | | | including, but not limited to, tumor metastases), and | | | |
| | | | cardiovascular diseases and disorders; as described herein under | | | |
| | | | the headings “Hyperproliferative Disorders,” “Regeneration,” | | | |
| | | | “Anti-Angiogenesis Activity,” “Diseases at the Cellular Level,” | | | |
| | | | and “Wound Healing and Epithelial Cell Proliferation.”(HUVEC | | | |
| | | | cells are human umbilical vein endothelial cells). | | | |
| 730 | HNFGV86 | Angiogenesis | Highly preferred indications include diagnosis, prevention, | Jurkat | ICAM | gb\|X06990\| |
| | | | treatment, and/or amelioration of diseases and disorders | | VCAM | HSICAM1 |
| | | | involving angiogenesis, wound healing, neoplasia (particularly | | Vegf1 | gb\|A30922\| |
| | | | including, but not limited to, tumor metastases), and | | | A30922 |
| | | | cardiovascular diseases and disorders; as described herein under | | | gb\|AF024710\| |
| | | | the headings “Hyperproliferative Disorders,” “Regeneration,” | | | AF024710 |
| | | | “Anti-Angiogenesis Activity,” “Diseases at the Cellular Level,” | | | |
| | | | and “Wound Healing and Epithelial Cell Proliferation.”(The | | | |
| | | | Jurkat cell line is a human T lymphocyte cell line available | | | |
| | | | through the ATCC as cell line number TIB-152). | | | |
| 730 | HNFGV86 | Angiogenesis | Highly preferred indications include diagnosis, prevention, | Liver | ICAM | gb\|X06990\| |
| | | | treatment, and/or amelioration of diseases and disorders | | PAI | HSICAM1 |
| | | | involving angiogenesis, wound healing, neoplasia (particularly | | Vegf1 | gb\|X12701\| |
| | | | including, but not limited to, tumor metastases), and | | | HSENDPAI |
| | | | cardiovascular diseases and disorders; as described herein under | | | gb\|AF024710\| |
| | | | the headings “Hyperproliferative Disorders,” “Regeneration,” | | | AF024710 |
| | | | “Anti-Angiogenesis Activity,” “Diseases at the Cellular Level,” | | | |
| | | | and “Wound Healing and Epithelial Cell Proliferation.” | | | |
| 730 | HNFGV86 | Angiogenesis | Highly preferred indications include diagnosis, prevention, | NHDF | VCAM | gb\|A30922\| |
| | | | treatment, and/or amelioration of diseases and disorders | | | A30922 |
| | | | involving angiogenesis, wound healing, neoplasia (particularly | | | |
| | | | including, but not limited to, tumor metastases), and | | | |
| | | | cardiovascular diseases and disorders; as described herein under | | | |
| | | | the headings “Hyperproliferative Disorders,” “Regeneration,” | | | |
| | | | “Anti-Angiogenesis Activity,” “Diseases at the Cellular Level,” | | | |
| | | | and “Wound Healing and Epithelial Cell Proliferation.”(NHDF | | | |
| | | | cells are normal human dermal fibroblasts). | | | |
| 730 | HNFGV86 | Angiogenesis | Highly preferred indications include diagnosis, prevention, | U937 | ICAM | gb\|X06990\| |
| | | | treatment, and/or amelioration of diseases and disorders | | | HSICAM1 |
| | | | involving angiogenesis, wound healing, neoplasia (particularly | | | |
| | | | including, but not limited to, tumor metastases), and | | | |
| | | | cardiovascular diseases and disorders; as described herein under | | | |
| | | | the headings “Hyperproliferative Disorders,” “Regeneration,” | | | |
| | | | “Anti-Angiogenesis Activity,” “Diseases at the Cellular Level,” | | | |
| | | | and “Wound Healing and Epithelial Cell Proliferation.”(The | | | |
| | | | U937 cell line is a human monocyte cell line available through | | | |
| | | | the ATCC as cell line number CRL-1593.2). | | | |
| 730 | HNFGV86 | Cancer | Highly preferred indications include neoplastic diseases (e.g. | AOSMC | M1 RIBO | gb\|X59543\| |
| | | | cancer) such as described herein under the heading | | R | HSRIREM1 |
| | | | “Hyperproliferative Disordersî (particularly including, but not | | | |
| | | | limited to, cancers of muscle tissues and the cardiovascular | | | |
| | | | system (e.g. heart, lungs, circulatory system)). Highly preferred | | | |
| | | | embodiments of the invention include methods of preventing, | | | |
| | | | detecting, diagnosing, treating and/or ameliorating cancer and | | | |
| | | | hyperproliferative disorders. (AOSMC cells are aortic smooth | | | |
| | | | muscle cells). | | | |
| 730 | HNFGV86 | Cancer | Highly preferred indications include neoplastic diseases (e.g. | Caco-2 | Bax | gb\|AF250190\| |
| | | | cancer) such as described herein under the heading | | Cyclin D2 | AF250190 |
| | | | “Hyperproliferative Disordersî (particularly including, but not | | M1 RIBO | gb\|X68452\| |
| | | | limited to, cancer involving cells of the gastrointestinal tract). | | R | HSCYCD2 |
| | | | Highly preferred embodiments of the invention include methods | | | gb\|X59543\| |
| | | | of preventing, detecting, diagnosing, treating and/or ameliorating | | | HSRIREM1 |
| | | | cancer and hyperproliferative disorders involving the | | | |
| | | | gastrointestinal tract. (The Caco-2 cell line is a human colorectal | | | |
| | | | adenocarcinoma cell line available through the ATCC as cell line | | | |
| | | | number HTB-37). | | | |
| 730 | HNFGV86 | Cancer | Highly preferred indications include neoplastic diseases (e.g. | Daudi | U66469 | |
| | | | cancer) such as described herein under the heading | | p53 | |
| | | | “Hyperproliferative Disordersî (particularly including, but not | | regulated | |
| | | | limited to, cancers of immune cells, such as B-cells). Highly | | gene | |
| | | | preferred embodiments of the invention include methods of | | | |
| | | | preventing, detecting, diagnosing, treating and/or ameliorating | | | |
| | | | cancer and hyperproliferative disorders involving immune cells | | | |
| | | | (such as B-cells). (The Daudi cell line is a human B lymphoblast | | | |
| | | | cell line available through the ATCC as cell line number CCL- | | | |
| | | | 213). | | | |
| 730 | HNFGV86 | Cancer | Highly preferred indications include neoplastic diseases (e.g. | Jurkat | Cyclin D2 | gb\|X68452\| |
| | | | cancer) such as described herein under the heading | | | HSCYCD2 |
| | | | “Hyperproliferative Disordersî (particularly including, but not | | | |
| | | | limited to, cancers of immune cells, such as T-cells). Highly | | | |
| | | | preferred embodiments of the invention include methods of | | | |
| | | | preventing, detecting, diagnosing, treating and/or ameliorating | | | |
| | | | cancer and hyperproliferative disorders involving immune cells | | | |
| | | | (such as T-cells). (The Jurkat cell line is a human T lymphocyte | | | |
| | | | cell line available through the ATCC as cell line number TIB- | | | |
| | | | 152). | | | |
| 730 | HNFGV86 | Cancer | Highly preferred indications include neoplastic diseases (e.g. | Liver | Cyclin D2 | gb\|X68452\| |
| | | | cancer) such as described herein under the heading | | | HSCYCD2 |
| | | | “Hyperproliferative Disordersî (particularly including, but not | | | |
| | | | limited to, cancers involving cells of the hepatic system). Highly | | | |
| | | | preferred embodiments of the invention include methods of | | | |
| | | | preventing, detecting, diagnosing, treating and/or ameliorating | | | |
| | | | cancer and hyperproliferative disorders involving cells of the | | | |
| | | | hepatic system. | | | |
| 730 | HNFGV86 | Cancer | Highly preferred indications include neoplastic diseases (e.g. | THP1 | U66469 | |
| | | | cancer) such as described herein under the heading | | p53 | |
| | | | “Hyperproliferative Disordersî (particularly including, but not | | regulated | |
| | | | limited to, cancers of immune cells, such as monocytes). Highly | | gene | |
| | | | preferred embodiments of the invention include methods of | | | |
| | | | preventing, detecting, diagnosing, treating and/or ameliorating | | | |
| | | | cancer and hyperproliferative disorders involving cells of the | | | |
| | | | immune system (such as monocytes). (The THP-1 cell line is a | | | |
| | | | human monocyte cell line available through the ATCC as cell | | | |
| | | | line number TIB-202). | | | |
| 730 | HNFGV86 | Diabetes | A highly preferred indication is diabetes. Additional highly | Adipocytes- | CAP | gb\|AF136380\| |
| | | | preferred indications include complications associated with | Mar. 12, 2001 | Insulin | AF136380 |
| | | | diabetes (e.g., diabetic retinopathy, diabetic nephropathy, kidney | | | gb\|X70508\| |
| | | | disease (e.g., renal failure, nephropathy and/or other diseases and | | | HSPPI |
| | | | disorders as described in the “Renal Disorders” section below), | | | |
| | | | diabetic neuropathy, nerve disease and nerve damage (e.g., due | | | |
| | | | to diabetic neuropathy), blood vessel blockage, heart disease, | | | |
| | | | stroke, impotence (e.g., due to diabetic neuropathy or blood | | | |
| | | | vessel blockage), seizures, mental confusion, drowsiness, | | | |
| | | | nonketotic hyperglycemic-hyperosmolar coma, cardiovascular | | | |
| | | | disease (e.g., heart disease, atherosclerosis, microvascular | | | |
| | | | disease, hypertension, stroke, and other diseases and disorders as | | | |
| | | | described in the “Cardiovascular Disorders” section below), | | | |
| | | | dyslipidemia, endocrine disorders (as described in the | | | |
| | | | “Endocrine Disorders” section below), neuropathy, vision | | | |
| | | | impairment (e.g., diabetic retinopathy and blindness), ulcers and | | | |
| | | | impaired wound healing, and infection (e.g., infectious diseases | | | |
| | | | and disorders as described in the “Infectious Diseases” section | | | |
| | | | below, especially of the urinary tract and skin). Highly preferred | | | |
| | | | indications also include obesity, weight gain, and weight loss, as | | | |
| | | | well as complications associated with obesity, weight gain, and | | | |
| | | | weight loss. Preferred embodiments of the invention include | | | |
| | | | methods of preventing, detecting, diagnosing, treating and/or | | | |
| | | | ameliorating the above mentioned conditions, disorders, and | | | |
| | | | diseases. | | | |
| 730 | HNFGV86 | Diabetes | A highly preferred indication is diabetes. Additional highly | AOSMC | ADD/ | gb\|AP001747\| |
| | | | preferred indications include complications associated with | | SREBP | AP001747 |
| | | | diabetes (e.g., diabetic retinopathy, diabetic nephropathy, kidney | | IRS1 | gb\|X90563\| |
| | | | disease (e.g., renal failure, nephropathy and/or other diseases and | | PPARg | HSPPARGAM |
| | | | disorders as described in the “Renal Disorders” section below), | | | |
| | | | diabetic neuropathy, nerve disease and nerve damage (e.g., due | | | |
| | | | to diabetic neuropathy), blood vessel blockage, heart disease, | | | |
| | | | stroke, impotence (e.g., due to diabetic neuropathy or blood | | | |
| | | | vessel blockage), seizures, mental confusion, drowsiness, | | | |
| | | | nonketotic hyperglycemic-hyperosmolar coma, cardiovascular | | | |
| | | | disease (e.g., heart disease, atherosclerosis, microvascular | | | |
| | | | disease, hypertension, stroke, and other diseases and disorders as | | | |
| | | | described in the “Cardiovascular Disorders” section below), | | | |
| | | | dyslipidemia, endocrine disorders (as described in the | | | |
| | | | “Endocrine Disorders” section below), neuropathy, vision | | | |
| | | | impairment (e.g., diabetic retinopathy and blindness), ulcers and | | | |
| | | | impaired wound healing, and infection (e.g., infectious diseases | | | |
| | | | and disorders as described in the “Infectious Diseases” section | | | |
| | | | below, especially of the urinary tract and skin). Highly preferred | | | |
| | | | indications also include obesity, weight gain, and weight loss, as | | | |
| | | | well as complications associated with obesity, weight gain, and | | | |
| | | | weight loss. Preferred embodiments of the invention include | | | |
| | | | methods of preventing, detecting, diagnosing, treating and/or | | | |
| | | | ameliorating the above mentioned conditions, disorders, and | | | |
| | | | diseases. (AOSMC cells are human aortic smooth muscle cells). | | | |
| 730 | HNFGV86 | Diabetes | A highly preferred indication is diabetes. Additional highly | Caco-2 | Insulin | gb\|X70508\| |
| | | | preferred indications include complications associated with | | | HSPPI |
| | | | diabetes (e.g., diabetic retinopathy, diabetic nephropathy, kidney | | | |
| | | | disease (e.g., renal failure, nephropathy and/or other diseases and | | | |
| | | | disorders as described in the “Renal Disorders” section below), | | | |
| | | | diabetic neuropathy, nerve disease and nerve damage (e.g., due | | | |
| | | | to diabetic neuropathy), blood vessel blockage, heart disease, | | | |
| | | | stroke, impotence (e.g., due to diabetic neuropathy or blood | | | |
| | | | vessel blockage), seizures, mental confusion, drowsiness, | | | |
| | | | nonketotic hyperglycemic-hyperosmolar coma, cardiovascular | | | |
| | | | disease (e.g., heart disease, atherosclerosis, microvascular | | | |
| | | | disease, hypertension, stroke, and other diseases and disorders as | | | |
| | | | described in the “Cardiovascular Disorders” section below), | | | |
| | | | dyslipidemia, endocrine disorders (as described in the | | | |
| | | | “Endocrine Disorders” section below), neuropathy, vision | | | |
| | | | impairment (e.g., diabetic retinopathy and blindness), ulcers and | | | |
| | | | impaired wound healing, and infection (e.g., infectious diseases | | | |
| | | | and disorders as described in the “Infectious Diseases” section | | | |
| | | | below, especially of the urinary tract and skin). Highly preferred | | | |
| | | | indications also include obesity, weight gain, and weight loss, as | | | |
| | | | well as complications associated with obesity, weight gain, and | | | |
| | | | weight loss. Preferred embodiments of the invention include | | | |
| | | | methods of preventing, detecting, diagnosing, treating and/or | | | |
| | | | ameliorating the above mentioned conditions, disorders, and | | | |
| | | | diseases. (The Caco-2 cell line is a human colorectal | | | |
| | | | adenocarcinoma cell line available through the ATCC as cell line | | | |
| | | | number HTB-37). | | | |
| 730 | HNFGV86 | Diabetes | A highly preferred indication is diabetes. Additional highly | Daudi | Resistin | gb\|AF205952\| |
| | | | preferred indications include complications associated with | | | AF205952 |
| | | | diabetes (e.g., diabetic retinopathy, diabetic nephropathy, kidney | | | |
| | | | disease (e.g., renal failure, nephropathy and/or other diseases and | | | |
| | | | disorders as described in the “Renal Disorders” section below), | | | |
| | | | diabetic neuropathy, nerve disease and nerve damage (e.g., due | | | |
| | | | to diabetic neuropathy), blood vessel blockage, heart disease, | | | |
| | | | stroke, impotence (e.g., due to diabetic neuropathy or blood | | | |
| | | | vessel blockage), seizures, mental confusion, drowsiness, | | | |
| | | | nonketotic hyperglycemic-hyperosmolar coma, cardiovascular | | | |
| | | | disease (e.g., heart disease, atherosclerosis, microvascular | | | |
| | | | disease, hypertension, stroke, and other diseases and disorders as | | | |
| | | | described in the “Cardiovascular Disorders” section below), | | | |
| | | | dyslipidemia, endocrine disorders (as described in the | | | |
| | | | “Endocrine Disorders” section below), neuropathy, vision | | | |
| | | | impairment (e.g., diabetic retinopathy and blindness), ulcers and | | | |
| | | | impaired wound healing, and infection (e.g., infectious diseases | | | |
| | | | and disorders as described in the “Infectious Diseases” section | | | |
| | | | below, especially of the urinary tract and skin). Highly preferred | | | |
| | | | indications also include obesity, weight gain, and weight loss, as | | | |
| | | | well as complications associated with obesity, weight gain, and | | | |
| | | | weight loss. Preferred embodiments of the invention include | | | |
| | | | methods of preventing, detecting, diagnosing, treating and/or | | | |
| | | | ameliorating the above mentioned conditions, disorders, and | | | |
| | | | diseases. (The Daudi cell line is a human B lymphoblast cell line | | | |
| | | | available through the ATCC as cell line number CCL-213). | | | |
| 730 | HNFGV86 | Diabetes | A highly preferred indication is diabetes. Additional highly | HUVEC | Insulin | gb\|X70508\| |
| | | | preferred indications include complications associated with | | | HSPPI |
| | | | diabetes (e.g., diabetic retinopathy, diabetic nephropathy, kidney | | | |
| | | | disease (e.g., renal failure, nephropathy and/or other diseases and | | | |
| | | | disorders as described in the “Renal Disorders” section below), | | | |
| | | | diabetic neuropathy, nerve disease and nerve damage (e.g., due | | | |
| | | | to diabetic neuropathy), blood vessel blockage, heart disease, | | | |
| | | | stroke, impotence (e.g., due to diabetic neuropathy or blood | | | |
| | | | vessel blockage), seizures, mental confusion, drowsiness, | | | |
| | | | nonketotic hyperglycemic-hyperosmolar coma, cardiovascular | | | |
| | | | disease (e.g., heart disease, atherosclerosis, microvascular | | | |
| | | | disease, hypertension, stroke, and other diseases and disorders as | | | |
| | | | described in the “Cardiovascular Disorders” section below), | | | |
| | | | dyslipidemia, endocrine disorders (as described in the | | | |
| | | | “Endocrine Disorders” section below), neuropathy, vision | | | |
| | | | impairment (e.g., diabetic retinopathy and blindness), ulcers and | | | |
| | | | impaired wound healing, and infection (e.g., infectious diseases | | | |
| | | | and disorders as described in the “Infectious Diseases” section | | | |
| | | | below, especially of the urinary tract and skin). Highly preferred | | | |
| | | | indications also include obesity, weight gain, and weight loss, as | | | |
| | | | well as complications associated with obesity, weight gain, and | | | |
| | | | weight loss. Preferred embodiments of the invention include | | | |
| | | | methods of preventing, detecting, diagnosing, treating and/or | | | |
| | | | ameliorating the above mentioned conditions, disorders, and | | | |
| | | | diseases. (HUVEC cells are human umbilical vein endothelial | | | |
| | | | cells). | | | |
| 730 | HNFGV86 | Diabetes | A highly preferred indication is diabetes. Additional highly | Jurkat | Insulin | gb\|X70508\| |
| | | | preferred indications include complications associated with | | Resistin | HSPPI |
| | | | diabetes (e.g., diabetic retinopathy, diabetic nephropathy, kidney | | | gb\|AF205952\| |
| | | | disease (e.g., renal failure, nephropathy and/or other diseases and | | | AF205952 |
| | | | disorders as described in the “Renal Disorders” section below), | | | |
| | | | diabetic neuropathy, nerve disease and nerve damage (e.g., due | | | |
| | | | to diabetic neuropathy), blood vessel blockage, heart disease, | | | |
| | | | stroke, impotence (e.g., due to diabetic neuropathy or blood | | | |
| | | | vessel blockage), seizures, mental confusion, drowsiness, | | | |
| | | | nonketotic hyperglycemic-hyperosmolar coma, cardiovascular | | | |
| | | | disease (e.g., heart disease, atherosclerosis, microvascular | | | |
| | | | disease, hypertension, stroke, and other diseases and disorders as | | | |
| | | | described in the “Cardiovascular Disorders” section below), | | | |
| | | | dyslipidemia, endocrine disorders (as described in the | | | |
| | | | “Endocrine Disorders” section below), neuropathy, vision | | | |
| | | | impairment (e.g., diabetic retinopathy and blindness), ulcers and | | | |
| | | | impaired wound healing, and infection (e.g., infectious diseases | | | |
| | | | and disorders as described in the “Infectious Diseases” section | | | |
| | | | below, especially of the urinary tract and skin). Highly preferred | | | |
| | | | indications also include obesity, weight gain, and weight loss, as | | | |
| | | | well as complications associated with obesity, weight gain, and | | | |
| | | | weight loss. Preferred embodiments of the invention include | | | |
| | | | methods of preventing, detecting, diagnosing, treating and/or | | | |
| | | | ameliorating the above mentioned conditions, disorders, and | | | |
| | | | diseases. (The Jurkat cell line is a human T lymphocyte cell line | | | |
| | | | available through the ATCC as cell line number TIB-152). | | | |
| 730 | HNFGV86 | Diabetes | A highly preferred indication is diabetes. Additional highly | Liver | CAP | gb\|AF136380\| |
| | | | preferred indications include complications associated with | | Glucose6 | AF1363800\| |
| | | | diabetes (e.g., diabetic retinopathy, diabetic nephropathy, kidney | | phospha- | AF136380 |
| | | | disease (e.g., renal failure, nephropathy and/or other diseases and | | tase | gb\|U91844\| |
| | | | disorders as described in the “Renal Disorders” section below), | | GLUT2 | CFU91844 |
| | | | diabetic neuropathy, nerve disease and nerve damage (e.g., due | | GLUT4 | gb\|L09683\| |
| | | | to diabetic neuropathy), blood vessel blockage, heart disease, | | IRS1 | UMGLUT2S10 |
| | | | stroke, impotence (e.g., due to diabetic neuropathy or blood | | | gb\|M20747\| |
| | | | vessel blockage), seizures, mental confusion, drowsiness, | | | HUMIRGT |
| | | | nonketotic hyperglycemic-hyperosmolar coma, cardiovascular | | | |
| | | | disease (e.g., heart disease, atherosclerosis, microvascular | | | |
| | | | disease, hypertension, stroke, and other diseases and disorders as | | | |
| | | | described in the “Cardiovascular Disorders” section below), | | | |
| | | | dyslipidemia, endocrine disorders (as described in the | | | |
| | | | “Endocrine Disorders” section below), neuropathy, vision | | | |
| | | | impairment (e.g., diabetic retinopathy and blindness), ulcers and | | | |
| | | | impaired wound healing, and infection (e.g., infectious diseases | | | |
| | | | and disorders as described in the “Infectious Diseases” section | | | |
| | | | below, especially of the urinary tract and skin). Highly preferred | | | |
| | | | indications also include obesity, weight gain, and weight loss, as | | | |
| | | | well as complications associated with obesity, weight gain, and | | | |
| | | | weight loss. Preferred embodiments of the invention include | | | |
| | | | methods of preventing, detecting, diagnosing, treating and/or | | | |
| | | | ameliorating the above mentioned conditions, disorders, and | | | |
| | | | diseases. | | | |
| 730 | HNFGV86 | Immune | Highly preferred indications include immunological disorders | AOSMC | CCR3 | gb\|AB023887\| |
| | | | such as described herein under the heading “Immune Activity” | | CD40 | AB023887 |
| | | | and/or “Blood-Related Disorders” (particularly including, but not | | | gb\|AJ300189\| |
| | | | limited to, immune disorders involving muscle tissues and the | | | HSA30018 |
| | | | cardiovascular system (e.g. heart, lungs, circulatory system)). | | | |
| | | | Highly preferred embodiments of the invention include methods | | | |
| | | | of preventing, detecting, diagnosing, treating and/or ameliorating | | | |
| | | | disorders of the immune system (particularly including, but not | | | |
| | | | limited to, immune disorders involving muscle tissue or the | | | |
| | | | cardiovascular system). (AOSMC cells are human aortic smooth | | | |
| | | | muscle cells). | | | |
| 730 | HNFGV86 | Immune | Highly preferred indications include immunological disorders | Caco-2 | c-maf | gb\|AF055377\| |
| | | | such as described herein under the heading “Immune Activity” | | LTBR | AF055377 |
| | | | and/or “Blood-Related Disorders” (particularly including, but not | | | gb\|AK027080\| |
| | | | limited to, immune disorders involving the cells of the | | | AK027080 |
| | | | gastrointestinal tract). Highly preferred embodiments of the | | | |
| | | | invention include methods of preventing, detecting, diagnosing, | | | |
| | | | treating and/or ameliorating disorders of the immune system | | | |
| | | | (particularly including, but not limited to, immune disorders | | | |
| | | | involving cells of the gastrointestinal tract). (The Caco-2 cell line | | | |
| | | | is a human colorectal adenocarcinoma cell line available through | | | |
| | | | the ATCC as cell line number HTB-37). | | | |
| 730 | HNFGV86 | Immune | Highly preferred indications include immunological disorders | Daudi | TNF | gb\|AJ270944\| |
| | | | such as described herein under the heading “Immune Activity” | | | HSA27094 |
| | | | and/or “Blood-Related Disorders” (particularly including, but not | | | |
| | | | limited to, immune disorders involving the B-cells). Highly | | | |
| | | | preferred embodiments of the invention include methods of | | | |
| | | | preventing, detecting, diagnosing, treating and/or ameliorating | | | |
| | | | disorders of the immune system (particularly including, but not | | | |
| | | | limited to, immune disorders involving B-cells). (The Daudi cell | | | |
| | | | line is a human B lymphoblast cell line available through the | | | |
| | | | ATCC as cell line number CCL-213). | | | |
| 730 | HNFGV86 | Immune | Highly preferred indications include immunological disorders | HUVEC | ICAM | gb\|X06990\| |
| | | | such as described herein under the heading “Immune Activity” | | | HSICAM1 |
| | | | and/or “Blood-Related Disorders” (particularly including, but not | | | |
| | | | limited to, immune disorders involving endothelial cells). Highly | | | |
| | | | preferred embodiments of the invention include methods of | | | |
| | | | preventing, detecting, diagnosing, treating and/or ameliorating | | | |
| | | | disorders of the immune system (particularly including, but not | | | |
| | | | limited to, immune disorders involving endothelial cells). | | | |
| | | | (HUVEC cells are human umbilical vein endothelial cells). | | | |
| 730 | HNFGV86 | Immune | Highly preferred indications include immunological disorders | Jurkat | CD25 | gb\|X03137\| |
| | | | such as described herein under the heading “Immune Activity” | | CD28 | HSIL2RG7 |
| | | | and/or “Blood-Related Disorders” (particularly including, but not | | ICAM | gb\|AF222342\| |
| | | | limited to, immune disorders involving T-cells). Highly | | VCAM | AF222342 |
| | | | preferred embodiments of the invention include methods of | | | gb\|X06990\| |
| | | | preventing, detecting, diagnosing, treating and/or ameliorating | | | HSICAM1 |
| | | | disorders of the immune system (particularly including, but not | | | gb\|A30922\| |
| | | | limited to, immune disorders involving T-cells). (The Jurkat cell | | | A30922 |
| | | | line is a human T lymphocyte cell line available through the | | | |
| | | | ATCC as cell line number TIB-152). | | | |
| 730 | HNFGV86 | Immune | Highly preferred indications include immunological disorders | Liver | CD40 | gb\|AJ300189\| |
| | | | such as described herein under the heading “Immune Activity” | | CIS3 | HSA30018 |
| | | | and/or “Blood-Related Disorders” (particularly including, but not | | ICAM | gb\|AB006967\| |
| | | | limited to, immune disorders involving cells of the hepatic | | | AB006967 |
| | | | system). Highly preferred embodiments of the invention include | | | gb\|X06990\| |
| | | | methods of preventing, detecting, diagnosing, treating and/or | | | HSICAM1 |
| | | | ameliorating disorders of the immune system (particularly | | | |
| | | | including, but not limited to, immune disorders involving cells of | | | |
| | | | the hepatic system). | | | |
| 730 | HNFGV86 | Immune | Highly preferred indications include immunological disorders | NHDF | VCAM | gb\|A30922\| |
| | | | such as described herein under the heading “Immune Activity” | | | A30922 |
| | | | and/or “Blood-Related Disorders” (particularly including, but not | | | |
| | | | limited to, immune disorders involving the skin). Highly | | | |
| | | | preferred embodiments of the invention include methods of | | | |
| | | | preventing, detecting, diagnosing, treating and/or ameliorating | | | |
| | | | disorders of the immune system (particularly including, but not | | | |
| | | | limited to, immune disorders involving the skin). (NHDF cells | | | |
| | | | are normal human dermal fibroblasts). | | | |
| 730 | HNFGV86 | Immune | Highly preferred indications include immunological disorders | THP1 | CCR4 | gb\|AB023888\| |
| | | | such as described herein under the heading “Immune Activity” | | IL1B | AB023888 |
| | | | and/or “Blood-Related Disorders” (particularly including, but not | | Rag2 | gb\|X02532\| |
| | | | limited to, immune disorders involving monocytes). Highly | | | HSIL1BR |
| | | | preferred embodiments of the invention include methods of | | | gb\|AY011962\| |
| | | | preventing, detecting, diagnosing, treating and/or ameliorating | | | AY011962 |
| | | | disorders of the immune system (particularly including, but not | | | |
| | | | limited to, immune disorders involving monocytes). (The THP1 | | | |
| | | | cell line is a human monocyte cell line available through the | | | |
| | | | ATCC as cell line number TIB-202). | | | |
| 730 | HNFGV86 | Immune | Highly preferred indications include immunological disorders | U937 | CCR4 | gb\|AB023888\| |
| | | | such as described herein under the heading “Immune Activity” | | ICAM | AB023888 |
| | | | and/or “Blood-Related Disorders” (particularly including, but not | | Rag1 | gb\|X06990\| |
| | | | limited to, immune disorders involving monocytes). Highly | | | HSICAM1 |
| | | | preferred embodiments of the invention include methods of | | | gb\|M29474\| |
| | | | preventing, detecting, diagnosing, treating and/or ameliorating | | | HUMRAG1 |
| | | | disorders of the immune system (particularly including, but not | | | |
| | | | limited to, immune disorders involving monocytes). (The U937 | | | |
| | | | cell line is a human monocyte cell line available through the | | | |
| | | | ATCC as cell line number CRL-1593.2). | | | |
| 736 | HNFIW43 | Cancer | Highly preferred indications include neoplastic diseases (e.g. | U937 | DHFR | gb\|V00507\| |
| | | | cancer) such as described herein under the heading | | Egr1 | HSDHFR |
| | | | “Hyperproliferative Disordersî (particularly including, but not | | M1 RIBO | gb\|X59543\| |
| | | | limited to, cancers of immune cells, such as monocytes). Highly | | R | HSRIREM1 |
| | | | preferred embodiments of the invention include methods of | | | |
| | | | preventing, detecting, diagnosing, treating and/or ameliorating | | | |
| | | | cancer and hyperproliferative disorders involving cells of the | | | |
| | | | immune system (such as monocytes). (THe U-937 cell line is a | | | |
| | | | human monocyte cell line available through the ATCC as cell | | | |
| | | | line number CRL-1593.2) | | | |
| 736 | HNFIW43 | Immune | Highly preferred indications include immunological disorders | U937 | CD69 | gb\|Z22576\| |
| | | | such as described herein under the heading “Immune Activity” | | TNF | HSCD69GNA |
| | | | and/or “Blood-Related Disorders” (particularly including, but not | | | gb\|AJ270944\| |
| | | | limited to, immune disorders involving monocytes). Highly | | | HSA27094 |
| | | | preferred embodiments of the invention include methods of | | | |
| | | | preventing, detecting, diagnosing, treating and/or ameliorating | | | |
| | | | disorders of the immune system (particularly including, but not | | | |
| | | | limited to, immune disorders involving monocytes). (The U937 | | | |
| | | | cell line is a human monocyte cell line available through the | | | |
| | | | ATCC as cell line number CRL-1593.2). | | | |
| 829 | HOSBJ30 | Diabetes | A highly preferred indication is diabetes. Additional highly | Adipocytes- | Acyl CoA | gb\|L09229\| |
| | | | preferred indications include complications associated with | Mar. 12, 2001 | synthetase | HUMFACAL |
| | | | diabetes (e.g., diabetic retinopathy, diabetic nephropathy, kidney | | ADD/ | gb\|AP001747\| |
| | | | disease (e.g., renal failure, nephropathy and/or other diseases and | | SREBP | AP001747 |
| | | | disorders as described in the “Renal Disorders” section below), | | CAP | gb\|AF136380\| |
| | | | diabetic neuropathy, nerve disease and nerve damage (e.g., due | | GLUT4 | AF136380 |
| | | | to diabetic neuropathy), blood vessel blockage, heart disease, | | Hexoki- | gb\|M20747\| |
| | | | stroke, impotence (e.g., due to diabetic neuropathy or blood | | nase | HUMIRGT |
| | | | vessel blockage), seizures, mental confusion, drowsiness, | | IIUNCP2 | gb\|Z46354\| |
| | | | nonketotic hyperglycemic-hyperosmolar coma, cardiovascular | | | HSHKEX1 |
| | | | disease (e.g., heart disease, atherosclerosis, microvascular | | | gb\|AK025742\| |
| | | | disease, hypertension, stroke, and other diseases and disorders as | | | AK025742 |
| | | | described in the “Cardiovascular Disorders” section below), | | | |
| | | | dyslipidemia, endocrine disorders (as described in the | | | |
| | | | “Endocrine Disorders” section below), neuropathy, vision | | | |
| | | | impairment (e.g., diabetic retinopathy and blindness), ulcers and | | | |
| | | | impaired wound healing, and infection (e.g., infectious diseases | | | |
| | | | and disorders as described in the “Infectious Diseases” section | | | |
| | | | below, especially of the urinary tract and skin). Highly preferred | | | |
| | | | indications also include obesity, weight gain, and weight loss, as | | | |
| | | | well as complications associated with obesity, weight gain, and | | | |
| | | | weight loss. Preferred embodiments of the invention include | | | |
| | | | methods of preventing, detecting, diagnosing, treating and/or | | | |
| | | | ameliorating the above mentioned conditions, disorders, and | | | |
| | | | diseases. | | | |
| 829 | HOSBJ30 | Diabetes | A highly preferred indication is diabetes. Additional highly | Caco-2 | Leptin | gb\|AF281943\| |
| | | | preferred indications include complications associated with | | | AF281943 |
| | | | diabetes (e.g., diabetic retinopathy, diabetic nephropathy, kidney | | | |
| | | | disease (e.g., renal failure, nephropathy and/or other diseases and | | | |
| | | | disorders as described in the “Renal Disorders” section below), | | | |
| | | | diabetic neuropathy, nerve disease and nerve damage (e.g., due | | | |
| | | | to diabetic neuropathy), blood vessel blockage, heart disease, | | | |
| | | | stroke, impotence (e.g., due to diabetic neuropathy or blood | | | |
| | | | vessel blockage), seizures, mental confusion, drowsiness, | | | |
| | | | nonketotic hyperglycemic-hyperosmolar coma, cardiovascular | | | |
| | | | disease (e.g., heart disease, atherosclerosis, microvascular | | | |
| | | | disease, hypertension, stroke, and other diseases and disorders as | | | |
| | | | described in the “Cardiovascular Disorders” section below), | | | |
| | | | dyslipidemia, endocrine disorders (as described in the | | | |
| | | | “Endocrine Disorders” section below), neuropathy, vision | | | |
| | | | impairment (e.g., diabetic retinopathy and blindness), ulcers and | | | |
| | | | impaired wound healing, and infection (e.g., infectious diseases | | | |
| | | | and disorders as described in the “Infectious Diseases” section | | | |
| | | | below, especially of the urinary tract and skin). Highly preferred | | | |
| | | | indications also include obesity, weight gain, and weight loss, as | | | |
| | | | well as complications associated with obesity, weight gain, and | | | |
| | | | weight loss. Preferred embodiments of the invention include | | | |
| | | | methods of preventing, detecting, diagnosing, treating and/or | | | |
| | | | ameliorating the above mentioned conditions, disorders, and | | | |
| | | | diseases. (The Caco-2 cell line is a human colorectal | | | |
| | | | adenocarcinoma cell line available through the ATCC as cell line | | | |
| | | | number HTB-37). | | | |
| 829 | HOSBJ30 | Diabetes | A highly preferred indication is diabetes. Additional highly | Jurkat | Resistin | gb\|AF205952\| |
| | | | preferred indications include complications associated with | | | AF205952 |
| | | | diabetes (e.g., diabetic retinopathy, diabetic nephropathy, kidney | | | |
| | | | disease (e.g., renal failure, nephropathy and/or other diseases and | | | |
| | | | disorders as described in the “Renal Disorders” section below), | | | |
| | | | diabetic neuropathy, nerve disease and nerve damage (e.g., due | | | |
| | | | to diabetic neuropathy), blood vessel blockage, heart disease, | | | |
| | | | stroke, impotence (e.g., due to diabetic neuropathy or blood | | | |
| | | | vessel blockage), seizures, mental confusion, drowsiness, | | | |
| | | | nonketotic hyperglycemic-hyperosmolar coma, cardiovascular | | | |
| | | | disease (e.g., heart disease, atherosclerosis, microvascular | | | |
| | | | disease, hypertension, stroke, and other diseases and disorders as | | | |
| | | | described in the “Cardiovascular Disorders” section below), | | | |
| | | | dyslipidemia, endocrine disorders (as described in the | | | |
| | | | “Endocrine Disorders” section below), neuropathy, vision | | | |
| | | | impairment (e.g., diabetic retinopathy and blindness), ulcers and | | | |
| | | | impaired wound healing, and infection (e.g., infectious diseases | | | |
| | | | and disorders as described in the “Infectious Diseases” section | | | |
| | | | below, especially of the urinary tract and skin). Highly preferred | | | |
| | | | indications also include obesity, weight gain, and weight loss, as | | | |
| | | | well as complications associated with obesity, weight gain, and | | | |
| | | | weight loss. Preferred embodiments of the invention include | | | |
| | | | methods of preventing, detecting, diagnosing, treating and/or | | | |
| | | | ameliorating the above mentioned conditions, disorders, and | | | |
| | | | diseases. (The Jurkat cell line is a human T lymphocyte cell line | | | |
| | | | available through the ATCC as cell line number TIB-152). | | | |
| 829 | HOSBJ30 | Diabetes | A highly preferred indication is diabetes. Additional highly | Liver | CAP | gb\|AF136380\| |
| | | | preferred indications include complications associated with | | Glucose6 | AF136380 |
| | | | diabetes (e.g., diabetic retinopathy, diabetic nephropathy, kidney | | phospha- | gb\|U91844\| |
| | | | disease (e.g., renal failure, nephropathy and/or other diseases and | | tase | CFU91844 |
| | | | disorders as described in the “Renal Disorders” section below), | | GLUT2 | gb\|L09683\| |
| | | | diabetic neuropathy, nerve disease and nerve damage (e.g., due | | | UMGLUT2S10 |
| | | | to diabetic neuropathy), blood vessel blockage, heart disease, | | | |
| | | | stroke, impotence (e.g., due to diabetic neuropathy or blood | | | |
| | | | vessel blockage), seizures, mental confusion, drowsiness, | | | |
| | | | nonketotic hyperglycemic-hyperosmolar coma, cardiovascular | | | |
| | | | disease (e.g., heart disease, atherosclerosis, microvascular | | | |
| | | | disease, hypertension, stroke, and other diseases and disorders as | | | |
| | | | described in the “Cardiovascular Disorders” section below), | | | |
| | | | dyslipidemia, endocrine disorders (as described in the | | | |
| | | | “Endocrine Disorders” section below), neuropathy, vision | | | |
| | | | impairment (e.g., diabetic retinopathy and blindness), ulcers and | | | |
| | | | impaired wound healing, and infection (e.g., infectious diseases | | | |
| | | | and disorders as described in the “Infectious Diseases” section | | | |
| | | | below, especially of the urinary tract and skin). Highly preferred | | | |
| | | | indications also include obesity, weight gain, and weight loss, as | | | |
| | | | well as complications associated with obesity, weight gain, and | | | |
| | | | weight loss. Preferred embodiments of the invention include | | | |
| | | | methods of preventing, detecting, diagnosing, treating and/or | | | |
| | | | ameliorating the above mentioned conditions, disorders, and | | | |
| | | | diseases. | | | |
| 829 | HOSBJ30 | Diabetes | A highly preferred indication is diabetes. Additional highly | U937 | Resistin | gb\|AF205952\| |
| | | | preferred indications include complications associated with | | | AF205952 |
| | | | diabetes (e.g., diabetic retinopathy, diabetic nephropathy, kidney | | | |
| | | | disease (e.g., renal failure, nephropathy and/or other diseases and | | | |
| | | | disorders as described in the “Renal Disorders” section below), | | | |
| | | | diabetic neuropathy, nerve disease and nerve damage (e.g., due | | | |
| | | | to diabetic neuropathy), blood vessel blockage, heart disease, | | | |
| | | | stroke, impotence (e.g., due to diabetic neuropathy or blood | | | |
| | | | vessel blockage), seizures, mental confusion, drowsiness, | | | |
| | | | nonketotic hyperglycemic-hyperosmolar coma, cardiovascular | | | |
| | | | disease (e.g., heart disease, atherosclerosis, microvascular | | | |
| | | | disease, hypertension, stroke, and other diseases and disorders as | | | |
| | | | described in the “Cardiovascular Disorders” section below), | | | |
| | | | dyslipidemia, endocrine disorders (as described in the | | | |
| | | | “Endocrine Disorders” section below), neuropathy, vision | | | |
| | | | impairment (e.g., diabetic retinopathy and blindness), ulcers and | | | |
| | | | impaired wound healing, and infection (e.g., infectious diseases | | | |
| | | | and disorders as described in the “Infectious Diseases” section | | | |
| | | | below, especially of the urinary tract and skin). Highly preferred | | | |
| | | | indications also include obesity, weight gain, and weight loss, as | | | |
| | | | well as complications associated with obesity, weight gain, and | | | |
| | | | weight loss. Preferred embodiments of the invention include | | | |
| | | | methods of preventing, detecting, diagnosing, treating and/or | | | |
| | | | ameliorating the above mentioned conditions, disorders, and | | | |
| | | | diseases. (The U937 cell line is a human monocyte cell line | | | |
| | | | available through the ATCC as cell line number CRL-1593.2). | | | |
| 866 | HPRCB54 | Angiogenesis | Highly preferred indications include diagnosis, prevention, | TF-1 | Vegf1 | gb\|AF024710\| |
| | | | treatment, and/or amelioration of diseases and disorders | | | AF024710 |
| | | | involving angiogenesis, wound healing, neoplasia (particularly | | | |
| | | | including, but not limited to, tumor metastases), and | | | |
| | | | cardiovascular diseases and disorders; as described herein under | | | |
| | | | the headings “Hyperproliferative Disorders,” “Regeneration,” | | | |
| | | | “Anti-Angiogenesis Activity,” “Diseases at the Cellular Level,” | | | |
| | | | and “Wound Healing and Epithelial Cell Proliferation.”(The TF- | | | |
| | | | 1 cell line is a human erythroblast cell line available through the | | | |
| | | | ATCC as cell line number CRL-2003). | | | |
| 866 | HPRCB54 | Cancer | Highly preferred indications include neoplastic diseases (e.g. | TF-1 | M1 RIBO | gb\|X59543\| |
| | | | cancer) such as described herein under the heading | | R TAA6 | HSRIREM1 |
| | | | “Hyperproliferative Disordersî (particularly including, but not | | | gb\|I34297\| |
| | | | limited to cancers involving erythrocytes). Highly preferred | | | I34297 |
| | | | embodiments of the invention include methods of preventing, | | | |
| | | | detecting, diagnosing, treating and/or ameliorating cancer and | | | |
| | | | hyperproliferative disorders involving erythrocytes. (The TF-1 | | | |
| | | | cell line is a human erythroblast cell line available through the | | | |
| | | | ATCC as cell line number CRL-2003). | | | |
| 902 | HRDEV41 | Cancer | Highly preferred indications include neoplastic diseases (e.g. | U937 | p21 | gb\|BC000275\| |
| | | | cancer) such as described herein under the heading | | | BC000275 |
| | | | “Hyperproliferative Disordersî (particularly including, but not | | | |
| | | | limited to, cancers of immune cells, such as monocytes). Highly | | | |
| | | | preferred embodiments of the invention include methods of | | | |
| | | | preventing, detecting, diagnosing, treating and/or ameliorating | | | |
| | | | cancer and hyperproliferative disorders involving cells of the | | | |
| | | | immune system (such as monocytes). (THe U-937 cell line is a | | | |
| | | | human monocyte cell line available through the ATCC as cell | | | |
| | | | line number CRL-1593.2) | | | |
| 902 | HRDEV41 | Immune | Highly preferred indications include immunological disorders | U937 | CD69 | gb\|Z22576\| |
| | | | such as described herein under the heading “Immune Activity” | | | HSCD69GNA |
| | | | and/or “Blood-Related Disorders” (particularly including, but not | | | |
| | | | limited to, immune disorders involving monocytes). Highly | | | |
| | | | preferred embodiments of the invention include methods of | | | |
| | | | preventing, detecting, diagnosing, treating and/or ameliorating | | | |
| | | | disorders of the immune system (particularly including, but not | | | |
| | | | limited to, immune disorders involving monocytes). (The U937 | | | |
| | | | cell line is a human monocyte cell line available through the | | | |
| | | | ATCC as cell line number CRL-1593.2). | | | |
| 1139 | HWACB86 | Angiogenesis | Highly preferred indications include diagnosis, prevention, | Jurkat | Vegf1 | gb\|AF024710\| |
| | | | treatment, and/or amelioration of diseases and disorders | | | AF024710 |
| | | | involving angiogenesis, wound healing, neoplasia (particularly | | | |
| | | | including, but not limited to, tumor metastases), and | | | |
| | | | cardiovascular diseases and disorders; as described herein under | | | |
| | | | the headings “Hyperproliferative Disorders,” “Regeneration,” | | | |
| | | | “Anti-Angiogenesis Activity,” “Diseases at the Cellular Level,” | | | |
| | | | and “Wound Healing and Epithelial Cell Proliferation.”(The | | | |
| | | | Jurkat cell line is a human T lymphocyte cell line available | | | |
| | | | through the ATCC as cell line number TIB-152). | | | |
| 1139 | HWACB86 | Angiogenesis | Highly preferred indications include diagnosis, prevention, | Liver | ICAM | gb\|X06990\| |
| | | | treatment, and/or amelioration of diseases and disorders | | PAI | HSICAM1 |
| | | | involving angiogenesis, wound healing, neoplasia (particularly | | | gb\|X12701\| |
| | | | including, but not limited to, tumor metastases), and | | | HSENDPAI |
| | | | cardiovascular diseases and disorders; as described herein under | | | |
| | | | the headings “Hyperproliferative Disorders,” “Regeneration,” | | | |
| | | | “Anti-Angiogenesis Activity,” “Diseases at the Cellular Level,” | | | |
| | | | and “Wound Healing and Epithelial Cell Proliferation.” | | | |
| 1139 | HWACB86 | Angiogenesis | Highly preferred indications include diagnosis, prevention, | Molt4 | VCAM | gb\|A30922\| |
| | | | treatment, and/or amelioration of diseases and disorders | | | A30922 |
| | | | involving angiogenesis, wound healing, neoplasia (particularly | | | |
| | | | including, but not limited to, tumor metastases), and | | | |
| | | | cardiovascular diseases and disorders; as described herein under | | | |
| | | | the headings “Hyperproliferative Disorders,” “Regeneration,” | | | |
| | | | “Anti-Angiogenesis Activity,” “Diseases at the Cellular Level,” | | | |
| | | | and “Wound Healing and Epithelial Cell Proliferation.”(The | | | |
| | | | Molt4 cell line is a human T cell line available through the | | | |
| | | | ATCC as cell line number CRL-1582). | | | |
| 1139 | HWACB86 | Angiogenesis | Highly preferred indications include diagnosis, prevention, | SK-N-MC | Cycloox | |
| | | | treatment, and/or amelioration of diseases and disorders | neuroblastoma | | |
| | | | involving angiogenesis, wound healing, neoplasia (particularly | | | |
| | | | including, but not limited to, tumor metastases), and | | | |
| | | | cardiovascular diseases and disorders; as described herein under | | | |
| | | | the headings “Hyperproliferative Disorders,” “Regeneration,” | | | |
| | | | “Anti-Angiogenesis Activity,” “Diseases at the Cellular Level,” | | | |
| | | | and “Wound Healing and Epithelial Cell Proliferation.”(The SK- | | | |
| | | | N-MC neuroblastoma cell line is a cell line derived from human | | | |
| | | | brain tissue available through the ATCC as cell line number | | | |
| | | | HTB-10). | | | |
| 1139 | HWACB86 | Angiogenesis | Highly preferred indications include diagnosis, prevention, | THP1 | VCAM | gb\|A30922\| |
| | | | treatment, and/or amelioration of diseases and disorders | | | A30922 |
| | | | involving angiogenesis, wound healing, neoplasia (particularly | | | |
| | | | including, but not limited to, tumor metastases), and | | | |
| | | | cardiovascular diseases and disorders; as described herein under | | | |
| | | | the headings “Hyperproliferative Disorders,” “Regeneration,” | | | |
| | | | “Anti-Angiogenesis Activity,” “Diseases at the Cellular Level,” | | | |
| | | | and “Wound Healing and Epithelial Cell Proliferation.”(The | | | |
| | | | THP-1 cell line is a human monocyte cell line available through | | | |
| | | | the ATCC as cell line number TIB-202). | | | |
| 1139 | HWACB86 | Cancer | Highly preferred indications include neoplastic diseases (e.g. | Caco-2 | c-fos | gb\|BC004490\| |
| | | | cancer) such as described herein under the heading | | | BC0044900\| |
| | | | “Hyperproliferative Disordersî (particularly including, but not | | | BC004490 |
| | | | limited to, cancer involving cells of the gastrointestinal tract). | | | |
| | | | Highly preferred embodiments of the invention include methods | | | |
| | | | of preventing, detecting, diagnosing, treating and/or ameliorating | | | |
| | | | cancer and hyperproliferative disorders involving the | | | |
| | | | gastrointestinal tract. (The Caco-2 cell line is a human colorectal | | | |
| | | | adenocarcinoma cell line available through the ATCC as cell line | | | |
| | | | number HTB-37). | | | |
| 1139 | HWACB86 | Cancer | Highly preferred indications include neoplastic diseases (e.g. | HUVEC | Egr1 | |
| | | | cancer) such as described herein under the heading | | | |
| | | | “Hyperproliferative Disordersî (particularly including, but not | | | |
| | | | limited to, cancers involving endothelial cells). Highly preferred | | | |
| | | | embodiments of the invention include methods of preventing, | | | |
| | | | detecting, diagnosing, treating and/or ameliorating cancer and | | | |
| | | | hyperproliferative disorders involving endothelial cells. | | | |
| | | | (HUVEC cells are human umbilical vein endothelial cells). | | | |
| 1139 | HWACB86 | Cancer | Highly preferred indications include neoplastic diseases (e.g. | Jurkat | Bax | gb\|AF250190\| |
| | | | cancer) such as described herein under the heading | | bcl-2 | AF250190 |
| | | | “Hyperproliferative Disordersî (particularly including, but not | | Cyclin D | gb\|X06487\| |
| | | | limited to, cancers of immune cells, such as T-cells). Highly | | | HSBCL2IG |
| | | | preferred embodiments of the invention include methods of | | | gb\|BC000076\| |
| | | | preventing, detecting, diagnosing, treating and/or ameliorating | | | BC000076 |
| | | | cancer and hyperproliferative disorders involving immune cells | | | |
| | | | (such as T-cells). (The Jurkat cell line is a human T lymphocyte | | | |
| | | | cell line available through the ATCC as cell line number TIB- | | | |
| | | | 152). | | | |
| 1139 | HWACB86 | Cancer | Highly preferred indications include neoplastic diseases (e.g. | Liver | DHFR | gb\|V00507\| |
| | | | cancer) such as described herein under the heading | | | HSDHFR |
| | | | “Hyperproliferative Disordersî (particularly including, but not | | | |
| | | | limited to, cancers involving cells of the hepatic system). Highly | | | |
| | | | preferred embodiments of the invention include methods of | | | |
| | | | preventing, detecting, diagnosing, treating and/or ameliorating | | | |
| | | | cancer and hyperproliferative disorders involving cells of the | | | |
| | | | hepatic system. | | | |
| 1139 | HWACB86 | Cancer | Highly preferred indications include neoplastic diseases (e.g. | NHDF | bcl-2 | gb\|X06487\| |
| | | | cancer) such as described herein under the heading | | Cyclin D | HSBCL2IG |
| | | | “Hyperproliferative Disordersî (particularly including, but not | | | gb\|BC000076\| |
| | | | limited to cancers involving cells of the skin). Highly preferred | | | BC000076 |
| | | | embodiments of the invention include methods of preventing, | | | |
| | | | detecting, diagnosing, treating and/or ameliorating cancer and | | | |
| | | | hyperproliferative disorders involving skin cells. (NHDF cells | | | |
| | | | are normal human dermal fibroblasts). | | | |
| 1139 | HWACB86 | Cancer | Highly preferred indications include neoplastic diseases (e.g. | SUPT | Cyclin A1 | gb\|U97680\| |
| | | | cancer) such as described herein under the heading | | DHFR | HSU97680 |
| | | | “Hyperproliferative Disordersî (particularly including, but not | | | gb\|V00507\| |
| | | | limited to, cancers of immune cells, such as T-cells). Highly | | | HSDHFR |
| | | | preferred embodiments of the invention include methods of | | | |
| | | | preventing, detecting, diagnosing, treating and/or ameliorating | | | |
| | | | cancer and hyperproliferative disorders involving cells of the | | | |
| | | | immune system (such as T-cells). (SUPT is a human T-cell line). | | | |
| 1139 | HWACB86 | Cancer | Highly preferred indications include neoplastic diseases (e.g. | THP1 | beta- | gb\|U97680\| |
| | | | cancer) such as described herein under the heading | | catenin | HSU97680 |
| | | | “Hyperproliferative Disordersî (particularly including, but not | | Cyclin A1 | |
| | | | limited to, cancers of immune cells, such as monocytes). Highly | | | |
| | | | preferred embodiments of the invention include methods of | | | |
| | | | preventing, detecting, diagnosing, treating and/or ameliorating | | | |
| | | | cancer and hyperproliferative disorders involving cells of the | | | |
| | | | immune system (such as monocytes). (The THP-1 cell line is a | | | |
| | | | human monocyte cell line available through the ATCC as cell | | | |
| | | | line number TIB-202). | | | |
| 1139 | HWACB86 | Immune | Highly preferred indications include immunological disorders | AOSMC | TNF | gb\|AJ270944\| |
| | | | such as described herein under the heading “Immune Activity” | | | HSA27094 |
| | | | and/or “Blood-Related Disorders” (particularly including, but not | | | |
| | | | limited to, immune disorders involving muscle tissues and the | | | |
| | | | cardiovascular system (e.g. heart, lungs, circulatory system)). | | | |
| | | | Highly preferred embodiments of the invention include methods | | | |
| | | | of preventing, detecting, diagnosing, treating and/or ameliorating | | | |
| | | | disorders of the immune system (particularly including, but not | | | |
| | | | limited to, immune disorders involving muscle tissue or the | | | |
| | | | cardiovascular system). (AOSMC cells are human aortic smooth | | | |
| | | | muscle cells). | | | |
| 1139 | HWACB86 | Immune | Highly preferred indications include immunological disorders | Daudi | CXCR3 | gb\|Z79783\| |
| | | | such as described herein under the heading “Immune Activity” | | | HSCKRL2 |
| | | | and/or “Blood-Related Disorders” (particularly including, but not | | | |
| | | | limited to, immune disorders involving the B-cells). Highly | | | |
| | | | preferred embodiments of the invention include methods of | | | |
| | | | preventing, detecting, diagnosing, treating and/or ameliorating | | | |
| | | | disorders of the immune system (particularly including, but not | | | |
| | | | limited to, immune disorders involving B-cells). (The Daudi cell | | | |
| | | | line is a human B lymphoblast cell line available through the | | | |
| | | | ATCC as cell line number CCL-213). | | | |
| 1139 | HWACB86 | Immune | Highly preferred indications include immunological disorders | HUVEC | CCR7 | gb\|X84702\| |
| | | | such as described herein under the heading “Immune Activity” | | Rag1 | HSDNABLR2 |
| | | | and/or “Blood-Related Disorders” (particularly including, but not | | | gb\|M29474\| |
| | | | limited to, immune disorders involving endothelial cells). Highly | | | HUMRAG1 |
| | | | preferred embodiments of the invention include methods of | | | |
| | | | preventing, detecting, diagnosing, treating and/or ameliorating | | | |
| | | | disorders of the immune system (particularly including, but not | | | |
| | | | limited to, immune disorders involving endothelial cells). | | | |
| | | | (HUVEC cells are human umbilical vein endothelial cells). | | | |
| 1139 | HWACB86 | Immune | Highly preferred indications include immunological disorders | Jurkat | CD28 | gb\|AF222342\| |
| | | | such as described herein under the heading “Immune Activity” | | GATA1 | AF222342 |
| | | | and/or “Blood-Related Disorders” (particularly including, but not | | GATA3 | gb\|X17254\| |
| | | | limited to, immune disorders involving T-cells). Highly | | HLA-c | HSERYF1 |
| | | | preferred embodiments of the invention include methods of | | IFNg | gb\|X55037\| |
| | | | preventing, detecting, diagnosing, treating and/or ameliorating | | IL5 | HSGATA3 |
| | | | disorders of the immune system (particularly including, but not | | Rag2 | gb\|X87308\| |
| | | | limited to, immune disorders involving T-cells). (The Jurkat cell | | TNF | HSRNAIG |
| | | | line is a human T lymphocyte cell line available through the | | | gb\|X12705\| |
| | | | ATCC as cell line number TIB-152). | | | HSBCDFIA |
| | | | | | | gb\|AY011962\| |
| | | | | | | AY011962 |
| | | | | | | gb\|AJ270944\| |
| | | | | | | HSA27094 |
| 1139 | HWACB86 | Immune | Highly preferred indications include immunological disorders | Liver | ICAM | gb\|X06990\| |
| | | | such as described herein under the heading “Immune Activity” | | | HSICAM1 |
| | | | and/or “Blood-Related Disorders” (particularly including, but not | | | |
| | | | limited to, immune disorders involving cells of the hepatic | | | |
| | | | system). Highly preferred embodiments of the invention include | | | |
| | | | methods of preventing, detecting, diagnosing, treating and/or | | | |
| | | | ameliorating disorders of the immune system (particularly | | | |
| | | | including, but not limited to, immune disorders involving cells of | | | |
| | | | the hepatic system). | | | |
| 1139 | HWACB86 | Immune | Highly preferred indications include immunological disorders | Molt4 | FAS | gb\|X89101\| |
| | | | such as described herein under the heading “Immune Activity” | | TNF | HSFASMRNA |
| | | | and/or “Blood-Related Disorders” (particularly including, but not | | VCAM | gb\|AJ270944\| |
| | | | limited to, immune disorders involving T-cells). Highly | | | HSA27094 |
| | | | preferred embodiments of the invention include methods of | | | gb\|A30922\| |
| | | | preventing, detecting, diagnosing, treating and/or ameliorating | | | A30922 |
| | | | disorders of the immune system (particularly including, but not | | | |
| | | | limited to, immune disorders involving T-cells). (The Molt-4 cell | | | |
| | | | line is a human T-cell line available through the ATCC as cell | | | |
| | | | line number CRL-1582). | | | |
| 1139 | HWACB86 | Immune | Highly preferred indications include immunological disorders | SUPT | CCR4 | gb\|AB023888\| |
| | | | such as described herein under the heading “Immune Activity” | | Rag2 | AB023888 |
| | | | and/or “Blood-Related Disorders” (particularly including, but not | | TNF | gb\|AY011962\| |
| | | | limited to, immune disorders involving T-cells). Highly | | | AY011962 |
| | | | preferred embodiments of the invention include methods of | | | gb\|AJ270944\| |
| | | | preventing, detecting, diagnosing, treating and/or ameliorating | | | HSA27094 |
| | | | disorders of the immune system (particularly including, but not | | | |
| | | | limited to, immune disorders involving T-cells). (The SUPT cell | | | |
| | | | line is a human T-cell line). | | | |
| 1139 | HWACB86 | Immune | Highly preferred indications include immunological disorders | THP1 | CD69 | gb\|Z22576\| |
| | | | such as described herein under the heading “Immune Activity” | | VCAM | HSCD69GNA |
| | | | and/or “Blood-Related Disorders” (particularly including, but not | | | gb\|A30922\| |
| | | | limited to, immune disorders involving monocytes). Highly | | | A30922 |
| | | | preferred embodiments of the invention include methods of | | | |
| | | | preventing, detecting, diagnosing, treating and/or ameliorating | | | |
| | | | disorders of the immune system (particularly including, but not | | | |
| | | | limited to, immune disorders involving monocytes). (The THP1 | | | |
| | | | cell line is a human monocyte cell line available through the | | | |
| | | | ATCC as cell line number TIB-202). | | | |
| 1177 | HYAAF05 | Angiogenesis | Highly preferred indications include diagnosis, prevention, | HEK293 | TSP-1 | gb\|X04665\| |
| | | | treatment, and/or amelioration of diseases and disorders | | Vegf1 | HSTHROMR |
| | | | involving angiogenesis, wound healing, neoplasia (particularly | | | gb\|AF024710\| |
| | | | including, but not limited to, tumor metastases), and | | | AF024710 |
| | | | cardiovascular diseases and disorders; as described herein under | | | |
| | | | the headings “Hyperproliferative Disorders,” “Regeneration,” | | | |
| | | | “Anti-Angiogenesis Activity,” “Diseases at the Cellular Level,” | | | |
| | | | and “Wound Healing and Epithelial Cell Proliferation.”(The | | | |
| | | | HEK293 cell line is a human embryonal kidney epithelial cell | | | |
| | | | line available through the ATCC as cell line number CRL-1573). | | | |
| 1177 | HYAAF05 | Angiogenesis | Highly preferred indications include diagnosis, prevention, | SK-N-MC | Cycloox | |
| | | | treatment, and/or amelioration of diseases and disorders | neuroblastoma | | |
| | | | involving angiogenesis, wound healing, neoplasia (particularly | | | |
| | | | including, but not limited to, tumor metastases), and | | | |
| | | | cardiovascular diseases and disorders; as described herein under | | | |
| | | | the headings “Hyperproliferative Disorders,” “Regeneration,” | | | |
| | | | “Anti-Angiogenesis Activity,” “Diseases at the Cellular Level,” | | | |
| | | | and “Wound Healing and Epithelial Cell Proliferation.”(The SK- | | | |
| | | | N-MC neuroblastoma cell line is a cell line derived from human | | | |
| | | | brain tissue available through the ATCC as cell line number | | | |
| | | | HTB-10). | | | |
| 1177 | HYAAF05 | Cancer | Highly preferred indications include neoplastic diseases (e.g. | AOSMC | Cyclin D3 | gb\|AR034832\| |
| | | | cancer) such as described herein under the heading | | | AR034832 |
| | | | “Hyperproliferative Disordersî (particularly including, but not | | | |
| | | | limited to, cancers of muscle tissues and the cardiovascular | | | |
| | | | system (e.g. heart, lungs, circulatory system)). Highly preferred | | | |
| | | | embodiments of the invention include methods of preventing, | | | |
| | | | detecting, diagnosing, treating and/or ameliorating cancer and | | | |
| | | | hyperproliferative disorders. (AOSMC cells are aortic smooth | | | |
| | | | muscle cells). | | | |
| 1177 | HYAAF05 | Cancer | Highly preferred indications include neoplastic diseases (e.g. | Daudi | Egr1 | |
| | | | cancer) such as described herein under the heading | | | |
| | | | “Hyperproliferative Disordersî (particularly including, but not | | | |
| | | | limited to, cancers of immune cells, such as B-cells). Highly | | | |
| | | | preferred embodiments of the invention include methods of | | | |
| | | | preventing, detecting, diagnosing, treating and/or ameliorating | | | |
| | | | cancer and hyperproliferative disorders involving immune cells | | | |
| | | | (such as B-cells). (The Daudi cell line is a human B lymphoblast | | | |
| | | | cell line available through the ATCC as cell line number CCL- | | | |
| | | | 213). | | | |
| 1177 | HYAAF05 | Cancer | Highly preferred indications include neoplastic diseases (e.g. | HEK293 | Bax | gb\|AF250190\| |
| | | | cancer) such as described herein under the heading | | Cyclin D | AF250190 |
| | | | “Hyperproliferative Disordersî (particularly including, but not | | Cyclin D2 | gb\|BC000076\| |
| | | | limited to, cancers of epithelial cells or cancers involving the | | Cyclin D3 | BC000076 |
| | | | renal system). Highly preferred embodiments of the invention | | | gb\|X68452\| |
| | | | include methods of preventing, detecting, diagnosing, treating | | | HSCYCD2 |
| | | | and/or ameliorating cancer and hyperproliferative disorders | | | gb\|AR034832\| |
| | | | involving epithelial cells or the renal system. (The 293 cell line | | | AR034832 |
| | | | human embryonal kidney epithelial cell line available through | | | |
| | | | the ATCC as cell line number CRL-1573). | | | |
| 1177 | HYAAF05 | Cancer | Highly preferred indications include neoplastic diseases (e.g. | HUVEC | Cyclin D | gb\|BC000076\| |
| | | | cancer) such as described herein under the heading | | E-cadherin | BC000076 |
| | | | “Hyperproliferative Disordersî (particularly including, but not | | Egr1 | gb\|Z35408\| |
| | | | limited to, cancers involving endothelial cells). Highly preferred | | p21 | HSECAD9 |
| | | | embodiments of the invention include methods of preventing, | | TAA6 | gb\|BC000275\| |
| | | | detecting, diagnosing, treating and/or ameliorating cancer and | | | BC000275 |
| | | | hyperproliferative disorders involving endothelial cells. | | | gb\|I34297\| |
| | | | (HUVEC cells are human umbilical vein endothelial cells). | | | I34297 |
| 1177 | HYAAF05 | Cancer | Highly preferred indications include neoplastic diseases (e.g. | NHDF | Cyclin D2 | gb\|X68452\| |
| | | | cancer) such as described herein under the heading | | TAA6 | HSCYCD2 |
| | | | “Hyperproliferative Disordersî (particularly including, but not | | | gb\|I34297\| |
| | | | limited to cancers involving cells of the skin). Highly preferred | | | I34297 |
| | | | embodiments of the invention include methods of preventing, | | | |
| | | | detecting, diagnosing, treating and/or ameliorating cancer and | | | |
| | | | hyperproliferative disorders involving skin cells. (NHDF cells | | | |
| | | | are normal human dermal fibroblasts). | | | |
| 1177 | HYAAF05 | Cancer | Highly preferred indications include neoplastic diseases (e.g. | SK-N-MC | DHFR | gb\|V00507\| |
| | | | cancer) such as described herein under the heading | neuroblastoma | | HSDHFR |
| | | | “Hyperproliferative Disordersî (particularly including, but not | | | |
| | | | limited to cancers involving cells of the brain/central nervous | | | |
| | | | system (e.g. neural epithelium)). Highly preferred embodiments | | | |
| | | | of the invention include methods of preventing, detecting, | | | |
| | | | diagnosing, treating and/or ameliorating cancer and | | | |
| | | | hyperproliferative disorders involving the brain or central | | | |
| | | | nervous system. (The SK-N-MC neuroblastoma cell line is a cell | | | |
| | | | line derived from human brain tissue available through the | | | |
| | | | ATCC as cell line number HTB-10). | | | |
| 1177 | HYAAF05 | Cancer | Highly preferred indications include neoplastic diseases (e.g. | THP1 | c-jun | gb\|BC006175\| |
| | | | cancer) such as described herein under the heading | | Cyclin D | BC006175 |
| | | | “Hyperproliferative Disordersî (particularly including, but not | | Egr1 | gb\|BC000076\| |
| | | | limited to, cancers of immune cells, such as monocytes). Highly | | U66469 | BC000076 |
| | | | preferred embodiments of the invention include methods of | | p53 | |
| | | | preventing, detecting, diagnosing, treating and/or ameliorating | | regulated | |
| | | | cancer and hyperproliferative disorders involving cells of the | | gene | |
| | | | immune system (such as monocytes). (The THP-1 cell line is a | | | |
| | | | human monocyte cell line available through, the ATCC as cell | | | |
| | | | line number TIB-202). | | | |
| 1177 | HYAAF05 | Cancer | Highly preferred indications include neoplastic diseases (e.g. | U937 | U66469 | |
| | | | cancer) such as described herein under the heading | | p53 | |
| | | | “Hyperproliferative Disordersî (particularly including, but not | | regulated | |
| | | | limited to, cancers of immune cells, such as monocytes). Highly | | gene | |
| | | | preferred embodiments of the invention include methods of | | | |
| | | | preventing, detecting, diagnosing, treating and/or ameliorating | | | |
| | | | cancer and hyperproliferative disorders involving cells of the | | | |
| | | | immune system (such as monocytes). (The U-937 cell line is a | | | |
| | | | human monocyte cell line available through the ATCC as cell | | | |
| | | | line number CRL-1593.2) | | | |
| 1177 | HYAAF05 | Immune | Highly preferred indications include immunological disorders | AOSMC | CCR7 | gb\|X84702\| |
| | | | such as described herein under the heading “Immune Activity” | | Rag1 | HSDNABLR2 |
| | | | and/or “Blood-Related Disorders” (particularly including, but not | | | gb\|M29474\| |
| | | | limited to, immune disorders involving muscle tissues and the | | | HUMRAG1 |
| | | | cardiovascular system (e.g. heart, lungs, circulatory system)). | | | |
| | | | Highly preferred embodiments of the invention include methods | | | |
| | | | of preventing, detecting, diagnosing, treating and/or ameliorating | | | |
| | | | disorders of the immune system (particularly including, but not | | | |
| | | | limited to, immune disorders involving muscle tissue or the | | | |
| | | | cardiovascular system). (AOSMC cells are human aortic smooth | | | |
| | | | muscle cells). | | | |
| 1177 | HYAAF05 | Immune | Highly preferred indications include immunological disorders | HEK293 | CCR4 | gb\|AB023888\| |
| | | | such as described herein under the heading “Immune Activity” | | TNF | AB023888 |
| | | | and/or “Blood-Related Disorders” (particularly including, but not | | | gb\|AJ270944\| |
| | | | limited to, immune disorders involving epithelial cells or the | | | HSA27094 |
| | | | renal system). Highly preferred embodiments of the invention | | | |
| | | | include methods of preventing, detecting, diagnosing, treating | | | |
| | | | and/or ameliorating disorders of the immune system (particularly | | | |
| | | | including, but not limited to, immune disorders involving | | | |
| | | | epithelial cells or the renal system). (The 293 cell line is a human | | | |
| | | | embryonal kidney epithelial cell line available through the ATCC | | | |
| | | | as cell line number CRL-1573). | | | |
| 1177 | HYAAF05 | Immune | Highly preferred indications include immunological disorders | HUVEC | CD30 | gb\|AK027080\| |
| | | | such as described herein under the heading “Immune Activity” | | LTBR | AK027080 |
| | | | and/or “Blood-Related Disorders” (particularly including, but not | | | |
| | | | limited to, immune disorders involving endothelial cells). Highly | | | |
| | | | preferred embodiments of the invention include methods of | | | |
| | | | preventing, detecting, diagnosing, treating and/or ameliorating | | | |
| | | | disorders of the immune system (particularly including, but not | | | |
| | | | limited to, immune disorders involving endothelial cells). | | | |
| | | | (HUVEC cells are human umbilical vein endothelial cells). | | | |
| 1177 | HYAAF05 | Immune | Highly preferred indications include immunological disorders | Liver | IL10 | gb\|AF055467\| |
| | | | such as described herein under the heading “Immune Activity” | | | AF055467 |
| | | | and/or “Blood-Related Disorders” (particularly including, but not | | | |
| | | | limited to, immune disorders involving cells of the hepatic | | | |
| | | | system). Highly preferred embodiments of the invention include | | | |
| | | | methods of preventing, detecting, diagnosing, treating and/or | | | |
| | | | ameliorating disorders of the immune system (particularly | | | |
| | | | including, but not limited to, immune disorders involving cells of | | | |
| | | | the hepatic system). | | | |
| 1177 | HYAAF05 | Immune | Highly preferred indications include immunological disorders | NHDF | Rag1 | gb\|M29474\| |
| | | | such as described herein under the heading “Immune Activity” | | | HUMRAG1 |
| | | | and/or “Blood-Related Disorders” (particularly including, but not | | | |
| | | | limited to, immune disorders involving the skin). Highly | | | |
| | | | preferred embodiments of the invention include methods of | | | |
| | | | preventing, detecting, diagnosing, treating and/or ameliorating | | | |
| | | | disorders of the immune system (particularly including, but not | | | |
| | | | limited to, immune disorders involving the skin). (NHDF cells | | | |
| | | | are normal human dermal fibroblasts). | | | |
| 1177 | HYAAF05 | Immune | Highly preferred indications include immunological disorders | SK-N-MC | TNF | gb\|AJ270944\| |
| | | | such as described herein under the heading “Immune Activity” | neuroblastoma | | HSA27094 |
| | | | and/or “Blood-Related Disorders” (particularly including, but not | | | |
| | | | limited to, immune disorders involving the central nervous | | | |
| | | | system). Highly preferred embodiments of the invention include | | | |
| | | | methods of preventing, detecting, diagnosing, treating and/or | | | |
| | | | ameliorating disorders of the immune system (particularly | | | |
| | | | including, but not limited to, immune disorders involving the | | | |
| | | | central nervous sytem). (The SK-N-MC neuroblastoma cell line | | | |
| | | | is a cell line derived from human brain tissue and is available | | | |
| | | | through the ATCC as cell line number HTB-10). | | | |
| 1177 | HYAAF05 | Immune | Highly preferred indications include immunological disorders | THP1 | c-maf | gb\|AF055377\| |
| | | | such as described herein under the heading “Immune Activity” | | CCR3 | AF055377 |
| | | | and/or “Blood-Related Disorders” (particularly including, but not | | | gb\|AB023887\| |
| | | | limited to, immune disorders involving monocytes). Highly | | | AB023887 |
| | | | preferred embodiments of the invention include methods of | | | |
| | | | preventing, detecting, diagnosing, treating and/or ameliorating | | | |
| | | | disorders of the immune system (particularly including, but not | | | |
| | | | limited to, immune disorders involving monocytes). (The THP1 | | | |
| | | | cell line is a human monocyte cell line available through the | | | |
| | | | ATCC as cell line number TIB-202). | | | |
| 1177 | HYAAF05 | Immune | Highly preferred indications include immunological disorders | U937 | TNF | gb\|AJ270944\| |
| | | | such as described herein under the heading “Immune Activity” | | | HSA27094\| |
| | | | and/or “Blood-Related Disorders” (particularly including, but not | | | HSA27094 |
| | | | limited to, immune disorders involving monocytes). Highly | | | |
| | | | preferred embodiments of the invention include methods of | | | |
| | | | preventing, detecting, diagnosing, treating and/or ameliorating | | | |
| | | | disorders of the immune system (particularly including, but not | | | |
| | | | limited to, immune disorders involving monocytes). (The U937 | | | |
| | | | cell line is a human monocyte cell line available through the | | | |
| | | | ATCC as cell line number CRL-1593.2). | | | |

[0167] Table 2 further characterizes certain encoded polypeptides of the invention, by providing the results of comparisons to protein and protein family databases. The first column provides a unique clone identifier, “Clone ID NO:”, corresponding to a cDNA clone disclosed in Table 1A and/or Table 1B. The second column provides the unique contig identifier, “Contig ID:” which allows correlation with the information in Table 1B. The third column provides the sequence identifier, “SEQ ID NO:”, for the contig polynucleotide sequences. The fourth column provides the analysis method by which the homology/identity disclosed in the Table was determined. The fifth column provides a description of the PFAM/NR hit identified by each analysis. Column six provides the accession number of the PFAM/NR hit disclosed in the fifth column. Column seven, score/percent identity, provides a quality score or the percent identity, of the hit disclosed in column five. Comparisons were made between polypeptides encoded by polynucleotides of the invention and a non-redundant protein database (herein referred to as “NR”), or a database of protein families (herein referred to as “PFAM”), as described below.

[0168] The NR database, which comprises the NBRF PIR database, the NCBI GenPept database, and the SIB SwissProt and TrEMBL databases, was made non-redundant using the computer program nrdb2 (Warren Gish, Washington University in Saint Louis). Each of the polynucleotides shown in Table 1B, column 3 (e.g., SEQ ID NO:X or the ‘Query’ sequence) was used to search against the NR database. The computer program BLASTX was used to compare a 6-frame translation of the Query sequence to the NR database (for information about the BLASTX algorithm please see Altshul et al., J. Mol. Biol. 215:403-410 (1990), and Gish and States, Nat. Genet. 3:266-272 (1993). A description of the sequence that is most similar to the Query sequence (the highest scoring ‘Subject’) is shown in column five of Table 2 and the database accession number for that sequence is provided in column six. The highest scoring ‘Subject’ is reported in Table 2 if (a) the estimated probability that the match occurred by chance alone is less than 1.0e-07, and (b) the match was not to a known repetitive element. BLASTX returns alignments of short polypeptide segments of the Query and Subject sequences which share a high degree of similarity; these segments are known as High-Scoring Segment Pairs or HSPs. Table 2 reports the degree of similarity between the Query and the Subject for each HSP as a percent identity in Column 7. The percent identity is determined by dividing the number of exact matches between the two aligned sequences in the HSP, dividing by the number of Query amino acids in the HSP and multiplying by 100. The polynucleotides of SEQ ID NO:X which encode the polypeptide sequence that generates an HSP are delineated by columns 8 and 9 of Table 2.

[0169] The PFAM database, PFAM version 2.1, (Sonnhammer, Nucl. Acids Res., 26:320-322, 1998)) consists of a series of multiple sequence alignments; one alignment for each protein family. Each multiple sequence alignment is converted into a probability model called a Hidden Markov Model, or HMM, that represents the position-specific variation among the sequences that make up the multiple sequence alignment (see, e.g., Durbin, et al., Biological sequence analysis: probabilistic models of proteins and nucleic acids, Cambridge University Press, 1998 for the theory of HMMs). The program HMMER version 1.8 (Sean Eddy, Washington University in Saint Louis) was used to compare the predicted protein sequence for each Query sequence (SEQ ID NO:Y in Table 1B.1) to each of the HMMs derived from PFAM version 2.1. A HMM derived from PFAM version 2.1 was said to be a significant match to a polypeptide of the invention if the score returned by HMMER 1.8 was greater than 0.8 times the HMMER 1.8 score obtained with the most distantly related known member of that protein family. The description of the PFAM family which shares a significant match with a polypeptide of the invention is listed in column 5 of Table 2, and the database accession number of the PFAM hit is provided in column 6. Column 7 provides the score returned by HMMER version 1.8 for the alignment. Columns 8 and 9 delineate the polynucleotides of SEQ ID NO:X which encode the polypeptide sequence which show a significant match to a PFAM protein family.

[0170] As mentioned, columns 8 and 9 in Table 2, “NT From” and “NT To”, delineate the polynucleotides of “SEQ ID NO:X” that encode a polypeptide having a significant match to the PFAM/NR database as disclosed in the fifth column. In one embodiment, the invention provides a protein comprising, or alternatively consisting of, a polypeptide encoded by the polynucleotides of SEQ ID NO:X delineated in columns 8 and 9 of Table 2. Also provided are polynucleotides encoding such proteins, and the complementary strand thereto.

[0171] The nucleotide sequence SEQ ID NO:X and the translated SEQ ID NO:Y are sufficiently accurate and otherwise suitable for a variety of uses well known in the art and described further below. For instance, the nucleotide sequences of SEQ ID NO:X are useful for designing nucleic acid hybridization probes that will detect nucleic acid sequences contained in SEQ ID NO:X or the cDNA contained in ATCC Deposit No:Z. These probes will also hybridize to nucleic acid molecules in biological samples, thereby enabling immediate applications in chromosome mapping, linkage analysis, tissue identification and/or typing, and a variety of forensic and diagnostic methods of the invention. Similarly, polypeptides identified from SEQ ID NO:Y may be used to generate antibodies which bind specifically to these polypeptides, or fragments thereof, and/or to the polypeptides encoded by the cDNA clones identified in, for example, Table 1A and/or 1B.

[0172] Nevertheless, DNA sequences generated by sequencing reactions can contain sequencing errors. The errors exist as misidentified nucleotides, or as insertions or deletions of nucleotides in the generated DNA sequence. The erroneously inserted or deleted nucleotides cause frame shifts in the reading frames of the predicted amino acid sequence. In these cases, the predicted amino acid sequence diverges from the actual amino acid sequence, even though the generated DNA sequence may be greater than 99.9% identical to the actual DNA sequence (for example, one base insertion or deletion in an open reading frame of over 1000 bases).

[0173] Accordingly, for those applications requiring precision in the nucleotide sequence or the amino acid sequence, the present invention provides not only the generated nucleotide sequence identified as SEQ ID NO:X, and a predicted translated amino acid sequence identified as SEQ ID NO:Y, but also a sample of plasmid DNA containing cDNA ATCC Deposit No:Z (e.g., as set forth in columns 2 and 3 of Table 1A and/or as set forth, for example, in Table 1B, 6, and 7). The nucleotide sequence of each deposited clone can readily be determined by sequencing the deposited clone in accordance with known methods. Further, techniques known in the art can be used to verify the nucleotide sequences of SEQ ID NO:X.

[0174] The predicted amino acid sequence can then be verified from such deposits. Moreover, the amino acid sequence of the protein encoded by a particular clone can also be directly determined by peptide sequencing or by expressing the protein in a suitable host cell containing the deposited human cDNA, collecting the protein, and determining its sequence.

LENGTHY TABLE REFERENCED HERE
US20070015271A1-20070118-T00004
Please refer to the end of the specification for access instructions.

RACE Protocol for Recovery of Full-Length Genes

[0175] Partial cDNA clones can be made full-length by utilizing the rapid amplification of cDNA ends (RACE) procedure described in Frohman, M. A., et al., Proc. Nat'l. Acad. Sci. USA, 85:8998-9002 (1988). A cDNA clone missing either the 5′ or 3′ end can be reconstructed to include the absent base pairs extending to the translational start or stop codon, respectively. In some cases, cDNAs are missing the start codon of translation, therefor. The following briefly describes a modification of this original 5′ RACE procedure. Poly A+ or total RNA is reverse transcribed with Superscript II (Gibco/BRL) and an antisense or complementary primer specific to the cDNA sequence. The primer is removed from the reaction with a Microcon Concentrator (Amicon). The first-strand cDNA is then tailed with dATP and terminal deoxynucleotide transferase (Gibco/BRL). Thus, an anchor sequence is produced which is needed for PCR amplification. The second strand is synthesized from the dA-tail in PCR buffer, Taq DNA polymerase (Perkin-Elmer Cetus), an oligo-dT primer containing three adjacent restriction sites (XhoI, SalI and ClaI) at the 5′ end and a primer containing just these restriction sites. This double-stranded cDNA is PCR amplified for 40 cycles with the same primers as well as a nested cDNA-specific antisense primer. The PCR products are size-separated on an ethidium bromide-agarose gel and the region of gel containing cDNA products the predicted size of missing protein-coding DNA is removed. cDNA is purified from the agarose with the Magic PCR Prep kit (Promega), restriction digested with XhoI or SalI, and ligated to a plasmid such as pBluescript SKII (Stratagene) at XhoI and EcoRV sites. This DNA is transformed into bacteria and the plasmid clones sequenced to identify the correct protein-coding inserts. Correct 5′ ends are confirmed by comparing this sequence with the putatively identified homologue and overlap with the partial cDNA clone. Similar methods known in the art and/or commercial kits are used to amplify and recover 3′ ends.

[0176] Several quality-controlled kits are commercially available for purchase. Similar reagents and methods to those above are supplied in kit form from Gibco/BRL for both 5′ and 3′ RACE for recovery of full length genes. A second kit is available from Clontech which is a modification of a related technique, SLIC (single-stranded ligation to single-stranded cDNA), developed by Dumas et al., Nucleic Acids Res., 19:5227-32 (1991). The major differences in procedure are that the RNA is alkaline hydrolyzed after reverse transcription and RNA ligase is used to join a restriction site-containing anchor primer to the first-strand cDNA. This obviates the necessity for the dA-tailing reaction which results in a polyT stretch that is difficult to sequence past.

[0177] An alternative to generating 5′ or 3′ cDNA from RNA is to use cDNA library double-stranded DNA. An asymmetric PCR-amplified antisense cDNA strand is synthesized with an antisense cDNA-specific primer and a plasmid-anchored primer. These primers are removed and a symmetric PCR reaction is performed with a nested cDNA-specific antisense primer and the plasmid-anchored primer.

RNA Ligase Protocol for Generating the 5′ or 3′ End Sequences to Obtain Full Length Genes

[0178] Once a gene of interest is identified, several methods are available for the identification of the 5′ or 3′ portions of the gene which may not be present in the original cDNA plasmid. These methods include, but are not limited to, filter probing, clone enrichment using specific probes and protocols similar and identical to 5′ and 3′ RACE. While the full length gene may be present in the library and can be identified by probing, a useful method for generating the 5′ or 3′ end is to use the existing sequence information from the original cDNA to generate the missing information. A method similar to 5′ RACE is available for generating the missing 5′ end of a desired full-length gene. (This method was published by Fromont-Racine et al., Nucleic Acids Res., 21(7):1683-1684 (1993)). Briefly, a specific RNA oligonucleotide is ligated to the 5′ ends of a population of RNA presumably containing full-length gene RNA transcript and a primer set containing a primer specific to the ligated RNA oligonucleotide and a primer specific to a known sequence of the gene of interest, is used to PCR amplify the 5′ portion of the desired full length gene which may then be sequenced and used to generate the full length gene. This method starts with total RNA isolated from the desired source, poly A RNA may be used but is not a prerequisite for this procedure. The RNA preparation may then be treated with phosphatase if necessary to eliminate 5′ phosphate groups on degraded or damaged RNA which may interfere with the later RNA ligase step. The phosphatase if used is then inactivated and the RNA is treated with tobacco acid pyrophosphatase in order to remove the cap structure present at the 5′ ends of messenger RNAs. This reaction leaves a 5′ phosphate group at the 5′ end of the cap cleaved RNA which can then be ligated to an RNA oligonucleotide using T4 RNA ligase. This modified RNA preparation can then be used as a template for first strand cDNA synthesis using a gene specific oligonucleotide. The first strand synthesis-reaction can then be used as a template for PCR amplification of the desired 5′ end using a primer specific to the ligated RNA oligonucleotide and a primer specific to the known sequence of the gene of interest. The resultant product is then sequenced and analyzed to confirm that the 5′ end sequence belongs to the relevant gene.

[0179] The present invention also relates to vectors or plasmids which include such DNA sequences, as well as the use of the DNA sequences. The material deposited with the ATCC (e.g., as described in columns 2 and 3 of Table 1A, and/or as set forth in Table 1B, or Table 6) is a mixture of cDNA clones derived from a variety of human tissue and cloned in either a plasmid vector or a phage vector, as described, for example, in Table 1A and Table 6. These deposits are referred to as “the deposits” herein. The tissues from which some of the clones were derived are listed in Table 6, and the vector in which the corresponding cDNA is contained is also indicated in Table 6. The deposited material includes cDNA clones corresponding to SEQ ID NO:X described, for example, in Table 1A and/or 1B (ATCC Deposit No:Z). A clone which is isolatable from the ATCC Deposits by use of a sequence listed as SEQ ID NO:X, may include the entire coding region of a human gene or in other cases such clone may include a substantial portion of the coding region of a human gene. Furthermore, although the sequence listing may in some instances list only a portion of the DNA sequence in a clone included in the ATCC Deposits, it is well within the ability of one skilled in the art to sequence the DNA included in a clone contained in the ATCC Deposits by use of a sequence (or portion thereof) described in, for example Tables 1A and/or 1B or 2, by procedures hereinafter further described, and others apparent to those skilled in the art.

[0180] Also provided in Table 1A and 6 is the name of the vector which contains the cDNA clone. Each vector is routinely used in the art. The following additional information is provided for convenience.

[0181] Vectors Lambda Zap (U.S. Pat. Nos. 5,128,256 and 5,286,636), Uni-Zap XR (U.S. Pat. Nos. 5,128,256 and 5,286,636), Zap Express (U.S. Pat. Nos. 5,128,256 and 5,286,636), pBluescript (pBS) (Short, J. M. et al., Nucleic Acids Res. 16:7583-7600 (1988); Alting-Mees, M. A. and Short, J. M., Nucleic Acids Res. 17:9494 (1989)) and pBK (Alting-Mees, M. A. et al., Strategies 5:58-61 (1992)) are commercially available from Stratagene Cloning Systems, Inc., 11011 N. Torrey Pines Road, La Jolla, Calif., 92037. pBS contains an ampicillin resistance gene and pBK contains a neomycin resistance gene. Phagemid pBS may be excised from the Lambda Zap and Uni-Zap XR vectors, and phagemid pBK may be excised from the Zap Express vector. Both phagemids may be transformed into E. coli strain XL-1 Blue, also available from Stratagene.

[0182] Vectors pSport1, pCMVSport 1.0, pCMVSport 2.0 and pCMVSport 3.0, were obtained from Life Technologies, Inc., P.O. Box 6009, Gaithersburg, Md. 20897. All Sport vectors contain an ampicillin resistance gene and may be transformed into E. coli strain DH10B, also available from Life Technologies. See, for instance, Gruber, C. E., et al., Focus 15:59- (1993). Vector lafmid BA (Bento Soares, Columbia University, New York, N.Y.) contains an ampicillin resistance gene and can be transformed into E. coli strain XL-1 Blue. Vector pCR®2.1, which is available from Invitrogen, 1600 Faraday Avenue, Carlsbad, Calif. 92008, contains an ampicillin resistance gene and may be transformed into E. coli strain DH10B, available from Life Technologies. See, for instance, Clark, J. M., Nuc. Acids Res. 16:9677-9686 (1988) and Mead, D. et al., Bio/Technology 9: (1991).

[0183] The present invention also relates to the genes corresponding to SEQ ID NO:X, SEQ ID NO:Y, and/or the deposited clone (ATCC Deposit No:Z). The corresponding gene can be isolated in accordance with known methods using the sequence information disclosed herein. Such methods include preparing probes or primers from the disclosed sequence and identifying or amplifying the corresponding gene from appropriate sources of genomic material.

[0184] Also provided in the present invention are allelic variants, orthologs, and/or species homologs. Procedures known in the art can be used to obtain full-length genes, allelic variants, splice variants, full-length coding portions, orthologs, and/or species homologs of genes corresponding to SEQ ID NO:X or the complement thereof, polypeptides encoded by genes corresponding to SEQ ID NO:X or the complement thereof, and/or the cDNA contained in ATCC Deposit No:Z, using information from the sequences disclosed herein or the clones deposited with the ATCC. For example, allelic variants and/or species homologs may be isolated and identified by making suitable probes or primers from the sequences provided herein and screening a suitable nucleic acid source for allelic variants and/or the desired homologue.

[0185] The polypeptides of the invention can be prepared in any suitable manner. Such polypeptides include isolated naturally occurring polypeptides, recombinantly produced polypeptides, synthetically produced polypeptides, or polypeptides produced by a combination of these methods. Means for preparing such polypeptides are well understood in the art.

[0186] The polypeptides may be in the form of the secreted protein, including the mature form, or may be a part of a larger protein, such as a fusion protein (see below). It is often advantageous to include an additional amino acid sequence which contains secretory or leader sequences, pro-sequences, sequences which aid in purification, such as multiple histidine residues, or an additional sequence for stability during recombinant production.

[0187] The polypeptides of the present invention are preferably provided in an isolated form, and preferably are substantially purified. A recombinantly produced version of a polypeptide, including the secreted polypeptide, can be substantially purified using techniques described herein or otherwise known in the art, such as, for example, by the one-step method described in Smith and Johnson, Gene 67:31-40 (1988). Polypeptides of the invention also can be purified from natural, synthetic or recombinant sources using techniques described herein or otherwise known in the art, such as, for example, antibodies of the invention raised against the polypeptides of the present invention in methods which are well known in the art.

[0188] The present invention provides a polynucleotide comprising, or alternatively consisting of, the nucleic acid sequence of SEQ ID NO:X, and/or the cDNA sequence contained in ATCC Deposit No:Z. The present invention also provides a polypeptide comprising, or alternatively, consisting of, the polypeptide sequence of SEQ ID NO:Y, a polypeptide encoded by SEQ ID NO:X or a complement thereof, a polypeptide encoded by the cDNA contained in ATCC Deposit No:Z, and/or the polypeptide sequence encoded by a nucleotide sequence in SEQ ID NO:B as defined in column 6 of Table 1C. Polynucleotides encoding a polypeptide comprising, or alternatively consisting of the polypeptide sequence of SEQ ID NO:Y, a polypeptide encoded by SEQ ID NO:X, a polypeptide encoded by the cDNA contained in ATCC Deposit No:Z, and/or a polypeptide sequence encoded by a nucleotide sequence in SEQ ID NO:B as defined in column 6 of Table 1C are also encompassed by the invention. The present invention further encompasses a polynucleotide comprising, or alternatively consisting of, the complement of the nucleic acid sequence of SEQ ID NO:X, a nucleic acid sequence encoding a polypeptide encoded by the complement of the nucleic acid sequence of SEQ ID NO:X, and/or the cDNA contained in ATCC Deposit No:Z.

[0189] Moreover, representative examples of polynucleotides of the invention comprise, or alternatively consist of, one, two, three, four, five, six, seven, eight, nine, ten, or more of the sequences delineated in Table 1C column 6, or any combination thereof. Additional, representative examples of polynucleotides of the invention comprise, or alternatively consist of, one, two, three, four, five, six, seven, eight, nine, ten, or more of the complementary strand(s) of the sequences delineated in Table 1C column 6, or any combination thereof. In further embodiments, the above-described polynucleotides of the invention comprise, or alternatively consist of, sequences delineated in Table 1C, column 6, and have a nucleic acid sequence which is different from that of the BAC fragment having the sequence disclosed in SEQ ID NO:B (see Table 1C, column 5). In additional embodiments, the above-described polynucleotides of the invention comprise, or alternatively consist of, sequences delineated in Table 1C, column 6, and have a nucleic acid sequence which is different from that published for the BAC clone identified as BAC ID NO:A (see Table 1C, column 4). In additional embodiments, the above-described polynucleotides of the invention comprise, or alternatively consist of, sequences delineated in Table 1C, column 6, and have a nucleic acid sequence which is different from that contained in the BAC clone identified as BAC ID NO:A (see Table 1C, column 4). Polypeptides encoded by these polynucleotides, other polynucleotides that encode these polypeptides, and antibodies that bind these polypeptides are also encompassed by the invention. Additionally, fragments and variants of the above-described polynucleotides and polypeptides are also encompassed by the invention.

[0190] Further, representative examples of polynucleotides of the invention comprise, or alternatively consist of, one, two, three, four, five, six, seven, eight, nine, ten, or more of the sequences delineated in column 6 of Table 1C which correspond to the same Clone ID (see Table 1C, column 1), or any combination thereof. Additional, representative examples of polynucleotides of the invention comprise, or alternatively consist of, one, two, three, four, five, six, seven, eight, nine, ten, or more of the complementary strand(s) of the sequences delineated in column 6 of Table 1C which correspond to the same Clone ID (see Table 1C, column 1), or any combination thereof. In further embodiments, the above-described polynucleotides of the invention comprise, or alternatively consist of, sequences delineated in column 6 of Table 1C which correspond to the same Clone ID (see Table 1C, column 1) and have a nucleic acid sequence which is different from that of the BAC fragment having the sequence disclosed in SEQ ID NO:B (see Table 1C, column 5). In additional embodiments, the above-described polynucleotides of the invention comprise, or alternatively consist of, sequences delineated in column 6 of Table 1C which correspond to the same Clone ID (see Table 1C, column 1) and have a nucleic acid sequence which is different from that published for the BAC clone identified as BAC ID NO:A (see Table 1C, column 4). In additional embodiments, the above-described polynucleotides of the invention comprise, or alternatively consist of, sequences delineated in column 6 of Table 1C which correspond to the same Clone ID (see Table 1C, column 1) and have a nucleic acid sequence which is different from that contained in the BAC clone identified as BAC ID NO:A (see Table 1C, column 4). Polypeptides encoded by these polynucleotides, other polynucleotides that encode these polypeptides, and antibodies that bind these polypeptides are also encompassed by the invention. Additionally, fragments and variants of the above-described polynucleotides and polypeptides are also encompassed by the invention.

[0191] Further, representative examples of polynucleotides of the invention comprise, or alternatively consist of, one, two, three, four, five, six, seven, eight, nine, ten, or more of the sequences delineated in column 6 of Table 1C which correspond to the same contig sequence identifier SEQ ID NO:X (see Table 1C, column 2), or any combination thereof. Additional, representative examples of polynucleotides of the invention comprise, or alternatively consist of, one, two, three, four, five, six, seven, eight, nine, ten, or more of the complementary strand(s) of the sequences delineated in column 6 of Table 1C which correspond to the same contig sequence identifier SEQ ID NO:X (see Table 1C, column 2), or any combination thereof. In further embodiments, the above-described polynucleotides of the invention comprise, or alternatively consist of, sequences delineated in column 6 of Table 1C which correspond to the same contig sequence identifier SEQ ID NO:X (see Table 1C, column 2) and have a nucleic acid sequence which is different from that of the BAC fragment having the sequence disclosed in SEQ ID NO:B (see Table 1C, column 5). In additional embodiments, the above-described polynucleotides of the invention comprise, or alternatively consist of, sequences delineated in column 6 of Table 1C which correspond to the same contig sequence identifier SEQ ID NO:X (see Table 1C, column 2) and have a nucleic acid sequence which is different from that published for the BAC clone identified as BAC ID NO:A (see Table 1C, column 4). In additional embodiments, the above-described polynucleotides of the invention comprise, or alternatively consist of, sequences delineated in column 6 of Table 1C which correspond to the same contig sequence identifier SEQ ID NO:X (see Table 1C, column 2) and have a nucleic acid sequence which is different from that contained in the BAC clone identified as BAC ID NO:A (See Table 1C, column 4). Polypeptides encoded by these polynucleotides, other polynucleotides that encode these polypeptides, and antibodies that bind these polypeptides are also encompassed by the invention. Additionally, fragments and variants of the above-described polynucleotides and polypeptides are also encompassed by the invention.

[0192] Moreover, representative examples of polynucleotides of the invention comprise, or alternatively consist of, one, two, three, four, five, six, seven, eight, nine, ten, or more of the sequences delineated in the same row of Table 1C column 6, or any combination thereof. Additional, representative examples of polynucleotides of the invention comprise, or alternatively consist of, one, two, three, four, five, six, seven, eight, nine, ten, or more of the complementary strand(s) of the sequences delineated in the same row of Table 1C column 6, or any combination thereof. In preferred embodiments, the polynucleotides of the invention comprise, or alternatively consist of, one, two, three, four, five, six, seven, eight, nine, ten, or more of the complementary strand(s) of the sequences delineated in the same row of Table 1C column 6, wherein sequentially delineated sequences in the table (i.e. corresponding to those exons located closest to each other) are directly contiguous in a 5′ to 3′ orientation. In further embodiments, above-described polynucleotides of the invention comprise, or alternatively consist of, sequences delineated in the same row of Table 1C, column 6, and have a nucleic acid sequence which is different from that of the BAC fragment having the sequence disclosed in SEQ ID NO:B (see Table 1C, column 5). In additional embodiments, the above-described polynucleotides of the invention comprise, or alternatively consist of, sequences delineated in the same row of Table 1C, column 6, and have a nucleic acid sequence which is different from that published for the BAC clone identified as BAC ID NO:A (see Table 1C, column 4). In additional embodiments, the above-described polynucleotides of the invention comprise, or alternatively consist of, sequences delineated in the same row of Table 1C, column 6, and have a nucleic acid sequence which is different from that contained in the BAC clone identified as BAC ID NO:A (see Table 1C, column 4). Polypeptides encoded by these polynucleotides, other polynucleotides that encode these polypeptides, and antibodies that bind these polypeptides are also encompassed by the invention.

[0193] In additional specific embodiments, polynucleotides of the invention comprise, or alternatively consist of, one, two, three, four, five, six, seven, eight, nine, ten, or more of the sequences delineated in column 6 of Table 1C, and the polynucleotide sequence of SEQ ID NO:X (e.g., as defined in Table 1C, column 2) or fragments or variants thereof. Polypeptides encoded by these polynucleotides, other polynucleotides that encode these polypeptides, and antibodies that bind these polypeptides are also encompassed by the invention.

[0194] In additional specific embodiments, polynucleotides of the invention comprise, or alternatively consist of, one, two, three, four, five, six, seven, eight, nine, ten, or more of the sequences delineated in column 6 of Table 1C which correspond to the same Clone ID (see Table 1C, column 1), and the polynucleotide sequence of SEQ ID NO:X (e.g., as defined in Table 1A, 1B, or 1C) or fragments or variants thereof. In preferred embodiments, the delineated sequence(s) and polynucleotide sequence of SEQ ID NO:X correspond to the same Clone ID. Polypeptides encoded by these polynucleotides, other polynucleotides that encode these polypeptides, and antibodies that bind these polypeptides are also encompassed by the invention.

[0195] In further specific embodiments, polynucleotides of the invention comprise, or alternatively consist of, one, two, three, four, five, six, seven, eight, nine, ten, or more of the sequences delineated in the same row of column 6 of Table 1C, and the polynucleotide sequence of SEQ ID NO:X (e.g., as defined in Table 1A, 1B, or 1C) or fragments or variants thereof. In preferred embodiments, the delineated sequence(s) and polynucleotide sequence of SEQ ID NO:X correspond to the same row of column 6 of Table 1C. Polypeptides encoded by these polynucleotides, other polynucleotides that encode these polypeptides, and antibodies that bind these polypeptides are also encompassed by the invention.

[0196] In additional specific embodiments, polynucleotides of the invention comprise, or alternatively consist of a polynucleotide sequence in which the 3′ 10 polynucleotides of one of the sequences delineated in column 6 of Table 1C and the 5′ 10 polynucleotides of the sequence of SEQ ID NO:X are directly contiguous. Nucleic acids which hybridize to the complement of these 20 contiguous polynucleotides under stringent hybridization conditions or alternatively, under lower stringency conditions, are also encompassed by the invention. Polypeptides encoded by these polynucleotides and/or nucleic acids, other polynucleotides and/or nucleic acids that encode these polypeptides, and antibodies that bind these polypeptides are also encompassed by the invention. Additionally, fragments and variants of the above-described polynucleotides, nucleic acids, and polypeptides are also encompassed by the invention.

[0197] In additional specific embodiments, polynucleotides of the invention comprise, or alternatively consist of, a polynucleotide sequence in which the 3′ 10 polynucleotides of one of the sequences delineated in column 6 of Table 1C and the 5′ 10 polynucleotides of a fragment or variant of the sequence of SEQ ID NO:X are directly contiguous Nucleic acids which hybridize to the complement of these 20 contiguous polynucleotides under stringent hybridization conditions or alternatively, under lower stringency conditions, are also encompassed by the invention. Polypeptides encoded by these polynucleotides and/or nucleic acids, other polynucleotides and/or nucleic acids encoding these polypeptides, and antibodies that bind these polypeptides are also encompassed by the invention. Additionally, fragments and variants of the above-described polynucleotides, nucleic acids, and polypeptides are also encompassed by the invention.

[0198] In specific embodiments, polynucleotides of the invention comprise, or alternatively consist of, a polynucleotide sequence in which the 3′ 10 polynucleotides of the sequence of SEQ ID NO:X and the 5′ 10 polynucleotides of the sequence of one of the sequences delineated in column 6 of Table 1C are directly contiguous. Nucleic acids which hybridize to the complement of these 20 contiguous polynucleotides under stringent hybridization conditions or alternatively, under lower stringency conditions, are also encompassed by the invention. Polypeptides encoded by these polynucleotides and/or nucleic acids, other polynucleotides and/or nucleic acids encoding these polypeptides, and antibodies that bind these polypeptides are also encompassed by the invention. Additionally, fragments and variants of the above-described polynucleotides, nucleic acids, and polypeptides are also encompassed by the invention.

[0199] In specific embodiments, polynucleotides of the invention comprise, or alternatively consist of, a polynucleotide sequence in which the 3′ 10 polynucleotides of a fragment or variant of the sequence of SEQ ID NO:X and the 5′ 10 polynucleotides of the sequence of one of the sequences delineated in column 6 of Table 1C are directly contiguous. Nucleic acids which hybridize to the complement of these 20 contiguous polynucleotides under stringent hybridization conditions or alternatively, under lower stringency conditions, are also encompassed by the invention. Polypeptides encoded by these polynucleotides and/or nucleic acids, other polynucleotides and/or nucleic acids encoding these polypeptides, and antibodies that bind these polypeptides are also encompassed by the invention. Additionally, fragments and variants of the above-described polynucleotides, nucleic acids, and polypeptides, are also encompassed by the invention.

[0200] In further specific embodiments, polynucleotides of the invention comprise, or alternatively consist of, a polynucleotide sequence in which the 3′ 10 polynucleotides of one of the sequences delineated in column 6 of Table 1C and the 5′ 10 polynucleotides of another sequence in column 6 are directly contiguous. Nucleic acids which hybridize to the complement of these 20 contiguous polynucleotides under stringent hybridization conditions or alternatively, under lower stringency conditions, are also encompassed by the invention. Polypeptides encoded by these polynucleotides and/or nucleic acids, other polynucleotides and/or nucleic acids encoding these polypeptides, and antibodies that bind these polypeptides are also encompassed by the invention. Additionally, fragments and variants of the above-described polynucleotides, nucleic acids, and polypeptides are also encompassed by the invention.

[0201] In specific embodiments, polynucleotides of the invention comprise, or alternatively consist of, a polynucleotide sequence in which the 3′ 10 polynucleotides of one of the sequences delineated in column 6 of Table 1C and the 5′ 10 polynucleotides of another sequence in column 6 corresponding to the same Clone ID (see Table 1C, column 1) are directly contiguous. Nucleic acids which hybridize to the complement of these 20 lower stringency conditions, are also encompassed by the invention. Polypeptides encoded by these polynucleotides and/or nucleic acids, other polynucleotides and/or nucleic acids encoding these polypeptides, and antibodies that bind these polypeptides are also encompassed by the invention. Additionally, fragments and variants of the above-described polynucleotides, nucleic acids, and polypeptides are also encompassed by the invention.

[0202] In specific embodiments, polynucleotides of the invention comprise, or alternatively consist of, a polynucleotide sequence in which the 3′ 10 polynucleotides of one sequence in column 6 corresponding to the same contig sequence identifer SEQ ID. NO:X (see Table 1C, column 2) are directly contiguous. Nucleic acids which hybridize to the complement of these 20 contiguous polynucleotides under stringent hybridization conditions or alternatively, under lower stringency conditions, are also encompassed by the invention. Polypeptides encoded by these polynucleotides and/or nucleic acids, other polynucleotides and/or nucleic acids encoding these polypeptides, and antibodies that bind these polypeptides are also encompassed by the invention. Additionally, fragments and variants of the above-described polynucleotides, nucleic acids, and polypeptides are also encompassed by the invention.

[0203] In specific embodiments, polynucleotides of the invention comprise, or alternatively consist of a polynucleotide sequence in which the 3′ 10 polynucleotides of one of the sequences delineated in column 6 of Table 1C and the 5′ 10 polynucleotides of another sequence in column 6 corresponding to the same row are directly contiguous. In preferred embodiments, the 3′ 10 polynucleotides of one of the sequences delineated in column 6 of Table 1C is directly contiguous with the 5′ 10 polynucleotides of the next sequential exon delineated in Table 1C, column 6. Nucleic acids which hybridize to the complement of these 20 contiguous polynucleotides under stringent hybridization conditions or alternatively, under lower stringency conditions, are also encompassed by the invention. Polypeptides encoded by these polynucleotides and/or nucleic acids, other polynucleotides and/or nucleic acids encoding these polypeptides, and antibodies that bind these polypeptides are also encompassed by the invention. Additionally, fragments and variants of the above-described polynucleotides, nucleic acids, and polypeptides are also encompassed by the invention.

Table 3

[0204] Many polynucleotide sequences, such as EST sequences, are publicly available sand accessible through sequence databases and may have been publicly available prior to conception of the present invention. Preferably, such related polynucleotides are specifically excluded from the scope of the present invention. Accordingly, for each contig sequence (SEQ ID NO:X) listed in the fifth column of Table 1A and/or the fourth column of Table 1B.1, preferably excluded are one or more polynucleotides comprising a nucleotide sequence described by the general formula of a-b, where a is any integer between 1 and the final nucleotide minus 15 of SEQ ID NO:X, b is an integer of 15 to the final nucleotide of SEQ ID NO:X, where both a and b correspond to the positions of nucleotide residues shown in SEQ ID NO:X, and where b is greater than or equal to a+14. More specifically, preferably excluded are one or more polynucleotides comprising a nucleotide sequence described by the general formula of a-b, where a and b are integers as defined in columns 4 and 5, respectively, of Table 3. In specific embodiments, the polynucleotides of the invention do not consist of at least one, two, three, four, five, ten, or more of the specific polynucleotide sequences referenced by the Genbank Accession No. as disclosed in column 6 of Table 3 (including for example, published sequence in connection with a particular BAC clone). In further embodiments, preferably excluded from the invention are the specific polynucleotide sequence(s) contained in the clones corresponding to at least one, two, three, four, five, ten, or more of the available material having the accession numbers identified in the sixth column of this Table (including for example, the actual sequence contained in an identified BAC clone). In no way is this listing meant to encompass all of the sequences which may be excluded by the general formula, it is just a representative example. All references available through these accessions are hereby incorporated by reference in their entirety.

LENGTHY TABLE REFERENCED HERE
US20070015271A1-20070118-T00005
Please refer to the end of the specification for access instructions.

Description of Table 4

[0205] Table 4 provides a key to the tissue/cell source identifier code disclosed in Table 1B.2, column 5. Column 1 of Table 4 provides the tissue/cell source identifier code disclosed in Table 1B.2, Column 5. Columns 2-5 provide a description of the tissue or cell source. Note that “Description” and “Tissue” sources (i.e. columns 2 and 3) having the prefix “a indicates organs, tissues, or cells derived from “adult” sources. Codes corresponding to diseased tissues are indicated in column 6 with the word “disease.” The use of the word “disease” in column 6 is non-limiting. The tissue or cell source may be specific (e.g. a neoplasm), or may be disease-associated (e.g., a tissue sample from a normal portion of a diseased organ). Furthermore, tissues and/or cells lacking the “disease” designation may still be derived from sources directly or indirectly involved in a disease state or disorder, and therefore may have a further utility in that disease state or disorder. In numerous cases where the tissue/cell source is a library, column 7 identifies the vector used to generate the library.

TABLE 4

| | | | | | | |
|---|---|---|---|---|---|---|
| Code | Description | Tissue | Organ | Cell Line | Disease | Vector |

| | | | | | | |
|---|---|---|---|---|---|---|
| AR022 | a_Heart | a_Heart | | | | |
| AR023 | a_Liver | a_Liver | | | | |
| AR024 | a_mammary gland | a_mammary gland | | | | |
| AR025 | a_Prostate | a_Prostate | | | | |
| AR026 | a_small intestine | a_small intestine | | | | |
| AR027 | a_Stomach | a_Stomach | | | | |
| AR028 | Blood B cells | Blood B cells | | | | |
| AR029 | Blood B cells activated | Blood B cells | | | | |
| | | activated | | | | |
| AR030 | Blood B cells resting | Blood B cells | | | | |
| | | resting | | | | |
| AR031 | Blood T cells activated | Blood T cells | | | | |
| | | activated | | | | |
| AR032 | Blood T cells resting | Blood T cells resting | | | | |
| AR033 | brain | brain | | | | |
| AR034 | breast | breast | | | | |
| AR035 | breast cancer | breast cancer | | | | |
| AR036 | Cell Line CAOV3 | Cell Line CAOV3 | | | | |
| AR037 | cell line PA-1 | cell line PA-1 | | | | |
| AR038 | cell line transformed | cell line transformed | | | | |
| AR039 | colon | colon | | | | |
| AR040 | colon (9808co65R) | colon (9808co65R) | | | | |
| AR041 | colon (9809co15) | colon (9809co15) | | | | |
| AR042 | colon cancer | colon cancer | | | | |
| AR043 | colon cancer (9808co64R) | colon cancer | | | | |
| | | (9808co64R) | | | | |
| AR044 | colon cancer 9809co14 | colon cancer | | | | |
| | | 9809co14 | | | | |
| AR045 | corn clone 5 | corn clone 5 | | | | |
| AR046 | corn clone 6 | corn clone 6 | | | | |
| AR047 | corn clone2 | corn clone2 | | | | |
| AR048 | corn clone3 | corn clone3 | | | | |
| AR049 | Corn Clone4 | Corn Clone4 | | | | |
| AR050 | Donor II B Cells 24 hrs | Donor II B Cells | | | | |
| | | 24 hrs | | | | |
| AR051 | Donor II B Cells 72 hrs | Donor II B Cells | | | | |
| | | 72 hrs | | | | |
| AR052 | Donor II B-Cells 24 hrs. | Donor II B-Cells | | | | |
| | | 24 hrs. | | | | |
| AR053 | Donor II B-Cells 72 hrs | Donor II B-Cells | | | | |
| | | 72 hrs | | | | |
| AR054 | Donor II Resting B Cells | Donor II Resting B | | | | |
| | | Cells | | | | |
| AR055 | Heart | Heart | | | | |
| AR056 | Human Lung (clonetech) | Human Lung | | | | |
| | | (clonetech) | | | | |
| AR057 | Human Mammary | Human Mammary | | | | |
| | (clontech) | (clontech) | | | | |
| AR058 | Human Thymus | Human Thymus | | | | |
| | (clonetech) | (clonetech) | | | | |
| AR059 | Jurkat (unstimulated) | Jurkat | | | | |
| | | (unstimulated) | | | | |
| AR060 | Kidney | Kidney | | | | |
| AR061 | Liver | Liver | | | | |
| AR062 | Liver (Clontech) | Liver (Clontech) | | | | |
| AR063 | Lymphocytes chronic | Lymphocytes | | | | |
| | lymphocytic leukaemia | chronic lymphocytic | | | | |
| | | leukaemia | | | | |
| AR064 | Lymphocytes diffuse large | Lymphocytes | | | | |
| | B cell lymphoma | diffuse large B cell | | | | |
| | | lymphoma | | | | |
| AR065 | Lymphocytes follicular | Lymphocytes | | | | |
| | lymphoma | follicular lymphoma | | | | |
| AR066 | normal breast | normal breast | | | | |
| AR067 | Normal Ovarian | Normal Ovarian | | | | |
| | (4004901) | (4004901) | | | | |
| AR068 | Normal Ovary 9508G045 | Normal Ovary | | | | |
| | | 9508G045 | | | | |
| AR069 | Normal Ovary 9701G208 | Normal Ovary | | | | |
| | | 9701G208 | | | | |
| AR070 | Normal Ovary 9806G005 | Normal Ovary | | | | |
| | | 9806G005 | | | | |
| AR071 | Ovarian Cancer | Ovarian Cancer | | | | |
| AR072 | Ovarian Cancer | Ovarian Cancer | | | | |
| | (9702G001) | (9702G001) | | | | |
| AR073 | Ovarian Cancer | Ovarian Cancer | | | | |
| | (9707G029) | (9707G029) | | | | |
| AR074 | Ovarian Cancer | Ovarian Cancer | | | | |
| | (9804G011) | (9804G011) | | | | |
| AR075 | Ovarian Cancer | Ovarian Cancer | | | | |
| | (9806G019) | (9806G019) | | | | |
| AR076 | Ovarian Cancer | Ovarian Cancer | | | | |
| | (9807G017) | (9807G017) | | | | |
| AR077 | Ovarian Cancer | Ovarian Cancer | | | | |
| | (9809G001) | (9809G001) | | | | |
| AR078 | ovarian cancer 15799 | ovarian cancer | | | | |
| | | 15799 | | | | |
| AR079 | Ovarian Cancer | Ovarian Cancer | | | | |
| | 17717AID | 17717AID | | | | |
| AR080 | Ovarian Cancer | Ovarian Cancer | | | | |
| | 4004664B1 | 4004664B1 | | | | |
| AR081 | Ovarian Cancer | Ovarian Cancer | | | | |
| | 4005315A1 | 4005315A1 | | | | |
| AR082 | ovarian cancer 94127303 | ovarian cancer | | | | |
| | | 94127303 | | | | |
| AR083 | Ovarian Cancer 96069304 | Ovarian Cancer | | | | |
| | | 96069304 | | | | |
| AR084 | Ovarian Cancer 9707G029 | Ovarian Cancer | | | | |
| | | 9707G029 | | | | |
| AR085 | Ovarian Cancer 9807G045 | Ovarian Cancer | | | | |
| | | 9807G045 | | | | |
| AR086 | ovarian cancer 9809G001 | ovarian cancer | | | | |
| | | 9809G001 | | | | |
| AR087 | Ovarian Cancer | Ovarian Cancer | | | | |
| | 9905C032RC | 9905C032RC | | | | |
| AR088 | Ovarian cancer 9907 C00 | Ovarian cancer 9907 | | | | |
| | 3rd | C00 3rd | | | | |
| AR089 | Prostate | Prostate | | | | |
| AR090 | Prostate (clonetech) | Prostate (clonetech) | | | | |
| AR091 | prostate cancer | prostate cancer | | | | |
| AR092 | prostate cancer #15176 | prostate cancer | | | | |
| | | #15176 | | | | |
| AR093 | prostate cancer #15509 | prostate cancer | | | | |
| | | #15509 | | | | |
| AR094 | prostate cancer #15673 | prostate cancer | | | | |
| | | #15673 | | | | |
| AR095 | Small Intestine (Clontech) | Small Intestine | | | | |
| | | (Clontech) | | | | |
| AR096 | Spleen | Spleen | | | | |
| AR097 | Thymus T cells activated | Thymus T cells | | | | |
| | | activated | | | | |
| AR098 | Thymus T cells resting | Thymus T cells | | | | |
| | | resting | | | | |
| AR099 | Tonsil | Tonsil | | | | |
| AR100 | Tonsil geminal center | Tonsil geminal | | | | |
| | centroblast | center centroblast | | | | |
| AR101 | Tonsil germinal center B | Tonsil germinal | | | | |
| | cell | center B cell | | | | |
| AR102 | Tonsil lymph node | Tonsil lymph node | | | | |
| AR103 | Tonsil memory B cell | Tonsil memory B | | | | |
| | | cell | | | | |
| AR104 | Whole Brain | Whole Brain | | | | |
| AR105 | Xenograft ES-2 | Xenograft ES-2 | | | | |
| AR106 | Xenograft SW626 | Xenograft SW626 | | | | |
| AR119 | 001: IL-2 | 001: IL-2 | | | | |
| AR120 | 001: IL-2.1 | 001: IL-2.1 | | | | |
| AR121 | 001: IL-2_b | 001: IL-2_b | | | | |
| AR124 | 002: Monocytes untreated | 002: Monocytes | | | | |
| | (1 hr) | untreated (1 hr) | | | | |
| AR125 | 002: Monocytes untreated | 002: Monocytes | | | | |
| | (5 hrs) | untreated (5 hrs) | | | | |
| AR126 | 002: Control.1C | 002: Control.1C | | | | |
| AR127 | 002: IL2.1C | 002: IL2.1C | | | | |
| AR130 | 003: Placebo-treated Rat | 003: Placebo- | | | | |
| | Lacrimal Gland | treated Rat Lacrimal | | | | |
| | | Gland | | | | |
| AR131 | 003: Placebo-treated Rat | 003: Placebo- | | | | |
| | Submandibular Gland | treated Rat | | | | |
| | | Submandibular | | | | |
| | | Gland | | | | |
| AR135 | 004: Monocytes untreated | 004: Monocytes | | | | |
| | (5 hrs) | untreated (5 hrs) | | | | |
| AR136 | 004: Monocytes untreated | 004: Monocytes | | | | |
| | 1 hr | untreated 1 hr | | | | |
| AR139 | 005: Placebo (48 hrs) | 005: Placebo (48 hrs) | | | | |
| AR140 | 006: pC4 (24 hrs) | 006: pC4 (24 hrs) | | | | |
| AR141 | 006: pC4 (48 hrs) | 006: pC4 (48 hrs) | | | | |
| AR152 | 007: PHA (1 hr) | 007: PHA (1 hr) | | | | |
| AR153 | 007: PHA (6 HRS) | 007: PHA (6 HRS) | | | | |
| AR154 | 007: PMA (6 hrs) | 007: PMA (6 hrs) | | | | |
| AR155 | 008: 1449_#2 | 008: 1449_#2 | | | | |
| AR161 | 01: A - max 24 | 01: A - max 24 | | | | |
| AR162 | 01: A - max 26 | 01: A - max 26 | | | | |
| AR163 | 01: A - max 30 | 01: A - max 30 | | | | |
| AR164 | 01: B - max 24 | 01: B - max 24 | | | | |
| AR165 | 01: B - max 26 | 01: B - max 26 | | | | |
| AR166 | 01: B - max 30 | 01: B - max 30 | | | | |
| AR167 | 1449 Sample | 1449 Sample | | | | |
| AR168 | 3T3P10 1.0 uM insulin | 3T3P10 1.0 uM | | | | |
| | | insulin | | | | |
| AR169 | 3T3P10 10 nM Insulin | 3T3P10 10 nM | | | | |
| | | Insulin | | | | |
| AR170 | 3T3P10 10 uM insulin | 3T3P10 10 uM | | | | |
| | | insulin | | | | |
| AR171 | 3T3P10 No Insulin | 3T3P10 No Insulin | | | | |
| AR172 | 3T3P4 | 3T3P4 | | | | |
| AR173 | Adipose (41892) | Adipose (41892) | | | | |
| AR174 | Adipose Diabetic (41611) | Adipose Diabetic | | | | |
| | | (41611) | | | | |
| AR175 | Adipose Diabetic (41661) | Adipose Diabetic | | | | |
| | | (41661) | | | | |
| AR176 | Adipose Diabetic (41689) | Adipose Diabetic | | | | |
| | | (41689) | | | | |
| AR177 | Adipose Diabetic (41706) | Adipose Diabetic | | | | |
| | | (41706) | | | | |
| AR178 | Adipose Diabetic (42352) | Adipose Diabetic | | | | |
| | | (42352) | | | | |
| AR179 | Adipose Diabetic (42366) | Adipose Diabetic | | | | |
| | | (42366) | | | | |
| AR180 | Adipose Diabetic (42452) | Adipose Diabetic | | | | |
| | | (42452) | | | | |
| AR181 | Adipose Diabetic (42491) | Adipose Diabetic | | | | |
| | | (42491) | | | | |
| AR182 | Adipose Normal (41843) | Adipose Normal | | | | |
| | | (41843) | | | | |
| AR183 | Adipose Normal (41893) | Adipose Normal | | | | |
| | | (41893) | | | | |
| AR184 | Adipose Normal (42452) | Adipose Normal | | | | |
| | | (42452) | | | | |
| AR185 | Adrenal Gland | Adrenal Gland | | | | |
| AR186 | Adrenal Gland + Whole | Adrenal Gland + | | | | |
| | Brain | Whole Brain | | | | |
| AR187 | B7(1 hr)+ (inverted) | B7(1 hr)+ | | | | |
| | | (inverted) | | | | |
| AR188 | Breast (18275A2B) | Breast (18275A2B) | | | | |
| AR189 | Breast (4004199) | Breast (4004199) | | | | |
| AR190 | Breast (4004399) | Breast (4004399) | | | | |
| AR191 | Breast (4004943B7) | Breast (4004943B7) | | | | |
| AR192 | Breast (4005570B1) | Breast (4005570B1) | | | | |
| AR193 | Breast Cancer | Breast Cancer | | | | |
| | (4004127A30) | (4004127A30) | | | | |
| AR194 | Breast Cancer | Breast Cancer | | | | |
| | (400443A21) | (400443A21) | | | | |
| AR195 | Breast Cancer | Breast Cancer | | | | |
| | (4004643A2) | (4004643A2) | | | | |
| AR196 | Breast Cancer | Breast Cancer | | | | |
| | (4004710A7) | (4004710A7) | | | | |
| AR197 | Breast Cancer | Breast Cancer | | | | |
| | (4004943A21) | (4004943A21) | | | | |
| AR198 | Breast Cancer (400553A2) | Breast Cancer | | | | |
| | | (400553A2) | | | | |
| AR199 | Breast Cancer | Breast Cancer | | | | |
| | (9805C046R) | (9805C046R) | | | | |
| AR200 | Breast Cancer | Breast Cancer | | | | |
| | (9806C012R) | (9806C012R) | | | | |
| AR201 | Breast Cancer (ODQ45913) | Breast Cancer | | | | |
| | | (ODQ45913) | | | | |
| AR202 | Breast Cancer | Breast Cancer | | | | |
| | (ODQ45913) | (ODQ45913) | | | | |
| AR203 | Breast Cancer | Breast Cancer | | | | |
| | (ODQ4591B) | (ODQ4591B) | | | | |
| AR204 | Colon Cancer (15663) | Colon Cancer | | | | |
| | | (15663) | | | | |
| AR205 | Colon Cancer | Colon Cancer | | | | |
| | (4005144A4) | (4005144A4) | | | | |
| AR206 | Colon Cancer | Colon Cancer | | | | |
| | (4005413A4) | (4005413A4) | | | | |
| AR207 | Colon Cancer | Colon Cancer | | | | |
| | (4005570B1) | (4005570B1) | | | | |
| AR208 | Control RNA #1 | Control RNA #1 | | | | |
| AR209 | Control RNA #2 | Control RNA #2 | | | | |
| AR210 | Cultured Preadipocyte | Cultured | | | | |
| | (blue) | Preadipocyte (blue) | | | | |
| AR211 | Cultured Preadipocyte | Cultured | | | | |
| | (Red) | Preadipocyte (Red) | | | | |
| AR212 | Donor II B-Cells 24 hrs | Donor II B-Cells | | | | |
| | | 24 hrs | | | | |
| AR213 | Donor II Resting B-Cells | Donor II Resting B- | | | | |
| | | Cells | | | | |
| AR214 | H114EP12 10 nM Insulin | H114EP12 10 nM | | | | |
| | | Insulin | | | | |
| AR215 | H114EP12 (10 nM insulin) | H114EP12 (10 nM | | | | |
| | | insulin) | | | | |
| AR216 | H114EP12 (2.6 ug/ul) | H114EP12 | | | | |
| | | (2.6 ug/ul) | | | | |
| AR217 | H114EP12 (3.6 ug/ul) | H114EP12 | | | | |
| | | (3.6 ug/ul) | | | | |
| AR218 | HUVEC #1 | HUVEC #1 | | | | |
| AR219 | HUVEC #2 | HUVEC #2 | | | | |
| AR221 | L6 undiff. | L6 undiff. | | | | |
| AR222 | L6 Undifferentiated | L6 Undifferentiated | | | | |
| AR223 | L6P8 + 10 nM Insulin | L6P8 + 10 nM | | | | |
| | | Insulin | | | | |
| AR224 | L6P8 + HS | L6P8 + HS | | | | |
| AR225 | L6P8 10 nM Insulin | L6P8 10 nM Insulin | | | | |
| AR226 | Liver (00-06-A007B) | Liver (00-06- | | | | |
| | | A007B) | | | | |
| AR227 | Liver (96-02-A075) | Liver (96-02-A075) | | | | |
| AR228 | Liver (96-03-A144) | Liver (96-03-A144) | | | | |
| AR229 | Liver (96-04-A138) | Liver (96-04-A138) | | | | |
| AR230 | Liver (97-10-A074B) | Liver (97-10- | | | | |
| | | A074B) | | | | |
| AR231 | Liver (98-09-A242A) | Liver (98-09- | | | | |
| | | A242A) | | | | |
| AR232 | Liver Diabetic (1042) | Liver Diabetic | | | | |
| | | (1042) | | | | |
| AR233 | Liver Diabetic (41616) | Liver Diabetic | | | | |
| | | (41616) | | | | |
| AR234 | Liver Diabetic (41955) | Liver Diabetic | | | | |
| | | (41955) | | | | |
| AR235 | Liver Diabetic (42352R) | Liver Diabetic | | | | |
| | | (42352R) | | | | |
| AR236 | Liver Diabetic (42366) | Liver Diabetic | | | | |
| | | (42366) | | | | |
| AR237 | Liver Diabetic (42483) | Liver Diabetic | | | | |
| | | (42483) | | | | |
| AR238 | Liver Diabetic (42491) | Liver Diabetic | | | | |
| | | (42491) | | | | |
| AR239 | Liver Diabetic (99-09- | Liver Diabetic (99- | | | | |
| | A281A) | 09-A281A) | | | | |
| AR240 | Lung | Lung | | | | |
| AR241 | Lung (27270) | Lung (27270) | | | | |
| AR242 | Lung (2727Q) | Lung (2727Q) | | | | |
| AR243 | Lung Cancer | Lung Cancer | | | | |
| | (4005116A1) | (4005116A1) | | | | |
| AR244 | Lung Cancer | Lung Cancer | | | | |
| | (4005121A5) | (4005121A5) | | | | |
| AR245 | Lung Cancer | Lung Cancer | | | | |
| | (4005121A5)) | (4005121A5)) | | | | |
| AR246 | Lung Cancer | Lung Cancer | | | | |
| | (4005340A4) | (4005340A4) | | | | |
| AR247 | Mammary Gland | Mammary Gland | | | | |
| AR248 | Monocyte (CT) | Monocyte (CT) | | | | |
| AR249 | Monocyte (OCT) | Monocyte (OCT) | | | | |
| AR250 | Monocytes (CT) | Monocytes (CT) | | | | |
| AR251 | Monocytes (INFG 18 hr) | Monocytes (INFG | | | | |
| | | 18 hr) | | | | |
| AR252 | Monocytes (INFG 18 hr) | Monocytes (INFG | | | | |
| | | 18 hr) | | | | |
| AR253 | Monocytes (INFG 8-11) | Monocytes (INFG | | | | |
| | | 8-11) | | | | |
| AR254 | Monocytes (O CT) | Monocytes (O CT) | | | | |
| AR255 | Muscle (91-01-A105) | Muscle (91-01- | | | | |
| | | A105) | | | | |
| AR256 | Muscle (92-04-A059) | Muscle (92-04- | | | | |
| | | A059) | | | | |
| AR257 | Muscle (97-11-A056d) | Muscle (97-11- | | | | |
| | | A056d) | | | | |
| AR258 | Muscle (99-06-A210A) | Muscle (99-06- | | | | |
| | | A210A) | | | | |
| AR259 | Muscle (99-07-A203B) | Muscle (99-07- | | | | |
| | | A203B) | | | | |
| AR260 | Muscle (99-7-A203B) | Muscle (99-7- | | | | |
| | | A203B) | | | | |
| AR261 | Muscle Diabetic (42352R) | Muscle Diabetic | | | | |
| | | (42352R) | | | | |
| AR262 | Muscle Diabetic (42366) | Muscle Diabetic | | | | |
| | | (42366) | | | | |
| AR263 | NK-19 Control | NK-19 Control | | | | |
| AR264 | NK-19 IL Treated 72 hrs | NK-19 IL Treated | | | | |
| | | 72 hrs | | | | |
| AR265 | NK-19 UK Treated 72 hrs. | NK-19 UK Treated | | | | |
| | | 72 hrs. | | | | |
| AR266 | Omentum Normal (94-08- | Omentum Normal | | | | |
| | B009) | (94-08-B009) | | | | |
| AR267 | Omentum Normal (97-01- | Omentum Normal | | | | |
| | A039A) | (97-01-A039A) | | | | |
| AR268 | Omentum Normal (97-04- | Omentum Normal | | | | |
| | A114C) | (97-04-A114C) | | | | |
| AR269 | Omentum Normal (97-06- | Omentum Normal | | | | |
| | A117C) | (97-06-A117C) | | | | |
| AR270 | Omentum Normal (97-09- | Omentum Normal | | | | |
| | B004C) | (97-09-B004C) | | | | |
| AR271 | Ovarian Cancer | Ovarian Cancer | | | | |
| | (17717AID) | (17717AID) | | | | |
| AR272 | Ovarian Cancer | Ovarian Cancer | | | | |
| | (9905C023RC) | (9905C023RC) | | | | |
| AR273 | Ovarian Cancer | Ovarian Cancer | | | | |
| | (9905C032RC) | (9905C032RC) | | | | |
| AR274 | Ovary (9508G045) | Ovary (9508G045) | | | | |
| AR275 | Ovary (9701G208) | Ovary (9701G208) | | | | |
| AR276 | Ovary 9806G005 | Ovary 9806G005 | | | | |
| AR277 | Pancreas | Pancreas | | | | |
| AR278 | Placebo | Placebo | | | | |
| AR279 | rIL2 Control | rIL2 Control | | | | |
| AR280 | RSS288L | RSS288L | | | | |
| AR281 | RSS288LC | RSS288LC | | | | |
| AR282 | Salivary Gland | Salivary Gland | | | | |
| AR283 | Skeletal Muscle | Skeletal Muscle | | | | |
| AR284 | Skeletal Muscle (91-01- | Skeletal Muscle | | | | |
| | A105) | (91-01-A105) | | | | |
| AR285 | Skeletal Muscle (42180) | Skeletal Muscle | | | | |
| | | (42180) | | | | |
| AR286 | Skeletal Muscle (42386) | Skeletal Muscle | | | | |
| | | (42386) | | | | |
| AR287 | Skeletal Muscle (42461) | Skeletal Muscle | | | | |
| | | (42461) | | | | |
| AR288 | Skeletal Muscle (91-01- | Skeletal Muscle (91- | | | | |
| | A105) | 01-A105) | | | | |
| AR289 | Skeletal Muscle (92-04- | Skeletal Muscle (92- | | | | |
| | A059) | 04-A059) | | | | |
| AR290 | Skeletal Muscle (96-08- | Skeletal Muscle (96- | | | | |
| | A171) | 08-A171) | | | | |
| AR291 | Skeletal Muscle (97-07- | Skeletal Muscle (97- | | | | |
| | A190A) | 07-A190A) | | | | |
| AR292 | Skeletal Muscle Diabetic | Skeletal Muscle | | | | |
| | (42352) | Diabetic (42352) | | | | |
| AR293 | Skeletal Muscle Diabetic | Skeletal Muscle | | | | |
| | (42366) | Diabetic (42366) | | | | |
| AR294 | Skeletal Muscle Diabetic | Skeletal Muscle | | | | |
| | (42395) | Diabetic (42395) | | | | |
| AR295 | Skeletal Muscle Diabetic | Skeletal Muscle | | | | |
| | (42483) | Diabetic (42483) | | | | |
| AR296 | Skeletal Muscle Diabetic | Skeletal Muscle | | | | |
| | (42491) | Diabetic (42491) | | | | |
| AR297 | Skeletal Muscle Diabetic | Skeletal Muscle | | | | |
| | 42352 | Diabetic 42352 | | | | |
| AR298 | Skeletal Musle (42461) | Skeletal Musle | | | | |
| | | (42461) | | | | |
| AR299 | Small Intestine | Small Intestine | | | | |
| AR300 | Stomach | Stomach | | | | |
| AR301 | T-Cell + HDPBQ71.fc | T-Cell + HDPBQ71.fc | | | | |
| | 1449 16 hrs | 1449 | | | | |
| | | 16 hrs | | | | |
| AR302 | T-Cell + HDPBQ71.fc | T-Cell + HDPBQ71.fc | | | | |
| | 1449 6 hrs | 1449 | | | | |
| | | 6 hrs | | | | |
| AR303 | T-Cell + IL2 16 hrs | T-Cell + IL2 16 hrs | | | | |
| AR304 | T-Cell + IL2 6 hrs | T-Cell + IL2 6 hrs | | | | |
| AR306 | T-Cell Untreated 16 hrs | T-Cell Untreated | | | | |
| | | 16 hrs | | | | |
| AR307 | T-Cell Untreated 6 hrs | T-Cell Untreated | | | | |
| | | 6 hrs | | | | |
| AR308 | T-Cells 24 hours | T-Cells 24 hours | | | | |
| AR309 | T-Cells 24 hrs | T-Cells 24 hrs | | | | |
| AR310 | T-Cells 24 hrs. | T-Cells 24 hrs. | | | | |
| AR311 | T-Cells 24 hrs | T-Cells 24 hrs | | | | |
| AR312 | T-Cells 4 days | T-Cells 4 days | | | | |
| AR313 | Thymus | Thymus | | | | |
| AR314 | TRE | TRE | | | | |
| AR315 | TREC | TREC | | | | |
| AR316 | Virtual Mixture | Virtual Mixture | | | | |
| H0002 | Human Adult Heart | Human Adult Heart | Heart | | | Uni-ZAP |
| | | | | | | XR |
| H0003 | Human Adult Liver | Human Adult Liver | Liver | | | Uni-ZAP |
| | | | | | | XR |
| H0004 | Human Adult Spleen | Human Adult | Spleen | | | Uni-ZAP |
| | | Spleen | | | | XR |
| H0006 | Human Frontal Lobe of | | | | | Uni-ZAP |
| | Brain | | | | | XR |
| H0007 | Human Cerebellum | Human Cerebellum | Brain | | | Uni-ZAP |
| | | | | | | XR |
| H0008 | Whole 6 Week Old | | | | | Uni-ZAP |
| | Embryo | | | | | XR |
| H0009 | Human Fetal Brain | | | | | Uni-ZAP |
| | | | | | | XR |
| H0011 | Human Fetal Kidney | Human Fetal Kidney | Kidney | | | Uni-ZAP |
| | | | | | | XR |
| H0012 | Human Fetal Kidney | Human Fetal Kidney | Kidney | | | Uni-ZAP |
| | | | | | | XR |
| H0013 | Human 8 Week Whole | Human 8 Week Old | Embryo | | | Uni-ZAP |
| | Embryo | Embryo | | | | XR |
| H0014 | Human Gall Bladder | Human Gall Bladder | Gall Bladder | | | Uni-ZAP |
| | | | | | | XR |
| H0015 | Human Gall Bladder, | Human Gall Bladder | Gall Bladder | | | Uni-ZAP |
| | fraction II | | | | | XR |
| H0016 | Human Greater Omentum | Human Greater | peritoneum | | | Uni-ZAP |
| | | Omentum | | | | XR |
| H0017 | Human Greater Omentum | Human Greater | peritoneum | | | Uni-ZAP |
| | | Omentum | | | | XR |
| H0018 | Human Greater Omentum, | Human Greater | peritoneum | | | Uni-ZAP |
| | fII remake | Omentum | | | | XR |
| H0019 | Human Fetal Heart | Human Fetal Heart | Heart | | | pBluescript |
| H0020 | Human Hippocampus | Human | Brain | | | Uni-ZAP |
| | | Hippocampus | | | | XR |
| H0021 | Human Infant Adrenal | Human Infant | Adrenal | | | Uni-ZAP |
| | Gland | Adrenal Gland | gland | | | XR |
| H0022 | Jurkat Cells | Jurkat T-Cell Line | | | | Lambda |
| | | | | | | ZAP II |
| H0023 | Human Fetal Lung | | | | | Uni-ZAP |
| | | | | | | XR |
| H0024 | Human Fetal Lung III | Human Fetal Lung | Lung | | | Uni-ZAP |
| | | | | | | XR |
| H0025 | Human Adult Lymph | Human Adult | Lymph Node | | | Lambda |
| | Node | Lymph Node | | | | ZAP II |
| H0026 | Namalwa Cells | Namalwa B-Cell | | | | Lambda |
| | | Line, EBV | | | | ZAP II |
| | | immortalized | | | | |
| H0028 | Human Old Ovary | Human Old Ovary | Ovary | | | pBluescript |
| H0029 | Human Pancreas | Human Pancreas | Pancreas | | | Uni-ZAP |
| | | | | | | XR |
| H0030 | Human Placenta | | | | | Uni-ZAP |
| | | | | | | XR |
| H0031 | Human Placenta | Human Placenta | Placenta | | | Uni-ZAP |
| | | | | | | XR |
| H0032 | Human Prostate | Human Prostate | Prostate | | | Uni-ZAP |
| | | | | | | XR |
| H0033 | Human Pituitary | Human Pituitary | | | | Uni-ZAP |
| | | | | | | XR |
| H0034 | Human Parathyroid | Human Parathyroid | Parathyroid | | disease | Uni-ZAP |
| | Tumor | Tumor | | | | XR |
| H0036 | Human Adult Small | Human Adult Small | Small Int. | | | Uni-ZAP |
| | Intestine | Intestine | | | | XR |
| H0037 | Human Adult Small | Human Adult Small | Small Int. | | | pBluescript |
| | Intestine | Intestine | | | | |
| H0038 | Human Testes | Human Testes | Testis | | | Uni-ZAP |
| | | | | | | XR |
| H0039 | Human Pancreas Tumor | Human Pancreas | Pancreas | | disease | Uni-ZAP |
| | | Tumor | | | | XR |
| H0040 | Human Testes Tumor | Human Testes | Testis | | disease | Uni-ZAP |
| | | Tumor | | | | XR |
| H0041 | Human Fetal Bone | Human Fetal Bone | Bone | | | Uni-ZAP |
| | | | | | | XR |
| H0042 | Human Adult Pulmonary | Human Adult | Lung | | | Uni-ZAP |
| | | Pulmonary | | | | XR |
| H0044 | Human Cornea | Human Cornea | eye | | | Uni-ZAP |
| | | | | | | XR |
| H0045 | Human Esophagus, | Human Esophagus, | Esophagus | | disease | Uni-ZAP |
| | Cancer | cancer | | | | XR |
| H0046 | Human Endometrial | Human Endometrial | Uterus | | disease | Uni-ZAP |
| | Tumor | Tumor | | | | XR |
| H0047 | Human Fetal Liver | Human Fetal Liver | Liver | | | Uni-ZAP |
| | | | | | | XR |
| H0048 | Human Pineal Gland | Human Pineal Gland | | | | Uni-ZAP |
| | | | | | | XR |
| H0049 | Human Fetal Kidney | Human Fetal Kidney | Kidney | | | Uni-ZAP |
| | | | | | | XR |
| H0050 | Human Fetal Heart | Human Fetal Heart | Heart | | | Uni-ZAP |
| | | | | | | XR |
| H0051 | Human Hippocampus | Human | Brain | | | Uni-ZAP |
| | | Hippocampus | | | | XR |
| H0052 | Human Cerebellum | Human Cerebellum | Brain | | | Uni-ZAP |
| | | | | | | XR |
| H0053 | Human Adult Kidney | Human Adult | Kidney | | | Uni-ZAP |
| | | Kidney | | | | XR |
| H0056 | Human Umbilical Vein, | Human Umbilical | Umbilical | | | Uni-ZAP |
| | Endo. remake | Vein Endothelial | vein | | | XR |
| | | Cells | | | | |
| H0057 | Human Fetal Spleen | | | | | Uni-ZAP |
| | | | | | | XR |
| H0058 | Human Thymus Tumor | Human Thymus | Thymus | | disease | Lambda |
| | | Tumor | | | | ZAP II |
| H0059 | Human Uterine Cancer | Human Uterine | Uterus | | disease | Lambda |
| | | Cancer | | | | ZAP II |
| H0060 | Human Macrophage | Human Macrophage | Blood | Cell Line | | pBluescript |
| H0061 | Human Macrophage | Human Macrophage | Blood | Cell Line | | pBluescript |
| H0062 | Human Thymus | Human Thymus | Thymus | | | Uni-ZAP |
| | | | | | | XR |
| H0063 | Human Thymus | Human Thymus | Thymus | | | Uni-ZAP |
| | | | | | | XR |
| H0064 | Human Right Hemisphere | Human Brain, right | Brain | | | Uni-ZAP |
| | of Brain | hemisphere | | | | XR |
| H0065 | Human Esophagus, | Human Esophagus, | Esophagus | | | Uni-ZAP |
| | Normal | normal | | | | XR |
| H0067 | Human left hemisphere, | Human Left | Brain | | | Lambda |
| | adult | Hemisphere, Adult | | | | ZAP II |
| H0068 | Human Skin Tumor | Human Skin Tumor | Skin | | disease | Uni-ZAP |
| | | | | | | XR |
| H0069 | Human Activated T-Cells | Activated T-Cells | Blood | Cell Line | | Uni-ZAP |
| | | | | | | XR |
| H0070 | Human Pancreas | Human Pancreas | Pancreas | | | Uni-ZAP |
| | | | | | | XR |
| H0071 | Human Infant Adrenal | Human Infant | Adrenal | | | Uni-ZAP |
| | Gland | Adrenal Gland | gland | | | XR |
| H0075 | Human Activated T-Cells | Activated T-Cells | Blood | Cell Line | | Uni-ZAP |
| | (II) | | | | | XR |
| H0076 | Human Membrane Bound | Human Membrane | Blood | Cell Line | | Uni-ZAP |
| | Polysomes | Bound Polysomes | | | | XR |
| H0078 | Human Lung Cancer | Human Lung Cancer | Lung | | disease | Lambda |
| | | | | | | ZAP II |
| H0079 | Human Whole 7 Week | Human Whole 7 | Embryo | | | Uni-ZAP |
| | Old Embryo (II) | Week Old Embryo | | | | XR |
| H0080 | Human Whole 6 Week | Human Whole Six | Embryo | | | Lambda |
| | Old Embryo (II) | Week Old Embryo | | | | ZAP II |
| H0081 | Human Fetal Epithelium | Human Fetal Skin | Skin | | | Uni-ZAP |
| | (Skin) | | | | | XR |
| H0082 | Human Fetal Muscle | Human Fetal Muscle | Sk Muscle | | | Uni-ZAP |
| | | | | | | XR |
| H0083 | HUMAN JURKAT | Jurkat Cells | | | | Uni-ZAP |
| | MEMBRANE BOUND | | | | | XR |
| | POLYSOMES | | | | | |
| H0084 | Human Namalwa | Namalwa Cells | | | | Uni-ZAP |
| | Membrane Bound | | | | | XR |
| | Polysomes | | | | | |
| H0085 | Human Colon | Human Colon | | | | Lambda |
| | | | | | | ZAP II |
| H0086 | Human epithelioid | Epithelioid | Sk Muscle | | disease | Uni-ZAP |
| | sarcoma | Sarcoma, muscle | | | | XR |
| H0087 | Human Thymus | Human Thymus | | | | pBluescript |
| H0090 | Human T-Cell Lymphoma | T-Cell Lymphoma | T-Cell | | disease | Uni-ZAP |
| | | | | | | XR |
| H0092 | Human Pancreas Tumor | Human Pancreas | Pancreas | | disease | Uni-ZAP |
| | | Tumor | | | | XR |
| H0095 | Human Greater Omentum, | Human Greater | peritoneum | | | Uni-ZAP |
| | RNA Remake | Omentum | | | | XR |
| H0096 | Human Parotid Cancer | Human Parotid | Parotid | | disease | Lambda |
| | | Cancer | | | | ZAP II |
| H0097 | Human Adult Heart, | Human Adult Heart | Heart | | | pBluescript |
| | subtracted | | | | | |
| H0098 | Human Adult Liver, | Human Adult Liver | Liver | | | Uni-ZAP |
| | subtracted | | | | | XR |
| H0099 | Human Lung Cancer, | Human Lung Cancer | Lung | | | pBluescript |
| | subtracted | | | | | |
| H0100 | Human Whole Six Week | Human Whole Six | Embryo | | | Uni-ZAP |
| | Old Embryo | Week Old Embryo | | | | XR |
| H0101 | Human 7 Weeks Old | Human Whole 7 | Embryo | | | Lambda |
| | Embryo, subtracted | Week Old Embryo | | | | ZAP II |
| H0102 | Human Whole 6 Week | Human Whole Six | Embryo | | | pBluescript |
| | Old Embryo (II), subt | Week Old Embryo | | | | |
| H0103 | Human Fetal Brain, | Human Fetal Brain | Brain | | | Uni-ZAP |
| | subtracted | | | | | XR |
| H0105 | Human Fetal Heart, | Human Fetal Heart | Heart | | | pBluescript |
| | subtracted | | | | | |
| H0107 | Human Infant Adrenal | Human Infant | Adrenal | | | pBluescript |
| | Gland, subtracted | Adrenal Gland | gland | | | |
| H0108 | Human Adult Lymph | Human Adult | Lymph Node | | | Uni-ZAP |
| | Node, subtracted | Lymph Node | | | | XR |
| H0109 | Human Macrophage, | Macrophage | Blood | Cell Line | | pBluescript |
| | subtracted | | | | | |
| H0110 | Human Old Ovary, | Human Old Ovary | Ovary | | | pBluescript |
| | subtracted | | | | | |
| H0111 | Human Placenta, | Human Placenta | Placenta | | | pBluescript |
| | subtracted | | | | | |
| H0112 | Human Parathyroid | Human Parathyroid | Parathyroid | | | pBluescript |
| | Tumor, subtracted | Tumor | | | | |
| H0116 | Human Thymus Tumor, | Human Thymus | Thymus | | | pBluescript |
| | subtracted | Tumor | | | | |
| H0118 | Human Adult Kidney | Human Adult | Kidney | | | Uni-ZAP |
| | | Kidney | | | | XR |
| H0119 | Human Pediatric Kidney | Human Pediatric | Kidney | | | Uni-ZAP |
| | | Kidney | | | | XR |
| H0120 | Human Adult Spleen, | Human Adult | Spleen | | | Uni-ZAP |
| | subtracted | Spleen | | | | XR |
| H0121 | Human Cornea, subtracted | Human Cornea | eye | | | Uni-ZAP |
| | | | | | | XR |
| H0122 | Human Adult Skeletal | Human Skeletal | Sk Muscle | | | Uni-ZAP |
| | Muscle | Muscle | | | | XR |
| H0123 | Human Fetal Dura Mater | Human Fetal Dura | Brain | | | Uni-ZAP |
| | | Mater | | | | XR |
| H0124 | Human | Human | Sk Muscle | | disease | Uni-ZAP |
| | Rhabdomyosarcoma | Rhabdomyosarcoma | | | | XR |
| H0125 | Cem cells cyclohexamide | Cyclohexamide | Blood | Cell Line | | Uni-ZAP |
| | treated | Treated Cem, Jurkat, | | | | XR |
| | | Raji, and Supt | | | | |
| H0128 | Jurkat cells, thiouridine | Jurkat Cells | | | | Uni-ZAP |
| | activated | | | | | XR |
| H0130 | LNCAP untreated | LNCAP Cell Line | Prostate | Cell Line | | Uni-ZAP |
| | | | | | | XR |
| H0131 | LNCAP + o.3 nM R1881 | LNCAP Cell Line | Prostate | Cell Line | | Uni-ZAP |
| | | | | | | XR |
| H0132 | LNCAP + 30 nM R1881 | LNCAP Cell Line | Prostate | Cell Line | | Uni-ZAP |
| | | | | | | XR |
| H0134 | Raji Cells, cyclohexamide | Cyclohexamide | Blood | Cell Line | | Uni-ZAP |
| | treated | Treated Cem, Jurkat, | | | | XR |
| | | Raji, and Supt | | | | |
| H0135 | Human Synovial Sarcoma | Human Synovial | Synovium | | | Uni-ZAP |
| | | Sarcoma | | | | XR |
| H0136 | Supt Cells, cyclohexamide | Cyclohexamide | Blood | Cell Line | | Uni-ZAP |
| | treated | Treated Cem, Jurkat, | | | | XR |
| | | Raji, and Supt | | | | |
| H0139 | Activated T-Cells, 4 hrs. | Activated T-Cells | Blood | Cell Line | | Uni-ZAP |
| | | | | | | XR |
| H0140 | Activated T-Cells, 8 hrs. | Activated T-Cells | Blood | Cell Line | | Uni-ZAP |
| | | | | | | XR |
| H0141 | Activated T-Cells, 12 hrs. | Activated T-Cells | Blood | Cell Line | | Uni-ZAP |
| | | | | | | XR |
| H0142 | MCF7 Cell Line | MCF7 Cell line | Breast | Cell Line | | Uni-ZAP |
| | | | | | | XR |
| H0144 | Nine Week Old Early | 9 Wk Old Early | Embryo | | | Uni-ZAP |
| | Stage Human | Stage Human | | | | XR |
| H0147 | Human Adult Liver | Human Adult Liver | Liver | | | Uni-ZAP |
| | | | | | | XR |
| H0149 | 7 Week Old Early Stage | Human Whole 7 | Embryo | | | Uni-ZAP |
| | Human, subtracted | Week Old Embryo | | | | XR |
| H0150 | Human Epididymus | Epididymis | Testis | | | Uni-ZAP |
| | | | | | | XR |
| H0151 | Early Stage Human Liver | Human Fetal Liver | Liver | | | Uni-ZAP |
| | | | | | | XR |
| H0152 | Early Stage Human Liver, | Human Fetal Liver | Liver | | | Uni-ZAP |
| | fract (II) | | | | | XR |
| H0154 | Human Fibrosarcoma | Human Skin | Skin | | disease | Uni-ZAP |
| | | Fibrosarcoma | | | | XR |
| H0155 | Human Thymus, | Human Thymus | Thymus | | | pBluescript |
| | subtracted | Tumor | | | | |
| H0156 | Human Adrenal Gland | Human Adrenal | Adrenal | | disease | Uni-ZAP |
| | Tumor | Gland Tumor | Gland | | | XR |
| H0157 | Activated T-Cells, 0 hrs, | Activated T-Cells | Blood | Cell Line | | Uni-ZAP |
| | ligation 2 | | | | | XR |
| H0158 | Activated T-Cells, 4 hrs., | Activated T-Cells | Blood | Cell Line | | Uni-ZAP |
| | ligation 2 | | | | | XR |
| H0159 | Activated T-Cells, 8 hrs., | Activated T-Cells | Blood | Cell Line | | Uni-ZAP |
| | ligation 2 | | | | | XR |
| H0160 | Activated T-Cells, 12 hrs., | Activated T-Cells | Blood | Cell Line | | Uni-ZAP |
| | ligation 2 | | | | | XR |
| H0161 | Activated T-Cells, 24 hrs., | Activated T-Cells | Blood | Cell Line | | Uni-ZAP |
| | ligation 2 | | | | | XR |
| H0163 | Human Synovium | Human Synovium | Synovium | | | Uni-ZAP |
| | | | | | | XR |
| H0164 | Human Trachea Tumor | Human Trachea | Trachea | | disease | Uni-ZAP |
| | | Tumor | | | | XR |
| H0165 | Human Prostate Cancer, | Human Prostate | Prostate | | disease | Uni-ZAP |
| | Stage B2 | Cancer, stage B2 | | | | XR |
| H0166 | Human Prostate Cancer, | Human Prostate | Prostate | | disease | Uni-ZAP |
| | Stage B2 fraction | Cancer, stage B2 | | | | XR |
| H0167 | Activated T-Cells, 24 hrs. | Activated T-Cells | Blood | Cell Line | | Uni-ZAP |
| | | | | | | XR |
| H0168 | Human Prostate Cancer, | Human Prostate | Prostate | | disease | Uni-ZAP |
| | Stage C | Cancer, stage C | | | | XR |
| H0169 | Human Prostate Cancer, | Human Prostate | Prostate | | disease | Uni-ZAP |
| | Stage C fraction | Cancer, stage C | | | | XR |
| H0170 | 12 Week Old Early Stage | Twelve Week Old | Embryo | | | Uni-ZAP |
| | Human | Early Stage Human | | | | XR |
| H0171 | 12 Week Old Early Stage | Twelve Week Old | Embryo | | | Uni-ZAP |
| | Human, II | Early Stage Human | | | | XR |
| H0172 | Human Fetal Brain, | Human Fetal Brain | Brain | | | Lambda |
| | random primed | | | | | ZAP II |
| H0173 | Human Cardiomyopathy, | Human | Heart | | disease | Uni-ZAP |
| | RNA remake | Cardiomyopathy | | | | XR |
| H0176 | CAMA1Ee Cell Line | CAMA1Ee Cell | Breast | Cell Line | | Uni-ZAP |
| | | Line | | | | XR |
| H0177 | CAMA1Ee Cell Line | CAMA1Ee Cell | Breast | Cell Line | | Uni-ZAP |
| | | Line | | | | XR |
| H0178 | Human Fetal Brain | Human Fetal Brain | Brain | | | Uni-ZAP |
| | | | | | | XR |
| H0179 | Human Neutrophil | Human Neutrophil | Blood | Cell Line | | Uni-ZAP |
| | | | | | | XR |
| H0180 | Human Primary Breast | Human Primary | Breast | | disease | Uni-ZAP |
| | Cancer | Breast Cancer | | | | XR |
| H0181 | Human Primary Breast | Human Primary | Breast | | disease | Uni-ZAP |
| | Cancer | Breast Cancer | | | | XR |
| H0182 | Human Primary Breast | Human Primary | Breast | | disease | Uni-ZAP |
| | Cancer | Breast Cancer | | | | XR |
| H0183 | Human Colon Cancer | Human Colon | Colon | | disease | Uni-ZAP |
| | | Cancer | | | | XR |
| H0184 | Human Colon Cancer, | Human Colon | Liver | | disease | Lambda |
| | metasticized to live | Cancer, metasticized | | | | ZAP II |
| | | to liver | | | | |
| H0185 | Activated T-Cell labeled | T-Cells | Blood | Cell Line | | Lambda |
| | with 4-thioluri | | | | | ZAP II |
| H0187 | Resting T-Cell | T-Cells | Blood | Cell Line | | Lambda |
| | | | | | | ZAP II |
| H0188 | Human Normal Breast | Human Normal | Breast | | | Uni-ZAP |
| | | Breast | | | | XR |
| H0189 | Human Resting | Human | Blood | Cell Line | | Uni-ZAP |
| | Macrophage | Macrophage/ | | | | XR |
| | | Monocytes | | | | |
| H0190 | Human Activated | Human | Blood | Cell Line | | Uni-ZAP |
| | Macrophage (LPS) | Macrophage/ | | | | XR |
| | | Monocytes | | | | |
| H0191 | Human Activated | Human | Blood | Cell Line | | Uni-ZAP |
| | Macrophage (LPS), thiour | Macrophage/ | | | | XR |
| | | Monocytes | | | | |
| H0192 | Cem Cells, cyclohexamide | Cyclohexamide | Blood | Cell Line | | Uni-ZAP |
| | treated, subtra | Treated Cem, Jurkat, | | | | XR |
| | | Raji, and Supt | | | | |
| H0194 | Human Cerebellum, | Human Cerebellum | Brain | | | pBluescript |
| | subtracted | | | | | |
| H0196 | Human Cardiomyopathy, | Human | Heart | | | Uni-ZAP |
| | subtracted | Cardiomyopathy | | | | XR |
| H0197 | Human Fetal Liver, | Human Fetal Liver | Liver | | | Uni-ZAP |
| | subtracted | | | | | XR |
| H0199 | Human Fetal Liver, | Human Fetal Liver | Liver | | | Uni-ZAP |
| | subtracted, neg clone | | | | | XR |
| H0200 | Human Greater Omentum, | Human Greater | peritoneum | | | Uni-ZAP |
| | fract II remake, | Omentum | | | | XR |
| H0201 | Human Hippocampus, | Human | Brain | | | pBluescript |
| | subtracted | Hippocampus | | | | |
| H0202 | Jurkat Cells, | Cyclohexamide | Blood | Cell Line | | Uni-ZAP |
| | cyclohexamide treated, | Treated Cem, Jurkat, | | | | XR |
| | subtraction | Raji, and Supt | | | | |
| H0204 | Human Colon Cancer, | Human Colon | Colon | | | pBluescript |
| | subtracted | Cancer | | | | |
| H0205 | Human Colon Cancer, | Human Colon | Colon | | | pBluescript |
| | differential | Cancer | | | | |
| H0207 | LNCAP, differential | LNCAP Cell Line | Prostate | Cell Line | | pBluescript |
| | expression | | | | | |
| H0208 | Early Stage Human Lung, | Human Fetal Lung | Lung | | | pBluescript |
| | subtracted | | | | | |
| H0209 | Human Cerebellum, | Human Cerebellum | Brain | | | Uni-ZAP |
| | differentially expressed | | | | | XR |
| H0211 | Human | Human Prostate | Prostate | | | pBluescript |
| | Prostate, differential | | | | | |
| | expression | | | | | |
| H0212 | Human Prostate, | Human Prostate | Prostate | | | pBluescript |
| | subtracted | | | | | |
| H0213 | Human Pituitary, | Human Pituitary | | | | Uni-ZAP |
| | subtracted | | | | | XR |
| H0214 | Raji cells, cyclohexamide | Cyclohexamide | Blood | Cell Line | | pBluescript |
| | treated, subtracted | Treated Cem, Jurkat, | | | | |
| | | Raji, and Supt | | | | |
| H0215 | Raji cells, cyclohexamide | Cyclohexamide | Blood | Cell Line | | pBluescript |
| | treated, differentially | Treated Cem, Jurkat, | | | | |
| | expressed | Raji, and Supt | | | | |
| H0216 | Supt cells, cyclohexamide | Cyclohexamide | Blood | Cell Line | | pBluescript |
| | treated, subtracted | Treated Cem, Jurkat, | | | | |
| | | Raji, and Supt | | | | |
| H0217 | Supt cells, cyclohexamide | Cyclohexamide | Blood | Cell Line | | pBluescript |
| | treated, differentially | Treated Cem, Jurkat, | | | | |
| | expressed | Raji, and Supt | | | | |
| H0218 | Activated T-Cells, 0 hrs, | Activated T-Cells | Blood | Cell Line | | Uni-ZAP |
| | subtracted | | | | | XR |
| H0219 | Activated T-Cells, 0 hrs, | Activated T-Cells | Blood | Cell Line | | Uni-ZAP |
| | differentially expressed | | | | | XR |
| H0220 | Activated T-Cells, 4 hrs, | Activated T-Cells | Blood | Cell Line | | Uni-ZAP |
| | subtracted | | | | | XR |
| H0222 | Activated T-Cells, 8 hrs, | Activated T-Cells | Blood | Cell Line | | Uni-ZAP |
| | subtracted | | | | | XR |
| H0223 | Activated T-Cells, 8 hrs, | Activated T-Cells | Blood | Cell Line | | Uni-ZAP |
| | differentially expressed | | | | | XR |
| H0224 | Activated T-Cells, 12 hrs, | Activated T-Cells | Blood | Cell Line | | Uni-ZAP |
| | subtracted | | | | | XR |
| H0225 | Activated T-Cells, 12 hrs, | Activated T-Cells | Blood | Cell Line | | Uni-ZAP |
| | differentially expressed | | | | | XR |
| H0228 | C7MCF7 cell line, | C7MCF7 Cell Line, | Breast | Cell Line | | Uni-ZAP |
| | estrogen treated | estrogen treated | | | | XR |
| H0229 | Early Stage Human Brain, | Early Stage Human | Brain | | | Lambda |
| | random primed | Brain | | | | ZAP II |
| H0230 | Human Cardiomyopathy, | Human | Heart | | disease | Uni-ZAP |
| | diff exp | Cardiomyopathy | | | | XR |
| H0231 | Human Colon, subtraction | Human Colon | | | | pBluescript |
| H0232 | Human Colon, differential | Human Colon | | | | pBluescript |
| | expression | | | | | |
| H0233 | Human Fetal Heart, | Human Fetal Heart | Heart | | | pBluescript |
| | Differential (Adult- | | | | | |
| | Specific) | | | | | |
| H0234 | human colon cancer, | Human Colon | Liver | | | pBluescript |
| | metastatic to liver, | Cancer, metasticized | | | | |
| | differentially expressed | to liver | | | | |
| H0235 | Human colon cancer, | Human Colon | Liver | | | pBluescript |
| | metaticized to liver, | Cancer, metasticized | | | | |
| | subtraction | to liver | | | | |
| H0239 | Human Kidney Tumor | Human Kidney | Kidney | | disease | Uni-ZAP |
| | | Tumor | | | | XR |
| H0240 | C7MCF7 cell line, | C7MCF7 Cell Line, | Breast | Cell Line | | Uni-ZAP |
| | estrogen treated, | estrogen treated | | | | XR |
| | Differential | | | | | |
| H0241 | C7MCF7 cell line, | C7MCF7 Cell Line, | Breast | Cell Line | | Uni-ZAP |
| | estrogen treated, | estrogen treated | | | | XR |
| | subtraction | | | | | |
| H0242 | Human Fetal Heart, | Human Fetal Heart | Heart | | | pBluescript |
| | Differential (Fetal- | | | | | |
| | Specific) | | | | | |
| H0244 | Human 8 Week Whole | Human 8 Week Old | Embryo | | | Uni-ZAP |
| | Embryo, subtracted | Embryo | | | | XR |
| H0245 | Human 8 Week Whole | Human 8 Week Old | Embryo | | | Uni-ZAP |
| | Embryo, differential | Embryo | | | | XR |
| H0246 | Human Fetal Liver- | Human Fetal Liver | Liver | | | Uni-ZAP |
| | Enzyme subtraction | | | | | XR |
| H0247 | Human Membrane Bound | Human Membrane | Blood | Cell Line | | Uni-ZAP |
| | Polysomes-Enzyme | Bound Polysomes | | | | XR |
| | Subtraction | | | | | |
| H0249 | HE7, subtracted by | Human Whole 7 | Embryo | | | Uni-ZAP |
| | hybridization with E7 | Week Old Embryo | | | | XR |
| | cDNA | | | | | |
| H0250 | Human Activated | Human Monocytes | | | | Uni-ZAP |
| | Monocytes | | | | | XR |
| H0251 | Human Chondrosarcoma | Human | Cartilage | | disease | Uni-ZAP |
| | | Chondrosarcoma | | | | XR |
| H0252 | Human Osteosarcoma | Human | Bone | | disease | Uni-ZAP |
| | | Osteosarcoma | | | | XR |
| H0253 | Human adult testis, large | Human Adult Testis | Testis | | | Uni-ZAP |
| | inserts | | | | | XR |
| H0254 | Breast Lymph node cDNA | Breast Lymph Node | Lymph Node | | | Uni-ZAP |
| | library | | | | | XR |
| H0255 | breast lymph node CDNA | Breast Lymph Node | Lymph Node | | | Lambda |
| | library | | | | | ZAP II |
| H0256 | HL-60, unstimulated | Human HL-60 | Blood | Cell Line | | Uni-ZAP |
| | | Cells, unstimulated | | | | XR |
| H0257 | HL-60, PMA 4H | HL-60 Cells, PMA | Blood | Cell Line | | Uni-ZAP |
| | | stimulated 4H | | | | XR |
| H0261 | H. cerebellum, Enzyme | Human Cerebellum | Brain | | | Uni-ZAP |
| | subtracted | | | | | XR |
| H0263 | human colon cancer | Human Colon | Colon | | disease | Lambda |
| | | Cancer | | | | ZAP II |
| H0264 | human tonsils | Human Tonsil | Tonsil | | | Uni-ZAP |
| | | | | | | XR |
| H0265 | Activated T-Cell | T-Cells | Blood | Cell Line | | Uni-ZAP |
| | (12 hs)/Thiouridine | | | | | XR |
| | labelledEco | | | | | |
| H0266 | Human Microvascular | HMEC | Vein | Cell Line | | Lambda |
| | Endothelial Cells, fract. A | | | | | ZAP II |
| H0267 | Human Microvascular | HMEC | Vein | Cell Line | | Lambda |
| | Endothelial Cells, fract. B | | | | | ZAP II |
| H0268 | Human Umbilical Vein | HUVE Cells | Umbilical | Cell Line | | Lambda |
| | Endothelial Cells, fract. A | | vein | | | ZAP II |
| H0269 | Human Umbilical Vein | HUVE Cells | Umbilical | Cell Line | | Lambda |
| | Endothelial Cells, fract. B | | vein | | | ZAP II |
| H0270 | HPAS (human pancreas, | Human Pancreas | Pancreas | | | Uni-ZAP |
| | subtracted) | | | | | XR |
| H0271 | Human Neutrophil, | Human Neutrophil- | Blood | Cell Line | | Uni-ZAP |
| | Activated | Activated | | | | XR |
| H0272 | HUMAN TONSILS, | Human Tonsil | Tonsil | | | Uni-ZAP |
| | FRACTION 2 | | | | | XR |
| H0274 | Human Adult Spleen, | Human Adult | Spleen | | | Uni-ZAP |
| | fractionII | Spleen | | | | XR |
| H0275 | Human Infant Adrenal | Human Infant | Adrenal | | | pBluescript |
| | Gland, Subtracted | Adrenal Gland | gland | | | |
| H0280 | K562 + PMA (36 hrs) | K562 Cell line | cell line | Cell Line | | ZAP |
| | | | | | | Express |
| H0281 | Lymph node, abnorm. cell | Lymph Node, | Lymph Node | Cell Line | | ZAP |
| | line (ATCC #7225) | abnormal cell line | | | | Express |
| H0282 | HBGB''s differential | Human Primary | Breast | | | Uni-ZAP |
| | consolidation | Breast Cancer | | | | XR |
| H0284 | Human OB MG63 control | Human | Bone | Cell Line | | Uni-ZAP |
| | fraction I | Osteoblastoma | | | | XR |
| | | MG63 cell line | | | | |
| H0286 | Human OB MG63 treated | Human | Bone | Cell Line | | Uni-ZAP |
| | (10 nM E2) fraction I | Osteoblastoma | | | | XR |
| | | MG63 cell line | | | | |
| H0288 | Human OB HOS control | Human | Bone | Cell Line | | Uni-ZAP |
| | fraction I | Osteoblastoma HOS | | | | XR |
| | | cell line | | | | |
| H0290 | Human OB HOS treated | Human | Bone | Cell Line | | Uni-ZAP |
| | (1 nM E2) fraction I | Osteoblastoma HOS | | | | XR |
| | | cell line | | | | |
| H0292 | Human OB HOS treated | Human | Bone | Cell Line | | Uni-ZAP |
| | (10 nM E2) fraction I | Osteoblastoma HOS | | | | XR |
| | | cell line | | | | |
| H0293 | WI 38 cells | | | | | Uni-ZAP |
| | | | | | | XR |
| H0294 | Amniotic Cells - TNF | Amniotic Cells - | Placenta | Cell Line | | Uni-ZAP |
| | induced | TNF induced | | | | XR |
| H0295 | Amniotic Cells - Primary | Amniotic Cells - | Placenta | Cell Line | | Uni-ZAP |
| | Culture | Primary Culture | | | | XR |
| H0298 | HCBB''s differential | CAMA1Ee Cell | Breast | Cell Line | | Uni-ZAP |
| | consolidation | Line | | | | XR |
| H0299 | HCBA''s differential | CAMA1Ee Cell | Breast | Cell Line | | Uni-ZAP |
| | consolidation | Line | | | | XR |
| H0300 | CD34 positive cells (Cord | CD34 Positive Cells | Cord Blood | | | ZAP |
| | Blood) | | | | | Express |
| H0305 | CD34 positive cells (Cord | CD34 Positive Cells | Cord Blood | | | ZAP |
| | Blood) | | | | | Express |
| H0306 | CD34 depleted Buffy Coat | CD34 Depleted | Cord Blood | | | ZAP |
| | (Cord Blood) | Buffy Coat (Cord | | | | Express |
| | | Blood) | | | | |
| H0309 | Human Chronic Synovitis | Synovium, Chronic | Synovium | | disease | Uni-ZAP |
| | | Synovitis/ | | | | XR |
| | | Osteoarthritis | | | | |
| H0310 | human caudate nucleus | Brain | Brain | | | Uni-ZAP |
| | | | | | | XR |
| H0313 | human pleural cancer | pleural cancer | | | disease | pBluescript |
| H0316 | HUMAN STOMACH | Human Stomach | Stomach | | | Uni-ZAP |
| | | | | | | XR |
| H0318 | HUMAN B CELL | Human B Cell | Lymph Node | | disease | Uni-ZAP |
| | LYMPHOMA | Lymphoma | | | | XR |
| H0320 | Human frontal cortex | Human Frontal | Brain | | | Uni-ZAP |
| | | Cortex | | | | XR |
| H0327 | human corpus colosum | Human Corpus | Brain | | | Uni-ZAP |
| | | Callosum | | | | XR |
| H0328 | human ovarian cancer | Ovarian Cancer | Ovary | | disease | Uni-ZAP |
| | | | | | | XR |
| H0329 | Dermatofibrosarcoma | Dermatofibrosarcoma | Skin | | disease | Uni-ZAP |
| | Protuberance | Protuberans | | | | XR |
| H0330 | HCBB''s Subtractive (−mito | CAMA1Ee Cell | Breast | Cell Line | | Uni-ZAP |
| | genes) | Line | | | | XR |
| H0331 | Hepatocellular Tumor | Hepatocellular | Liver | | disease | Lambda |
| | | Tumor | | | | ZAP II |
| H0333 | Hemangiopericytoma | Hemangiopericytoma | Blood vessel | | disease | Lambda |
| | | | | | | ZAP II |
| H0334 | Kidney cancer | Kidney Cancer | Kidney | | disease | Uni-ZAP |
| | | | | | | XR |
| H0339 | Duodenum | Duodenum | | | | Uni-ZAP |
| | | | | | | XR |
| H0340 | Corpus Callosum | Corpus Collosum- | | | | Uni-ZAP |
| | | 93052 | | | | XR |
| H0341 | Bone Marrow Cell Line | Bone Marrow Cell | Bone Marrow | Cell Line | | Uni-ZAP |
| | (RS4; 11) | Line RS4; 11 | | | | XR |
| H0342 | Lingual Gyrus | Lingual Gyrus | Brain | | | Uni-ZAP |
| | | | | | | XR |
| H0343 | stomach cancer (human) | Stomach Cancer - | | | disease | Uni-ZAP |
| | | 5383A (human) | | | | XR |
| H0344 | Adipose tissue (human) | Adipose - 6825A | | | | Uni-ZAP |
| | | (human) | | | | XR |
| H0345 | SKIN | Skin - 4000868H | Skin | | | Uni-ZAP |
| | | | | | | XR |
| H0346 | Brain-medulloblastoma | Brain | Brain | | disease | Uni-ZAP |
| | | (Medulloblastoma)- | | | | XR |
| | | 9405C006R | | | | |
| H0349 | human adult liver cDNA | Human Adult Liver | Liver | | | pCMVSport 1 |
| | library | | | | | |
| H0350 | Human Fetal Liver, mixed | Human Fetal Liver, | Liver | | | Uni-ZAP |
| | 10 & 14 week | mixed 10 & 14 Week | | | | XR |
| H0351 | Glioblastoma | Glioblastoma | Brain | | disease | Uni-ZAP |
| | | | | | | XR |
| H0352 | wilm''s tumor | Wilm''s Tumor | | | disease | Uni-ZAP |
| | | | | | | XR |
| H0354 | Human Leukocytes | Human Leukocytes | Blood | Cell Line | | pCMVSport 1 |
| H0355 | Human Liver | Human Liver, | | | | pCMVSport 1 |
| | | normal Adult | | | | |
| H0356 | Human Kidney | Human Kidney | Kidney | | | pCMVSport 1 |
| H0357 | H. Normalized Fetal | Human Fetal Liver | Liver | | | Uni-ZAP |
| | Liver, II | | | | | XR |
| H0359 | KMH2 cell line | KMH2 | | | | ZAP |
| | | | | | | Express |
| H0361 | Human rejected kidney | Human Rejected | | | disease | pBluescript |
| | | Kidney | | | | |
| H0362 | HeLa cell line | HELA CELL LINE | | | | pSport1 |
| H0363 | Human Brain Medulla, | Human Brain | | | | pBluescript |
| | subtracted | Medulla | | | | |
| H0364 | Human Osteoclastoma, | Human | | | disease | pBluescript |
| | excised | Osteoclastoma | | | | |
| H0365 | Osteoclastoma-normalized B | Human | | | disease | Uni-ZAP |
| | | Osteoclastoma | | | | XR |
| H0366 | L428 cell line | L428 | | | | ZAP |
| | | | | | | Express |
| H0369 | H. Atrophic Endometrium | Atrophic | | | | Uni-ZAP |
| | | Endometrium and | | | | XR |
| | | myometrium | | | | |
| H0370 | H. Lymph node breast | Lymph node with | | | disease | Uni-ZAP |
| | Cancer | Met. Breast Cancer | | | | XR |
| H0371 | Eosinophils- | Eosinophils- | | | disease | Uni-ZAP |
| | Hypereosinophilia patient | Hypereosinophilia | | | | XR |
| | | patient | | | | |
| H0372 | Human Testes | Human Testes | Testis | | | pCMVSport 1 |
| H0373 | Human Heart | Human Adult Heart | Heart | | | pCMVSport 1 |
| H0374 | Human Brain | Human Brain | | | | pCMVSport 1 |
| H0375 | Human Lung | Human Lung | | | | pCMVSport 1 |
| H0376 | Human Spleen | Human Adult | Spleen | | | pCMVSport 1 |
| | | Spleen | | | | |
| H0379 | Human Tongue, frac 1 | Human Tongue | | | | pSport1 |
| H0380 | Human Tongue, frac 2 | Human Tongue | | | | pSport1 |
| H0381 | Bone Cancer | Bone Cancer | | | disease | Uni-ZAP |
| | | | | | | XR |
| H0383 | Human Prostate BPH, re- | Human Prostate | | | | Uni-ZAP |
| | excision | BPH | | | | XR |
| H0384 | Brain, Kozak | Human Brain | | | | pCMVSport 1 |
| H0386 | Leukocyte and Lung; 4 | Human Leukocytes | Blood | Cell Line | | pCMVSport 1 |
| | screens | | | | | |
| H0387 | Human Brain Medulla, | Human Brain | | | | pBluescript |
| | subtracted II | Medulla | | | | |
| H0388 | Human Rejected Kidney, | Human Rejected | | | disease | pBluescript |
| | 704 re-excision | Kidney | | | | |
| H0389 | H. Brain, X-Chromosome | Human Brain | | | | pCMVSport 1 |
| | hybridization | | | | | |
| H0390 | Human Amygdala | Human Amygdala | | | disease | pBluescript |
| | Depression, re-excision | Depression | | | | |
| H0391 | H. Meniingima, M6 | Human Meningima | brain | | | pSport1 |
| H0392 | H. Meningima, M1 | Human Meningima | brain | | | pSport1 |
| H0393 | Fetal Liver, subtraction II | Human Fetal Liver | Liver | | | pBluescript |
| H0394 | A-14 cell line | Redd-Sternberg cell | | | | ZAP |
| | | | | | | Express |
| H0395 | A1-CELL LINE | Redd-Sternberg cell | | | | ZAP |
| | | | | | | Express |
| H0396 | L1 Cell line | Redd-Sternberg cell | | | | ZAP |
| | | | | | | Express |
| H0398 | Human Newborn Bladder | Human Newborn | | | | pBluescript |
| | | Bladder | | | | |
| H0399 | Human Kidney Cortex, re- | Human Kidney | | | | Lambda |
| | rescue | Cortex | | | | ZAP II |
| H0400 | Human Striatum | Human Brain, | Brain | | | Lambda |
| | Depression, re-rescue | Striatum Depression | | | | ZAP II |
| H0401 | Human Pituitary, | Human Pituitary | | | | pBluescript |
| | subtracted V | | | | | |
| H0402 | CD34 depleted Buffy Coat | CD34 Depleted | Cord Blood | | | ZAP |
| | (Cord Blood), re-excision | Buffy Coat (Cord | | | | Express |
| | | Blood) | | | | |
| H0403 | H. Umbilical Vein | HUVE Cells | Umbilical | Cell Line | | Uni-ZAP |
| | Endothelial Cells, IL4 | | vein | | | XR |
| | induced | | | | | |
| H0404 | H. Umbilical Vein | HUVE Cells | Umbilical | Cell Line | | Uni-ZAP |
| | endothelial cells, | | vein | | | XR |
| | uninduced | | | | | |
| H0405 | Human Pituitary, | Human Pituitary | | | | pBluescript |
| | subtracted VI | | | | | |
| H0406 | H Amygdala Depression, | Human Amygdala | | | | Uni-ZAP |
| | subtracted | Depression | | | | XR |
| H0408 | Human kidney Cortex, | Human Kidney | | | | pBluescript |
| | subtracted | Cortex | | | | |
| H0409 | H. Striatum Depression, | Human Brain, | Brain | | | pBluescript |
| | subtracted | Striatum Depression | | | | |
| H0410 | H. Male bladder, adult | H Male Bladder, | Bladder | | | pSport1 |
| | | Adult | | | | |
| H0411 | H Female Bladder, Adult | Human Female | Bladder | | | pSport1 |
| | | Adult Bladder | | | | |
| H0412 | Human umbilical vein | HUVE Cells | Umbilical | Cell Line | | pSport1 |
| | endothelial cells, IL-4 | | vein | | | |
| | induced | | | | | |
| H0413 | Human Umbilical Vein | HUVE Cells | Umbilical | Cell Line | | pSport1 |
| | Endothelial Cells, | | vein | | | |
| | uninduced | | | | | |
| H0414 | Ovarian Tumor I, OV5232 | Ovarian Tumor, | Ovary | | disease | pSport1 |
| | | OV5232 | | | | |
| H0415 | H. Ovarian Tumor, II, | Ovarian Tumor, | Ovary | | disease | pCMVSport |
| | OV5232 | OV5232 | | | | 2.0 |
| H0416 | Human Neutrophils, | Human Neutrophil - | Blood | Cell Line | | pBluescript |
| | Activated, re-excision | Activated | | | | |
| H0417 | Human Pituitary, | Human Pituitary | | | | pBluescript |
| | subtracted VIII | | | | | |
| H0418 | Human Pituitary, | Human Pituitary | | | | pBluescript |
| | subtracted VII | | | | | |
| H0419 | Bone Cancer, re-excision | Bone Cancer | | | | Uni-ZAP |
| | | | | | | XR |
| H0421 | Human Bone Marrow, re- | Bone Marrow | | | | pBluescript |
| | excision | | | | | |
| H0422 | T-Cell PHA 16 hrs | T-Cells | Blood | Cell Line | | pSport1 |
| H0423 | T-Cell PHA 24 hrs | T-Cells | Blood | Cell Line | | pSport1 |
| H0424 | Human Pituitary, subt IX | Human Pituitary | | | | pBluescript |
| H0427 | Human Adipose | Human Adipose, left | | | | pSport1 |
| | | hiplipoma | | | | |
| H0428 | Human Ovary | Human Ovary | Ovary | | | pSport1 |
| | | Tumor | | | | |
| H0429 | K562 + PMA (36 hrs), re- | K562 Cell line | cell line | Cell Line | | ZAP |
| | excision | | | | | Express |
| H0431 | H. Kidney Medulla, re- | Kidney medulla | Kidney | | | pBluescript |
| | excision | | | | | |
| H0432 | H. Kidney Pyramid | Kidney pyramids | Kidney | | | pBluescript |
| H0433 | Human Umbilical Vein | HUVE Cells | Umbilical | Cell Line | | pBluescript |
| | Endothelial cells, frac B, | | vein | | | |
| | re-excision | | | | | |
| H0434 | Human Brain, striatum, | Human Brain, | | | | pBluescript |
| | re-excision | Striatum | | | | |
| H0435 | Ovarian Tumor Oct. 3, 1995 | Ovarian Tumor, | Ovary | | | pCMVSport |
| | | OV350721 | | | | 2.0 |
| H0436 | Resting T-Cell Library, II | T-Cells | Blood | Cell Line | | pSport1 |
| H0437 | H Umbilical Vein | HUVE Cells | Umbilical | Cell Line | | Lambda |
| | Endothelial Cells, frac A, | | vein | | | ZAP II |
| | re-excision | | | | | |
| H0438 | H. Whole Brain #2, re- | Human Whole Brain | | | | ZAP |
| | excision | #2 | | | | Express |
| H0439 | Human Eosinophils | Eosinophils | | | | pBluescript |
| H0441 | H. Kidney Cortex, | Kidney cortex | Kidney | | | pBluescript |
| | subtracted | | | | | |
| H0442 | H. Striatum Depression, | Human Brain, | Brain | | | pBluescript |
| | subt II | Striatum Depression | | | | |
| H0443 | H. Adipose, subtracted | Human Adipose, left | | | | pSport1 |
| | | hiplipoma | | | | |
| H0444 | Spleen metastic melanoma | Spleen, Metastic | Spleen | | disease | pSport1 |
| | | malignant | | | | |
| | | melanoma | | | | |
| H0445 | Spleen, Chronic | Human Spleen, CLL | Spleen | | disease | pSport1 |
| | lymphocytic leukemia | | | | | |
| H0447 | Salivary gland, re-excision | Human Salivary | Salivary | | | Uni-ZAP |
| | | Gland | gland | | | XR |
| H0448 | Salivary gland, subtracted | Human Salivary | Salivary | | | Lambda |
| | | Gland | gland | | | ZAP II |
| H0449 | CD34+ cell, I | CD34 positive cells | | | | pSport1 |
| H0450 | CD34+cells, II | CD34 positive cells | | | | pCMVSport |
| | | | | | | 2.0 |
| H0453 | H. Kidney Pyramid, | Kidney pyramids | Kidney | | | pBluescript |
| | subtracted | | | | | |
| H0455 | H. Striatum Depression, | Human Brain, | Brain | | | pBluescript |
| | subt | Striatum Depression | | | | |
| H0456 | H Kidney Cortex, | Human Kidney | | | | pBluescript |
| | subtracted III | Cortex | | | | |
| H0457 | Human Eosinophils | Human Eosinophils | | | | pSport1 |
| H0458 | CD34+ cell, I, frac II | CD34 positive cells | | | | pSport1 |
| H0459 | CD34+cells, II, | CD34 positive cells | | | | pCMVSport |
| | FRACTION 2 | | | | | 2.0 |
| H0461 | H. Kidney Medulla, | Kidney medulla | Kidney | | | pBluescript |
| | subtracted | | | | | |
| H0462 | H. Amygdala Depression, | | Brain | | | pBluescript |
| | subtracted | | | | | |
| H0477 | Human Tonsil, Lib 3 | Human Tonsil | Tonsil | | | pSport1 |
| H0478 | Salivary Gland, Lib 2 | Human Salivary | Salivary | | | pSport1 |
| | | Gland | gland | | | |
| H0479 | Salivary Gland, Lib 3 | Human Salivary | Salivary | | | pSport1 |
| | | Gland | gland | | | |
| H0483 | Breast Cancer cell line, | Breast Cancer Cell | | | | pSport1 |
| | MDA 36 | line, MDA 36 | | | | |
| H0484 | Breast Cancer Cell line, | Breast Cancer Cell | | | | pSport1 |
| | angiogenic | line, Angiogenic, | | | | |
| | | 36T3 | | | | |
| H0485 | Hodgkin''s Lymphoma I | Hodgkin''s | | | disease | pCMVSport |
| | | Lymphoma I | | | | 2.0 |
| H0486 | Hodgkin''s Lymphoma II | Hodgkin''s | | | disease | pCMVSport |
| | | Lymphoma II | | | | 2.0 |
| H0487 | Human Tonsils, lib I | Human Tonsils | | | | pCMVSport |
| | | | | | | 2.0 |
| H0488 | Human Tonsils, Lib 2 | Human Tonsils | | | | pCMVSport |
| | | | | | | 2.0 |
| H0489 | Crohn''s Disease | Ileum | Intestine | | disease | pSport1 |
| H0490 | Hl-60, untreated, | Human HL-60 | Blood | Cell Line | | Uni-ZAP |
| | subtracted | Cells, unstimulated | | | | XR |
| H0491 | HL-60, PMA 4H, | HL-60 Cells, PMA | Blood | Cell Line | | Uni-ZAP |
| | subtracted | stimulated 4H | | | | XR |
| H0492 | HL-60, RA 4h, Subtracted | HL-60 Cells, RA | Blood | Cell Line | | Uni-ZAP |
| | | stimulated for 4H | | | | XR |
| H0494 | Keratinocyte | Keratinocyte | | | | pCMVSport |
| | | | | | | 2.0 |
| H0497 | HEL cell line | HEL cell line | | HEL | | pSport1 |
| | | | | 92.1.7 | | |
| H0504 | CAPFINDER, Crohn''s | Ileum | Intestine | | disease | pCMVSport |
| | Disease, lib 2 | | | | | 2.0 |
| H0505 | Human Astrocyte | Human Astrocyte | | | | pSport1 |
| H0506 | Ulcerative Colitis | Colon | Colon | | | pSport1 |
| H0509 | Liver, Hepatoma | Human Liver, | Liver | | disease | pCMVSport |
| | | Hepatoma, patient 8 | | | | 3.0 |
| H0510 | Human Liver, normal | Human Liver, | Liver | | | pCMVSport |
| | | normal, Patient # 8 | | | | 3.0 |
| H0512 | Keratinocyte, lib 3 | Keratinocyte | | | | pCMVSport |
| | | | | | | 2.0 |
| H0517 | Nasal polyps | Nasal polyps | | | | pCMVSport |
| | | | | | | 2.0 |
| H0518 | pBMC stimulated w/ poly | pBMC stimulated | | | | pCMVSport |
| | I/C | with poly I/C | | | | 3.0 |
| H0519 | NTERA2, control | NTERA2, | | | | pCMVSport |
| | | Teratocarcinoma | | | | 3.0 |
| | | cell line | | | | |
| H0520 | NTERA2 + retinoic acid, | NTERA2, | | | | pSport1 |
| | 14 days | Teratocarcinoma | | | | |
| | | cell line | | | | |
| H0521 | Primary Dendritic Cells, | Primary Dendritic | | | | pCMVSport |
| | lib 1 | cells | | | | 3.0 |
| H0522 | Primary Dendritic | Primary Dendritic | | | | pCMVSport |
| | cells, frac 2 | cells | | | | 3.0 |
| H0523 | Primary Dendritic | Primary Dendritic | | | | pSport1 |
| | cells, CapFinder2, frac 1 | cells | | | | |
| H0524 | Primary Dendritic Cells, | Primary Dendritic | | | | pSport1 |
| | CapFinder, frac 2 | cells | | | | |
| H0525 | PCR, pBMC I/C treated | pBMC stimulated | | | | PCRII |
| | | with poly I/C | | | | |
| H0527 | Human Liver, | Human Liver, | Liver | | | pSport1 |
| | normal, CapFinder | normal, Patient # 8 | | | | |
| H0528 | Poly[I]/Poly[C] Normal | Poly[I]/Poly[C] | | | | pCMVSport |
| | Lung Fibroblasts | Normal Lung | | | | 3.0 |
| | | Fibroblasts | | | | |
| H0529 | Myoloid Progenitor Cell | TF-1 Cell Line; | | | | pCMVSport |
| | Line | Myoloid progenitor | | | | 3.0 |
| | | cell line | | | | |
| H0530 | Human Dermal | Human Dermal | | | | pSport1 |
| | Endothelial | Endothelial Cells; | | | | |
| | Cells, untreated | untreated | | | | |
| H0535 | Human ovary tumor cell | Ovarian Tumor, | Ovary | | disease | pSport1 |
| | OV350721 | OV350721 | | | | |
| H0538 | Merkel Cells | Merkel cells | Lymph node | | | pSport1 |
| H0539 | Pancreas Islet Cell Tumor | Pancreas Islet Cell | Pancreas | | disease | pSport1 |
| | | Tumour | | | | |
| H0540 | Skin, burned | Skin, leg burned | Skin | | | pSport1 |
| H0542 | T Cell helper I | Helper T cell | | | | pCMVSport |
| | | | | | | 3.0 |
| H0543 | T cell helper II | Helper T cell | | | | pCMVSport |
| | | | | | | 3.0 |
| H0544 | Human endometrial | Human endometrial | | | | pCMVSport |
| | stromal cells | stromal cells | | | | 3.0 |
| H0545 | Human endometrial | Human endometrial | | | | pCMVSport |
| | stromal cells-treated with | stromal cells-treated | | | | 3.0 |
| | progesterone | with proge | | | | |
| H0546 | Human endometrial | Human endometrial | | | | pCMVSport |
| | stromal cells-treated with | stromal cells-treated | | | | 3.0 |
| | estradiol | with estra | | | | |
| H0547 | NTERA2 teratocarcinoma | NTERA2, | | | | pSport1 |
| | cell line + retinoic acid (14 | Teratocarcinoma | | | | |
| | days) | cell line | | | | |
| H0549 | H. Epididiymus, caput & | Human | | | | Uni-ZAP |
| | corpus | Epididiymus, caput | | | | XR |
| | | and corpus | | | | |
| H0550 | H. Epididiymus, cauda | Human | | | | Uni-ZAP |
| | | Epididiymus, cauda | | | | XR |
| H0551 | Human Thymus Stromal | Human Thymus | | | | pCMVSport |
| | Cells | Stromal Cells | | | | 3.0 |
| H0552 | Signal trap, Femur Bone | Femur Bone | | | | Other |
| | Marrow, pooled | marrow, pooled | | | | |
| | | from 8 male/female | | | | |
| H0553 | Human Placenta | Human Placenta | | | | pCMVSport |
| | | | | | | 3.0 |
| H0555 | Rejected Kidney, lib 4 | Human Rejected | Kidney | | disease | pCMVSport |
| | | Kidney | | | | 3.0 |
| H0556 | Activated T- | T-Cells | Blood | Cell Line | | Uni-ZAP |
| | cell(12 h)/Thiouridine-re- | | | | | XR |
| | excision | | | | | |
| H0559 | HL-60, PMA 4H, re- | HL-60 Cells, PMA | Blood | Cell Line | | Uni-ZAP |
| | excision | stimulated 4H | | | | XR |
| H0560 | KMH2 | KMH2 | | | | pCMVSport |
| | | | | | | 3.0 |
| H0561 | L428 | L428 | | | | pCMVSport |
| | | | | | | 3.0 |
| H0562 | Human Fetal Brain, | Human Fetal Brain | | | | pCMVSport |
| | normalized c5-11-26 | | | | | 2.0 |
| H0563 | Human Fetal Brain, | Human Fetal Brain | | | | pCMVSport |
| | normalized 50021F | | | | | 2.0 |
| H0564 | Human Fetal Brain, | Human Fetal Brain | | | | pCMVSport |
| | normalized C5001F | | | | | 2.0 |
| H0565 | HUman Fetal Brain, | Human Fetal Brain | | | | pCMVSport |
| | normalized 100024F | | | | | 2.0 |
| H0566 | Human Fetal | Human Fetal Brain | | | | pCMVSport |
| | Brain, normalized c50F | | | | | 2.0 |
| H0567 | Human Fetal Brain, | Human Fetal Brain | | | | pCMVSport |
| | normalized A5002F | | | | | 2.0 |
| H0569 | Human Fetal Brain, | Human Fetal Brain | | | | pCMVSport |
| | normalized CO | | | | | 2.0 |
| H0570 | Human Fetal Brain, | Human Fetal Brain | | | | pCMVSport |
| | normalized C500H | | | | | 2.0 |
| H0571 | Human Fetal Brain, | Human Fetal Brain | | | | pCMVSport |
| | normalized C500HE | | | | | 2.0 |
| H0572 | Human Fetal Brain, | Human Fetal Brain | | | | pCMVSport |
| | normalized AC5002 | | | | | 2.0 |
| H0574 | Hepatocellular Tumor; re- | Hepatocellular | Liver | | disease | Lambda |
| | excision | Tumor | | | | ZAP II |
| H0575 | Human Adult | Human Adult | Lung | | | Uni-ZAP |
| | Pulmonary; re-excision | Pulmonary | | | | XR |
| H0576 | Resting T-Cell; re- | T-Cells | Blood | Cell Line | | Lambda |
| | excision | | | | | ZAP II |
| H0578 | Human Fetal Thymus | Fetal Thymus | Thymus | | | pSport1 |
| H0579 | Pericardium | Pericardium | Heart | | | pSport1 |
| H0580 | Dendritic cells, pooled | Pooled dendritic | | | | pCMVSport |
| | | cells | | | | 3.0 |
| H0581 | Human Bone Marrow, | Human Bone | Bone Marrow | | | pCMVSport |
| | treated | Marrow | | | | 3.0 |
| H0583 | B Cell lymphoma | B Cell Lymphoma | B Cell | | disease | pCMVSport |
| | | | | | | 3.0 |
| H0584 | Activated T-Cells, 24 hrs, | Activated T-Cells | Blood | Cell Line | | Uni-ZAP |
| | re-excision | | | | | XR |
| H0585 | Activated T-Cells, 12 hrs, | Activated T-Cells | Blood | Cell Line | | Uni-ZAP |
| | re-excision | | | | | XR |
| H0586 | Healing groin wound, 6.5 | healing groin | groin | | disease | pCMVSport |
| | hours post incision | wound, 6.5 hours | | | | 3.0 |
| | | post incision - 2/ | | | | |
| H0587 | Healing groin wound; 7.5 | Groin-Feb. 19, 1997 | groin | | disease | pCMVSport |
| | hours post incision | | | | | 3.0 |
| H0589 | CD34 positive cells (cord | CD34 Positive Cells | Cord Blood | | | ZAP |
| | blood), re-ex | | | | | Express |
| H0590 | Human adult small | Human Adult Small | Small Int. | | | Uni-ZAP |
| | intestine, re-excision | Intestine | | | | XR |
| H0591 | Human T-cell | T-Cell Lymphoma | T-Cell | | disease | Uni-ZAP |
| | lymphoma; re-excision | | | | | XR |
| H0592 | Healing groin wound - | HGS wound healing | | | disease | pCMVSport |
| | zero hr post-incision | project; abdomen | | | | 3.0 |
| | (control) | | | | | |
| H0593 | Olfactory | Olfactory epithelium | | | | pCMVSport |
| | epithelium; nasalcavity | from roof of left | | | | 3.0 |
| | | nasal cacit | | | | |
| H0594 | Human Lung Cancer; re- | Human Lung Cancer | Lung | | disease | Lambda |
| | excision | | | | | ZAP II |
| H0595 | Stomach cancer | Stomach Cancer - | | | disease | Uni-ZAP |
| | (human); re-excision | 5383A (human) | | | | XR |
| H0596 | Human Colon Cancer; re- | Human Colon | Colon | | | Lambda |
| | excision | Cancer | | | | ZAP II |
| H0597 | Human Colon; re-excision | Human Colon | | | | Lambda |
| | | | | | | ZAP II |
| H0598 | Human Stomach; re- | Human Stomach | Stomach | | | Uni-ZAP |
| | excision | | | | | XR |
| H0599 | Human Adult Heart; re- | Human Adult Heart | Heart | | | Uni-ZAP |
| | excision | | | | | XR |
| H0600 | Healing Abdomen | Abdomen | | | disease | pCMVSport |
| | wound; 70&90 min post | | | | | 3.0 |
| | incision | | | | | |
| H0601 | Healing Abdomen | Abdomen | | | disease | pCMVSport |
| | Wound; 15 days post | | | | | 3.0 |
| | incision | | | | | |
| H0602 | Healing Abdomen | Abdomen | | | disease | pCMVSport |
| | Wound; 21&29 days post | | | | | 3.0 |
| | incision | | | | | |
| H0604 | Human Pituitary, re- | Human Pituitary | | | | pBluescript |
| | excision | | | | | |
| H0606 | Human Primary Breast | Human Primary | Breast | | disease | Uni-ZAP |
| | Cancer; re-excision | Breast Cancer | | | | XR |
| H0607 | H. Leukocytes, normalized | H. Leukocytes | | | | pCMVSport 1 |
| | cot 50A3 | | | | | |
| H0608 | H. Leukocytes, control | H. Leukocytes | | | | pCMVSport 1 |
| H0609 | H. Leukocytes, | H. Leukocytes | | | | pCMVSport 1 |
| | normalized cot >500A | | | | | |
| H0610 | H. Leukocytes, | H. Leukocytes | | | | pCMVSport 1 |
| | normalized cot 5A | | | | | |
| H0611 | H. Leukocytes, | H. Leukocytes | | | | pCMVSport 1 |
| | normalized cot 500 B | | | | | |
| H0612 | H. Leukocytes, normalized | H. Leukocytes | | | | pCMVSport 1 |
| | cot 50 B | | | | | |
| H0613 | H. Leukocytes, normalized | H. Leukocytes | | | | pCMVSport 1 |
| | cot 5B | | | | | |
| H0614 | H. Leukocytes, | H. Leukocytes | | | | pCMVSport 1 |
| | normalized cot 500 A | | | | | |
| H0615 | Human Ovarian Cancer | Ovarian Cancer | Ovary | | disease | Uni-ZAP |
| | Reexcision | | | | | XR |
| H0616 | Human Testes, Reexcision | Human Testes | Testis | | | Uni-ZAP |
| | | | | | | XR |
| H0617 | Human Primary Breast | Human Primary | Breast | | disease | Uni-ZAP |
| | Cancer Reexcision | Breast Cancer | | | | XR |
| H0618 | Human Adult Testes, | Human Adult Testis | Testis | | | Uni-ZAP |
| | Large Inserts, Reexcision | | | | | XR |
| H0619 | Fetal Heart | Human Fetal Heart | Heart | | | Uni-ZAP |
| | | | | | | XR |
| H0620 | Human Fetal Kidney; | Human Fetal Kidney | Kidney | | | Uni-ZAP |
| | Reexcision | | | | | XR |
| H0622 | Human Pancreas Tumor; | Human Pancreas | Pancreas | | disease | Uni-ZAP |
| | Reexcision | Tumor | | | | XR |
| H0623 | Human Umbilical Vein; | Human Umbilical | Umbilical | | | Uni-ZAP |
| | Reexcision | Vein Endothelial | vein | | | XR |
| | | Cells | | | | |
| H0624 | 12 Week Early Stage | Twelve Week Old | Embryo | | | Uni-ZAP |
| | Human II; Reexcision | Early Stage Human | | | | XR |
| H0625 | Ku 812F Basophils Line | Ku 812F Basophils | | | | pSport1 |
| H0626 | Saos2 Cells; Untreated | Saos2 Cell Line; | | | | pSport1 |
| | | Untreated | | | | |
| H0627 | Saos2 Cells; Vitamin D3 | Saos2 Cell Line; | | | | pSport1 |
| | Treated | Vitamin D3 Treated | | | | |
| H0628 | Human Pre-Differentiated | Human Pre- | | | | Uni-ZAP |
| | Adipocytes | Differentiated | | | | XR |
| | | Adipocytes | | | | |
| H0629 | Human Leukocyte, control | Human Normalized | | | | pCMVSport 1 |
| | #2 | leukocyte | | | | |
| H0630 | Human | Human Normalized | | | | pCMVSport 1 |
| | Leukocytes, normalized | leukocyte | | | | |
| | control #4 | | | | | |
| H0631 | Saos2, Dexamethosome | Saos2 Cell Line; | | | | pSport1 |
| | Treated | Dexamethosome | | | | |
| | | Treated | | | | |
| H0632 | Hepatocellular Tumor; re- | Hepatocellular | Liver | | | Lambda |
| | excision | Tumor | | | | ZAP II |
| H0633 | Lung Carcinoma A549 | TNFalpha activated | | | disease | pSport1 |
| | TNFalpha activated | A549- Lung | | | | |
| | | Carcinoma | | | | |
| H0634 | Human Testes Tumor, re- | Human Testes | Testis | | disease | Uni-ZAP |
| | excision | Tumor | | | | XR |
| H0635 | Human Activated T-Cells, | Activated T-Cells | Blood | Cell Line | | Uni-ZAP |
| | re-excision | | | | | XR |
| H0636 | Chondrocytes | Chondrocytes | | | | pSport1 |
| H0637 | Dendritic Cells From | Dentritic cells from | | | | pSport1 |
| | CD34 Cells | CD34 cells | | | | |
| H0638 | CD40 activated monocyte | CD40 activated | | | | pSport1 |
| | dendridic cells | monocyte dendridic | | | | |
| | | cells | | | | |
| H0639 | Ficolled Human Stromal | Ficolled Human | | | | Other |
| | Cells, 5Fu treated | Stromal Cells, 5Fu | | | | |
| | | treated | | | | |
| H0640 | Ficolled Human Stromal | Ficolled Human | | | | Other |
| | Cells, Untreated | Stromal Cells, | | | | |
| | | Untreated | | | | |
| H0641 | LPS activated derived | LPS activated | | | | pSport1 |
| | dendritic cells | monocyte derived | | | | |
| | | dendritic cells | | | | |
| H0642 | Hep G2 Cells, lambda | Hep G2 Cells | | | | Other |
| | library | | | | | |
| H0643 | Hep G2 Cells, PCR library | Hep G2 Cells | | | | Other |
| H0644 | Human Placenta (re- | Human Placenta | Placenta | | | Uni-ZAP |
| | excision) | | | | | XR |
| H0645 | Fetal Heart, re-excision | Human Fetal Heart | Heart | | | Uni-ZAP |
| | | | | | | XR |
| H0646 | Lung, Cancer (4005313 | Metastatic | | | | pSport1 |
| | A3): Invasive Poorly | squamous cell lung | | | | |
| | Differentiated Lung | carcinoma, poorly di | | | | |
| | Adenocarcinoma, | | | | | |
| H0647 | Lung, Cancer (4005163 | Invasive poorly | | | disease | pSport1 |
| | B7): Invasive, Poorly Diff. | differentiated lung | | | | |
| | Adenocarcinoma, | adenocarcinoma | | | | |
| | Metastatic | | | | | |
| H0648 | Ovary, Cancer: (4004562 | Papillary Cstic | | | disease | pSport1 |
| | B6) Papillary Serous | neoplasm of low | | | | |
| | Cystic Neoplasm, Low | malignant potentia | | | | |
| | Malignant Pot | | | | | |
| H0649 | Lung, Normal: (4005313 | Normal Lung | | | | pSport1 |
| | B1) | | | | | |
| H0650 | B-Cells | B-Cells | | | | pCMVSport |
| | | | | | | 3.0 |
| H0651 | Ovary, Normal: | Normal Ovary | | | | pSport1 |
| | (9805C040R) | | | | | |
| H0652 | Lung, Normal: (4005313 | Normal Lung | | | | pSport1 |
| | B1) | | | | | |
| H0653 | Stromal Cells | Stromal Cells | | | | pSport1 |
| H0654 | Lung, Cancer: (4005313 | Metastatic | | | | Other |
| | A3) Invasive Poorly- | Squamous cell lung | | | | |
| | differentiated Metastatic | Carcinoma poorly | | | | |
| | lung adenoc | dif | | | | |
| H0656 | B-Cells (unstimulated) | B-Cells | | | | pSport1 |
| | | (unstimulated) | | | | |
| H0657 | B-Cells (stimulated) | B-Cells (stimulated) | | | | pSport1 |
| H0658 | Ovary, Cancer | 9809C332- Poorly | Ovary & | | disease | pSport1 |
| | (9809C332): Poorly | differentiate | Fallopian | | | |
| | differentiated | | Tubes | | | |
| | adenocarcinoma | | | | | |
| H0659 | Ovary, Cancer | Grade II Papillary | Ovary | | disease | pSport1 |
| | (15395A1F): Grade II | Carcinoma, Ovary | | | | |
| | Papillary Carcinoma | | | | | |
| H0660 | Ovary, Cancer: | Poorly differentiated | | | disease | pSport1 |
| | (15799A1F) Poorly | carcinoma, ovary | | | | |
| | differentiated carcinoma | | | | | |
| H0661 | Breast, Cancer: (4004943 | Breast cancer | | | disease | pSport1 |
| | A5) | | | | | |
| H0662 | Breast, Normal: | Normal Breast - | Breast | | | pSport1 |
| | (4005522B2) | #4005522(B2) | | | | |
| H0663 | Breast, Cancer: (4005522 | Breast Cancer - | Breast | | disease | pSport1 |
| | A2) | #4005522(A2) | | | | |
| H0664 | Breast, Cancer: | Breast Cancer | Breast | | disease | pSport1 |
| | (9806C012R) | | | | | |
| H0665 | Stromal cells 3.88 | Stromal cells 3.88 | | | | pSport1 |
| H0666 | Ovary, Cancer: (4004332 | Ovarian Cancer, | | | disease | pSport1 |
| | A2) | Sample | | | | |
| | | #4004332A2 | | | | |
| H0667 | Stromal cells(HBM3.18) | Stromal cell(HBM | | | | pSport1 |
| | | 3.18) | | | | |
| H0668 | stromal cell clone 2.5 | stromal cell clone | | | | pSport1 |
| | | 2.5 | | | | |
| H0669 | Breast, Cancer: (4005385 | Breast Cancer | Breast | | | pSport1 |
| | A2) | (4005385A2) | | | | |
| H0670 | Ovary, Cancer(4004650 | Ovarian Cancer - | | | | pSport1 |
| | A3): Well-Differentiated | 4004650A3 | | | | |
| | Micropapillary Serous | | | | | |
| | Carcinoma | | | | | |
| H0671 | Breast, Cancer: | Breast Cancer- | | | | pSport1 |
| | (9802C02OE) | Sample # | | | | |
| | | 9802C02OE | | | | |
| H0672 | Ovary, Cancer: (4004576 | Ovarian | Ovary | | | pSport1 |
| | A8) | Cancer(4004576A8) | | | | |
| H0673 | Human Prostate Cancer, | Human Prostate | Prostate | | | Uni-ZAP |
| | Stage B2; re-excision | Cancer, stage B2 | | | | XR |
| H0674 | Human Prostate Cancer, | Human Prostate | Prostate | | | Uni-ZAP |
| | Stage C; re-excission | Cancer, stage C | | | | XR |
| H0675 | Colon, Cancer: | Colon Cancer | | | | pCMVSport |
| | (9808C064R) | 9808C064R | | | | 3.0 |
| H0676 | Colon, Cancer: | Colon Cancer | | | | pCMVSport |
| | (9808C064R)-total RNA | 9808C064R | | | | 3.0 |
| H0677 | TNFR degenerate oligo | B-Cells | | | | PCRII |
| H0678 | screened clones from | Placenta | Placenta | | | Other |
| | placental library | | | | | |
| H0679 | screened clones from | Human Tonsils | | | | Other |
| | Tonsil library | | | | | |
| H0682 | Serous Papillary | serous papillary | | | | pCMVSport |
| | Adenocarcinoma | adenocarcinoma | | | | 3.0 |
| | | (9606G304SPA3B) | | | | |
| H0683 | Ovarian Serous Papillary | Serous papillary | | | | pCMVSport |
| | Adenocarcinoma | adenocarcinoma, | | | | 3.0 |
| | | stage 3C (9804G01 | | | | |
| H0684 | Serous Papillary | Ovarian Cancer- | Ovaries | | | pCMVSport |
| | Adenocarcinoma | 9810G606 | | | | 3.0 |
| H0685 | Adenocarcinoma of | Adenocarcinoma of | | | | pCMVSport |
| | Ovary, Human Cell Line, | Ovary, Human Cell | | | | 3.0 |
| | # OVCAR-3 | Line, # OVCAR- | | | | |
| H0686 | Adenocarcinoma of | Adenocarcinoma of | | | | pCMVSport |
| | Ovary, Human Cell Line | Ovary, Human Cell | | | | 3.0 |
| | | Line, # SW-626 | | | | |
| H0687 | Human normal | Human normal | Ovary | | | pCMVSport |
| | ovary(#9610G215) | ovary(#9610G215) | | | | 3.0 |
| H0688 | Human Ovarian | Human Ovarian | | | | pCMVSport |
| | Cancer(#9807G017) | cancer(#9807G07), | | | | 3.0 |
| | | mRNA from Maura | | | | |
| | | Ru | | | | |
| H0689 | Ovarian Cancer | Ovarian Cancer, | | | | pCMVSport |
| | | #9806G019 | | | | 3.0 |
| H0690 | Ovarian Cancer, #9702G001 | Ovarian Cancer, | | | | pCMVSport |
| | | #9702G001 | | | | 3.0 |
| H0691 | Normal Ovary, | normal ovary, | | | | pCMVSport |
| | #9710G208 | #97100208 | | | | 3.0 |
| H0692 | BLyS Receptor from | B Cell Lymphoma | B Cell | | | pCMVSport |
| | Expression Cloning | | | | | 3.0 |
| H0693 | Normal Prostate | Normal Prostate | | | | pCMVSport |
| | #ODQ3958EN | Tissue # | | | | 3.0 |
| | | ODQ3958EN | | | | |
| H0694 | Prostate gland | Prostate gland, | prostate | | | pCMVSport |
| | adenocarcinoma | adenocarcinoma, | gland | | | 3.0 |
| | | mod/diff, gleason | | | | |
| H0695 | mononucleocytes from | mononucleocytes | | | | pCMVSport |
| | patient | from patient at | | | | 3.0 |
| | | Shady Grove Hospit | | | | |
| N0006 | Human Fetal Brain | Human Fetal Brain | | | | |
| N0007 | Human Hippocampus | Human | | | | |
| | | Hippocampus | | | | |
| N0008 | Human Hippocampus, | Human | | | | |
| | subtracted | Hippocampus | | | | |
| N0009 | Human Hippocampus, | Human | | | | |
| | prescreened | Hippocampus | | | | |
| S0001 | Brain frontal cortex | Brain frontal cortex | Brain | | | Lambda |
| | | | | | | ZAP II |
| S0002 | Monocyte activated | Monocyte-activated | blood | Cell Line | | Uni-ZAP |
| | | | | | | XR |
| S0003 | Human Osteoclastoma | Osteoclastoma | bone | | disease | Uni-ZAP |
| | | | | | | XR |
| S0004 | Prostate | Prostate BPH | Prostate | | | Lambda |
| | | | | | | ZAP II |
| S0005 | Heart | Heart-left ventricle | Heart | | | pCDNA |
| S0006 | Neuroblastoma | Human Neural | | | disease | pCDNA |
| | | Blastoma | | | | |
| S0007 | Early Stage Human Brain | Human Fetal Brain | | | | Uni-ZAP |
| | | | | | | XR |
| S0008 | Osteoclastoma | Osteoclastoma | bone | | disease | Uni-ZAP |
| | | | | | | XR |
| S0010 | Human Amygdala | Amygdala | | | | Uni-ZAP |
| | | | | | | XR |
| S0011 | STROMAL - | Osteoclastoma | bone | | disease | Uni-ZAP |
| | OSTEOCLASTOMA | | | | | XR |
| S0013 | Prostate | Prostate | prostate | | | Uni-ZAP |
| | | | | | | XR |
| S0014 | Kidney Cortex | Kidney cortex | Kidney | | | Uni-ZAP |
| | | | | | | XR |
| S0015 | Kidney medulla | Kidney medulla | Kidney | | | Uni-ZAP |
| | | | | | | XR |
| S0016 | Kidney Pyramids | Kidney pyramids | Kidney | | | Uni-ZAP |
| | | | | | | XR |
| S0020 | Seven Trans Membrane | 7TMD1 | | | | |
| | Receptor Family | | | | | |
| S0021 | Whole brain | Whole brain | Brain | | | ZAP |
| | | | | | | Express |
| S0022 | Human Osteoclastoma | Osteoclastoma | | | | Uni-ZAP |
| | Stromal Cells - | Stromal Cells | | | | XR |
| | unamplified | | | | | |
| S0023 | Human Kidney Cortex - | Human Kidney | | | | |
| | unamplified | Cortex | | | | |
| S0024 | Human Kidney Medulla - | Human Kidney | | | | |
| | unamplified | Medulla | | | | |
| S0025 | Human Kidney Pyramids - | Human Kidney | | | | |
| | unamplified | Pyramids | | | | |
| S0026 | Stromal cell TF274 | stromal cell | Bone marrow | Cell Line | | Uni-ZAP |
| | | | | | | XR |
| S0027 | Smooth muscle, serum | Smooth muscle | Pulmanary | Cell Line | | Uni-ZAP |
| | treated | | artery | | | XR |
| S0028 | Smooth muscle, control | Smooth muscle | Pulmanary | Cell Line | | Uni-ZAP |
| | | | artery | | | XR |
| S0029 | brain stem | Brain stem | brain | | | Uni-ZAP |
| | | | | | | XR |
| S0030 | Brain pons | Brain Pons | Brain | | | Uni-ZAP |
| | | | | | | XR |
| S0031 | Spinal cord | Spinal cord | spinal cord | | | Uni-ZAP |
| | | | | | | XR |
| S0032 | Smooth muscle-ILb | Smooth muscle | Pulmanary | Cell Line | | Uni-ZAP |
| | induced | | artery | | | XR |
| S0035 | Brain medulla oblongata | Brain medulla | Brain | | | Uni-ZAP |
| | | oblongata | | | | XR |
| S0036 | Human Substantia Nigra | Human Substantia | | | | Uni-ZAP |
| | | Nigra | | | | XR |
| S0037 | Smooth muscle, IL1b | Smooth muscle | Pulmanary | Cell Line | | Uni-ZAP |
| | induced | | artery | | | XR |
| S0038 | Human Whole Brain #2 - | Human Whole Brain | | | | ZAP |
| | Oligo dT >1.5 Kb | #2 | | | | Express |
| S0039 | Hypothalamus | Hypothalamus | Brain | | | Uni-ZAP |
| | | | | | | XR |
| S0040 | Adipocytes | Human Adipocytes | | | | Uni-ZAP |
| | | from Osteoclastoma | | | | XR |
| S0041 | Thalamus | Human Thalamus | | | | Uni-ZAP |
| | | | | | | XR |
| S0042 | Testes | Human Testes | | | | ZAP |
| | | | | | | Express |
| S0044 | Prostate BPH | prostate BPH | Prostate | | disease | Uni-ZAP |
| | | | | | | XR |
| S0045 | Endothelial cells-control | Endothelial cell | endothelial | Cell Line | | Uni-ZAP |
| | | | cell-lung | | | XR |
| S0046 | Endothelial-induced | Endothelial cell | endothelial | Cell Line | | Uni-ZAP |
| | | | cell-lung | | | XR |
| S0048 | Human Hypothalamus, | Human | | | disease | Uni-ZAP |
| | Alzheimer''s | Hypothalamus, | | | | XR |
| | | Alzheimer''s | | | | |
| S0049 | Human Brain, Striatum | Human Brain, | | | | Uni-ZAP |
| | | Striatum | | | | XR |
| S0050 | Human Frontal Cortex, | Human Frontal | | | disease | Uni-ZAP |
| | Schizophrenia | Cortex, | | | | XR |
| | | Schizophrenia | | | | |
| S0051 | Human | Human | | | disease | Uni-ZAP |
| | Hypothalmus, Schizophrenia | Hypothalamus, | | | | XR |
| | | Schizophrenia | | | | |
| S0052 | neutrophils control | human neutrophils | blood | Cell Line | | Uni-ZAP |
| | | | | | | XR |
| S0053 | Neutrophils IL-1 and LPS | human neutrophil | blood | Cell Line | | Uni-ZAP |
| | induced | induced | | | | XR |
| S0106 | STRIATUM | | BRAIN | | disease | Uni-ZAP |
| | DEPRESSION | | | | | XR |
| S0110 | Brain Amygdala | | Brain | | disease | Uni-ZAP |
| | Depression | | | | | XR |
| S0112 | Hypothalamus | | Brain | | | Uni-ZAP |
| | | | | | | XR |
| S0114 | Anergic T-cell | Anergic T-cell | | Cell Line | | Uni-ZAP |
| | | | | | | XR |
| S0116 | Bone marrow | Bone marrow | Bone marrow | | | Uni-ZAP |
| | | | | | | XR |
| S0118 | Smooth muscle control 2 | Smooth muscle | Pulmanary | Cell Line | | Uni-ZAP |
| | | | artery | | | XR |
| S0122 | Osteoclastoma-normalized A | Osteoclastoma | bone | | disease | pBluescript |
| S0124 | Smooth muscle-edited A | Smooth muscle | Pulmanary | Cell Line | | Uni-ZAP |
| | | | artery | | | XR |
| S0126 | Osteoblasts | Osteoblasts | Knee | Cell Line | | Uni-ZAP |
| | | | | | | XR |
| S0132 | Epithelial-TNFa and INF | Airway Epithelial | | | | Uni-ZAP |
| | induced | | | | | XR |
| S0134 | Apoptotic T-cell | apoptotic cells | | Cell Line | | Uni-ZAP |
| | | | | | | XR |
| S0136 | PERM TF274 | stromal cell | Bone marrow | Cell Line | | Lambda |
| | | | | | | ZAP II |
| S0140 | eosinophil-IL5 induced | eosinophil | lung | Cell Line | | Uni-ZAP |
| | | | | | | XR |
| S0142 | Macrophage-oxLDL | macrophage- | blood | Cell Line | | Uni-ZAP |
| | | oxidized LDL | | | | XR |
| | | treated | | | | |
| S0144 | Macrophage (GM-CSF | Macrophage (GM- | | | | Uni-ZAP |
| | treated) | CSF treated) | | | | XR |
| S0146 | prostate-edited | prostate BPH | Prostate | | | Uni-ZAP |
| | | | | | | XR |
| S0148 | Normal Prostate | Prostate | prostate | | | Uni-ZAP |
| | | | | | | XR |
| S0150 | LNCAP prostate cell line | LNCAP Cell Line | Prostate | Cell Line | | Uni-ZAP |
| | | | | | | XR |
| S0152 | PC3 Prostate cell line | PC3 prostate cell | | | | Uni-ZAP |
| | | line | | | | XR |
| S0168 | Prostate/LNCAP, | PC3 prostate cell | | | | pBluescript |
| | subtraction I | line | | | | |
| S0174 | Prostate-BPH subtracted II | Human Prostate | | | | pBluescript |
| | | BPH | | | | |
| S0176 | Prostate, normal, | Prostate | prostate | | | Uni-ZAP |
| | subtraction I | | | | | XR |
| S0180 | Bone Marrow Stroma, | Bone Marrow | | | disease | Uni-ZAP |
| | TNF&LPS ind | Stroma, TNF & LPS | | | | XR |
| | | induced | | | | |
| S0182 | Human B Cell 8866 | Human B-Cell 8866 | | | | Uni-ZAP |
| | | | | | | XR |
| S0188 | Prostate, BPH, Lib 2 | Human Prostate | | | disease | pSport1 |
| | | BPH | | | | |
| S0190 | Prostate BPH, Lib 2, | Human Prostate | | | | pSport1 |
| | subtracted | BPH | | | | |
| S0192 | Synovial Fibroblasts | Synovial Fibroblasts | | | | pSport1 |
| | (control) | | | | | |
| S0194 | Synovial hypoxia | Synovial Fibroblasts | | | | pSport1 |
| S0196 | Synovial IL-1/TNF | Synovial Fibroblasts | | | | pSport1 |
| | stimulated | | | | | |
| S0206 | Smooth Muscle-HASTE | Smooth muscle | Pulmanary | Cell Line | | pBluescript |
| | normalized | | artery | | | |
| S0208 | Messangial cell, frac 1 | Messangial cell | | | | pSport1 |
| S0210 | Messangial cell, frac 2 | Messangial cell | | | | pSport1 |
| S0212 | Bone Marrow Stromal | Bone Marrow | | | | pSport1 |
| | Cell, untreated | Stromal | | | | |
| | | Cell, untreated | | | | |
| S0214 | Human Osteoclastoma, re- | Osteoclastoma | bone | | disease | Uni-ZAP |
| | excision | | | | | XR |
| S0216 | Neutrophils IL-1 and LPS | human neutrophil | blood | Cell Line | | Uni-ZAP |
| | induced | induced | | | | XR |
| S0218 | Apoptotic T-cell, re- | apoptotic cells | | Cell Line | | Uni-ZAP |
| | excision | | | | | XR |
| S0220 | H. hypothalamus, frac | Hypothalamus | Brain | | | ZAP |
| | A; re-excision | | | | | Express |
| S0222 | H. Frontal | H. Brain, Frontal | Brain | | disease | Uni-ZAP |
| | cortex, epileptic; re- | Cortex, Epileptic | | | | XR |
| | excision | | | | | |
| S0230 | PYDS | PBLS, 7TM | | | | PCRII |
| | | receptor enriched | | | | |
| S0242 | Synovial Fibroblasts | Synovial Fibroblasts | | | | pSport1 |
| | (Il1/TNF), subt | | | | | |
| S0250 | Human Osteoblasts II | Human Osteoblasts | Femur | | disease | pCMVSport |
| | | | | | | 2.0 |
| S0254 | 7TM-PAMIX | PBLS, 7TM | | | | PCRII |
| | | receptor enriched | | | | |
| S0258 | 7TM-PNMIX | PBLS, 7TM | | | | PCRII |
| | | receptor enriched | | | | |
| S0260 | Spinal Cord, re-excision | Spinal cord | spinal cord | | | Uni-ZAP |
| | | | | | | XR |
| S0262 | PYCS | Human Antrum | | | | PCRII |
| | | (PY_CS) | | | | |
| S0264 | PPMIX | PPMIX (Human | Pituitary | | | PCRII |
| | | Pituitary) | | | | |
| S0268 | PRMIX | PRMIX (Human | prostate | | | PCRII |
| | | Prostate) | | | | |
| S0276 | Synovial hypoxia-RSF | Synovial fobroblasts | Synovial | | | pSport1 |
| | subtracted | (rheumatoid) | tissue | | | |
| S0278 | H Macrophage (GM-CSF | Macrophage (GM- | | | | Uni-ZAP |
| | treated), re-excision | CSF treated) | | | | XR |
| S0280 | Human Adipose Tissue, | Human Adipose | | | | Uni-ZAP |
| | re-excision | Tissue | | | | XR |
| S0282 | Brain Frontal Cortex, re- | Brain frontal cortex | Brain | | | Lambda |
| | excision | | | | | ZAP II |
| S0292 | Osteoarthritis (OA-4) | Human | Bone | | disease | pSport1 |
| | | Osteoarthritic | | | | |
| | | Cartilage | | | | |
| S0294 | Larynx tumor | Larynx tumor | Larynx, vocal | | disease | pSport1 |
| | | | cord | | | |
| S0296 | Normal lung | Normal lung | Lung | | | pSport1 |
| S0298 | Bone marrow | Bone marrow | Bone marrow | | | pSport1 |
| | stroma, treated | stroma, treatedSB | | | | |
| S0300 | Frontal lobe, dementia; re- | Frontal Lobe | Brain | | | Uni-ZAP |
| | excision | dementia/Alzheimer''s | | | | XR |
| S0306 | Larynx normal #10 261-273 | Larynx normal | | | | pSport1 |
| S0308 | Spleen/normal | Spleen normal | | | | pSport1 |
| S0310 | Normal trachea | Normal trachea | | | | pSport1 |
| S0312 | Human | Human | | | disease | pSport1 |
| | osteoarthritic; fraction II | osteoarthritic | | | | |
| | | cartilage | | | | |
| S0314 | Human | Human | | | disease | pSport1 |
| | osteoarthritis; fraction I | osteoarthritic | | | | |
| | | cartilage | | | | |
| S0316 | Human Normal | Human Normal | | | | pSport1 |
| | Cartilage, Fraction I | Cartilage | | | | |
| S0318 | Human Normal Cartilage | Human Normal | | | | pSport1 |
| | Fraction II | Cartilage | | | | |
| S0320 | Human Larynx | Larynx | Epiglottis | | | pSport1 |
| S0322 | Siebben Polyposis | Siebben Polyposis | | | | pSport1 |
| S0324 | Human Brain | Brain | Cerebellum | | | pSport1 |
| S0328 | Palate carcinoma | Palate carcinoma | Uvula | | disease | pSport1 |
| S0330 | Palate normal | Palate normal | Uvula | | | pSport1 |
| S0332 | Pharynx carcinoma | Pharynx carcinoma | Hypopharynx | | | pSport1 |
| S0334 | Human Normal Cartilage | Human Normal | | | | pSport1 |
| | Fraction III | Cartilage | | | | |
| S0336 | Human Normal Cartilage | Human Normal | | | | pSport1 |
| | Fraction IV | Cartilage | | | | |
| S0338 | Human Osteoarthritic | Human | | | disease | pSport1 |
| | Cartilage Fraction III | osteoarthritic | | | | |
| | | cartilage | | | | |
| S0340 | Human Osteoarthritic | Human | | | disease | pSport1 |
| | Cartilage Fraction IV | osteoarthritic | | | | |
| | | cartilage | | | | |
| S0342 | Adipocytes, re-excision | Human Adipocytes | | | | Uni-ZAP |
| | | from Osteoclastoma | | | | XR |
| S0344 | Macrophage-oxLDL; re- | macrophage- | blood | Cell Line | | Uni-ZAP |
| | excision | oxidized LDL | | | | XR |
| | | treated | | | | |
| S0346 | Human Amygdala; re- | Amygdala | | | | Uni-ZAP |
| | excision | | | | | XR |
| S0348 | Cheek Carcinoma | Cheek Carcinoma | | | disease | pSport1 |
| S0350 | Pharynx Carcinoma | Pharynx carcinoma | Hypopharynx | | disease | pSport1 |
| S0352 | Larynx Carcinoma | Larynx carcinoma | | | disease | pSport1 |
| S0354 | Colon Normal II | Colon Normal | Colon | | | pSport1 |
| S0356 | Colon Carcinoma | Colon Carcinoma | Colon | | disease | pSport1 |
| S0358 | Colon Normal III | Colon Normal | Colon | | | pSport1 |
| S0360 | Colon Tumor II | Colon Tumor | Colon | | disease | pSport1 |
| S0362 | Human Gastrocnemius | Gastrocnemius | | | | pSport1 |
| | | muscle | | | | |
| S0364 | Human Quadriceps | Quadriceps muscle | | | | pSport1 |
| S0366 | Human Soleus | Soleus Muscle | | | | pSport1 |
| S0368 | Human Pancreatic | Islets of Langerhans | | | | pSport1 |
| | Langerhans | | | | | |
| S0370 | Larynx carcinoma II | Larynx carcinoma | | | disease | pSport1 |
| S0372 | Larynx carcinoma III | Larynx carcinoma | | | disease | pSport1 |
| S0374 | Normal colon | Normal colon | | | | pSport1 |
| S0376 | Colon Tumor | Colon Tumor | | | disease | pSport1 |
| S0378 | Pancreas normal PCA4 | Pancreas Normal | | | | pSport1 |
| | No | PCA4 No | | | | |
| S0380 | Pancreas Tumor PCA4 Tu | Pancreas Tumor | | | disease | pSport1 |
| | | PCA4 Tu | | | | |
| S0382 | Larynx carcinoma IV | Larynx carcinoma | | | disease | pSport1 |
| S0384 | Tongue carcinoma | Tongue carcinoma | | | disease | pSport1 |
| S0386 | Human Whole Brain, re- | Whole brain | Brain | | | ZAP |
| | excision | | | | | Express |
| S0388 | Human | Human | | | disease | Uni-ZAP |
| | Hypothalamus, schizophrenia, | Hypothalamus, | | | | XR |
| | re-excision | Schizophrenia | | | | |
| S0390 | Smooth muscle, control; | Smooth muscle | Pulmanary | Cell Line | | Uni-ZAP |
| | re-excision | | artery | | | XR |
| S0392 | Salivary Gland | Salivary gland; | | | | pSport1 |
| | | normal | | | | |
| S0394 | Stomach; normal | Stomach; normal | | | | pSport1 |
| S0398 | Testis; normal | Testis; normal | | | | pSport1 |
| S0400 | Brain; normal | Brain; normal | | | | pSport1 |
| S0402 | Adrenal Gland, normal | Adrenal gland; | | | | pSport1 |
| | | normal | | | | |
| S0404 | Rectum normal | Rectum, normal | | | | pSport1 |
| S0406 | Rectum tumour | Rectum tumour | | | | pSport1 |
| S0408 | Colon, normal | Colon, normal | | | | pSport1 |
| S0410 | Colon, tumour | Colon, tumour | | | | pSport1 |
| S0412 | Temporal cortex- | Temporal cortex, | | | disease | Other |
| | Alzheizmer; subtracted | alzheimer | | | | |
| S0414 | Hippocampus, Alzheimer | Hippocampus, | | | | Other |
| | Subtracted | Alzheimer | | | | |
| | | Subtracted | | | | |
| S0418 | CHME Cell Line; treated 5 hrs | CHME Cell Line; | | | | pCMVSport |
| | | treated | | | | 3.0 |
| S0420 | CHME Cell | CHME Cell line, | | | | pSport1 |
| | Line, untreated | untreatetd | | | | |
| S0422 | Mo7e Cell Line GM-CSF | Mo7e Cell Line | | | | pCMVSport |
| | treated (1 ng/ml) | GM-CSF treated | | | | 3.0 |
| | | (1 ng/ml) | | | | |
| S0424 | TF-1 Cell Line GM-CSF | TF-1 Cell Line | | | | pSport1 |
| | Treated | GM-CSF Treated | | | | |
| S0426 | Monocyte activated; re- | Monocyte-activated | blood | Cell Line | | Uni-ZAP |
| | excision | | | | | XR |
| S0428 | Neutrophils control; re- | human neutrophils | blood | Cell Line | | Uni-ZAP |
| | excision | | | | | XR |
| S0430 | Aryepiglottis Normal | Aryepiglottis | | | | pSport1 |
| | | Normal | | | | |
| S0432 | Sinus piniformis Tumour | Sinus piniformis | | | | pSport1 |
| | | Tumour | | | | |
| S0434 | Stomach Normal | Stomach Normal | | | disease | pSport1 |
| S0436 | Stomach Tumour | Stomach Tumour | | | disease | pSport1 |
| S0438 | Liver Normal Met5No | Liver Normal | | | | pSport1 |
| | | Met5No | | | | |
| S0440 | Liver Tumour Met 5 Tu | Liver Tumour | | | | pSport1 |
| S0442 | Colon Normal | Colon Normal | | | | pSport1 |
| S0444 | Colon Tumor | Colon Tumour | | | disease | pSport1 |
| S0446 | Tongue Tumour | Tongue Tumour | | | | pSport1 |
| S0448 | Larynx Normal | Larynx Normal | | | | pSport1 |
| S0450 | Larynx Tumour | Larynx Tumour | | | | pSport1 |
| S0452 | Thymus | Thymus | | | | pSport1 |
| S0454 | Placenta | Placenta | Placenta | | | pSport1 |
| S0456 | Tongue Normal | Tongue Normal | | | | pSport1 |
| S0458 | Thyroid Normal (SDCA2 | Thyroid normal | | | | pSport1 |
| | No) | | | | | |
| S0460 | Thyroid Tumour | Thyroid Tumour | | | | pSport1 |
| S0462 | Thyroid Thyroiditis | Thyroid Thyroiditis | | | | pSport1 |
| S0464 | Larynx Normal | Larynx Normal | | | | pSport1 |
| S0466 | Larynx Tumor | Larynx Tumor | | | disease | pSport1 |
| S0468 | Ea.hy.926 cell line | Ea.hy.926 cell line | | | | pSport1 |
| S0470 | Adenocarcinoma | PYFD | | | disease | pSport1 |
| S0472 | Lung Mesothelium | PYBT | | | | pSport1 |
| S0474 | Human blood platelets | Platelets | Blood | | | Other |
| | | | platelets | | | |
| S0665 | Human Amygdala; re- | Amygdala | | | | Uni-ZAP |
| | excission | | | | | XR |
| S3012 | Smooth Muscle Serum | Smooth muscle | Pulmanary | Cell Line | | pBluescript |
| | Treated, Norm | | artery | | | |
| S3014 | Smooth muscle, serum | Smooth muscle | Pulmanary | Cell Line | | pBluescript |
| | induced, re-exc | | artery | | | |
| S6014 | H. hypothalamus, frac A | Hypothalamus | Brain | | | ZAP |
| | | | | | | Express |
| S6016 | H. Frontal Cortex, | H. Brain, Frontal | Brain | | disease | Uni-ZAP |
| | Epileptic | Cortex, Epileptic | | | | XR |
| S6022 | H. Adipose Tissue | Human Adipose | | | | Uni-ZAP |
| | | Tissue | | | | XR |
| S6024 | Alzheimers, spongy | Alzheimer''s/Spongy | Brain | | disease | Uni-ZAP |
| | change | change | | | | XR |
| S6026 | Frontal Lobe, Dementia | Frontal Lobe | Brain | | | Uni-ZAP |
| | | dementia/Alzheimer''s | | | | XR |
| S6028 | Human Manic Depression | Human Manic | Brain | | disease | Uni-ZAP |
| | Tissue | depression tissue | | | | XR |
| T0001 | Human Brown Fat | Brown Fat | | | | pBluescript |
| | | | | | | SK− |
| T0002 | Activated T-Cells | Activated T-Cell, | Blood | Cell Line | | pBluescript |
| | | PBL fraction | | | | SK− |
| T0003 | Human Fetal Lung | Human Fetal Lung | | | | pBluescript |
| | | | | | | SK− |
| T0004 | Human White Fat | Human White Fat | | | | pBluescript |
| | | | | | | SK− |
| T0006 | Human Pineal Gland | Human Pinneal | | | | pBluescript |
| | | Gland | | | | SK− |
| T0007 | Colon Epithelium | Colon Epithelium | | | | pBluescript |
| | | | | | | ISK− |
| T0008 | Colorectal Tumor | Colorectal Tumor | | | disease | pBluescript |
| | | | | | | SK− |
| T0010 | Human Infant Brain | Human Infant Brain | | | | Other |
| T0023 | Human Pancreatic | Human Pancreatic | | | disease | pBluescript |
| | Carcinoma | Carcinoma | | | | SK− |
| T0039 | HSA 172 Cells | Human HSA172 cell | | | | pBluescript |
| | | line | | | | SK− |
| T0040 | HSC172 cells | SA172 Cells | | | | pBluescript |
| | | | | | | SK− |
| T0041 | Jurkat T-cell G1 phase | Jurkat T-cell | | | | pBluescript |
| | | | | | | SK− |
| T0042 | Jurkat T-Cell, S phase | Jurkat T-Cell Line | | | | pBluescript |
| | | | | | | SK− |
| T0048 | Human Aortic | Human Aortic | | | | pBluescript |
| | Endothelium | Endothilium | | | | SK− |
| T0049 | Aorta endothelial cells + TNF-a | Aorta endothelial | | | | pBluescript |
| | | cells | | | | SK− |
| T0060 | Human White Adipose | Human White Fat | | | | pBluescript |
| | | | | | | SK− |
| T0067 | Human Thyroid | Human Thyroid | | | | pBluescript |
| | | | | | | SK− |
| T0068 | Normal Ovary, | Normal Ovary, | | | | pBluescript |
| | Premenopausal | Premenopausal | | | | SK− |
| T0069 | Human Uterus, normal | Human Uterus, | | | | pBluescript |
| | | normal | | | | SK− |
| T0070 | Human Adrenal Gland | Human Adrenal | | | | pBluescript |
| | | Gland | | | | SK− |
| T0071 | Human Bone Marrow | Human Bone | | | | pBluescript |
| | | Marrow | | | | SK− |
| T0074 | Human Adult Retina | Human Adult Retina | | | | pBluescript |
| | | | | | | ISK− |
| T0078 | Human Liver, normal | Human Liver, | | | | pBluescript |
| | adult | normal Adult | | | | SK− |
| T0079 | Human Kidney, normal | Human Kidney, | | | | pBluescript |
| | Adult | normal Adult | | | | SK− |
| T0082 | Human Adult Retina | Human Adult Retina | | | | pBluescript |
| | | | | | | SK− |
| T0086 | Human Pancreatic | Human Pancreatic | | | disease | pBluescript |
| | Carcinoma - Screened | Carcinoma | | | | SK− |
| T0087 | Alzheimer''s, exon | | | | disease | pAMP |
| | trap, 712P | | | | | |
| T0091 | Liver, hepatocellular | | | | | pBluescript |
| | carcinoma | | | | | SK− |
| T0103 | Human colon carcinoma | | | | | pBluescript |
| | (HCC) cell line | | | | | SK− |
| T0104 | HCC cell line metastisis to | | | | | pBluescript |
| | liver | | | | | SK− |
| T0109 | Human (HCC) cell line | | | | | pBluescript |
| | liver (mouse) metastasis, | | | | | SK− |
| | remake | | | | | |
| T0110 | Human colon carcinoma | | | | | pBluescript |
| | (HCC) cell line, remake | | | | | SK− |
| T0112 | Human (Caco-2) cell line, | | | | | pBluescript |
| | adenocarcinoma, colon | | | | | SK− |
| T0114 | Human (Caco-2) cell line, | | | | | pBluescript |
| | adenocarcinoma, colon, | | | | | SK− |
| | remake | | | | | |
| T0115 | Human Colon Carcinoma | | | | | pBluescript |
| | (HCC) cell line | | | | | SK− |
| L0002 | Atrium cDNA library | | | | | |
| | Human heart | | | | | |
| L0004 | ClonTech HL 1065a | | | | | |
| L0005 | Clontech human aorta | | | | | |
| | polyA+ mRNA (#6572) | | | | | |
| L0015 | Human | | | | | |
| L0017 | Human (J. Swensen) | | | | | |
| L0019 | Human (NSHeiss) | | | | | |
| L0021 | Human adult (K. Okubo) | | | | | |
| L0022 | Human adult lung 3″ | | | | | |
| | directed MboI cDNA | | | | | |
| L0034 | Human chromosome 14 | | | | | |
| L0040 | Human colon mucosa | | | | | |
| L0041 | Human epidermal | | | | | |
| | keratinocyte | | | | | |
| L0045 | Human keratinocyte | | | | | |
| | differential display | | | | | |
| | (B. Lin) | | | | | |
| L0051 | Human mRNA (Tripodis | | | | | |
| | and Ragoussis) | | | | | |
| L0052 | Human normalized K562- | | | | | |
| | cDNA | | | | | |
| L0053 | Human pancreatic tumor | | | | | |
| L0055 | Human promyelocyte | | | | | |
| L0057 | Human RT-PCR | | | | | |
| | (S. Lefebvre) | | | | | |
| L0060 | Human thymus NSTH II | | | | | |
| L0065 | Liver HepG2 cell line. | | | | | |
| L0070 | Selected chromosome 21 | | | | | |
| | cDNA library | | | | | |
| L0097 | Subtracted human retinal | | | | | |
| | pigment epithelium (RPE) | | | | | |
| L0105 | Human aorta polyA+ | aorta | | | | |
| | (TFujiwara) | | | | | |
| L0109 | Human brain cDNA | brain | | | | |
| L0118 | Human fetal brain S. Meier-Ewert | brain | | | | |
| L0126 | Human fibroblast cDNA | fibroblast | | | | |
| L0130 | Human hippocampus, | hippocampus | | | | |
| | Stratagene catalog | | | | | |
| | #936205 | | | | | |
| L0136 | Human neuroepithelium | neuroepithelium | | | | |
| | (N. Jiang) | | | | | |
| L0140 | Human pancreatic cancer | pancreatic cancer | | | | |
| | (CWallrapp) | | | | | |
| L0142 | Human placenta cDNA | placenta | | | | |
| | (TFujiwara) | | | | | |
| L0143 | Human placenta polyA+ | placenta | | | | |
| | (TFujiwara) | | | | | |
| L0146 | Human fovea cDNA | retinal fovea | | | | |
| L0149 | DKFZphsnu1 | subthalamic nucleus | | | | |
| L0155 | Human cord blood | umbilical cord blood | | | | |
| | mononuclear cell mRNA | | | | | |
| L0157 | Human fetal brain | | brain | | | |
| | (TFujiwara) | | | | | |
| L0163 | Human heart cDNA | | heart | | | |
| | (YNakamura) | | | | | |
| L0175 | Human retina cell line | retina | | ARPE-19 | | |
| | ARPE-19 | | | | | |
| L0177 | Human newborn | | | Clonetics | | |
| | melanocytes (T. Vogt) | | | Corp. | | |
| | | | | (San | | |
| | | | | Diego, | | |
| | | | | CA) | | |
| | | | | strain #68 | | |
| | | | | and 2486 | | |
| L0185 | Human immortalized | | | HS74 and | | |
| | fibroblasts (H. L. Ozer) | | | its SV40- | | |
| | | | | transformed | | |
| | | | | sublines | | |
| L0194 | Human pancreatic cancer | pancreatic cancer | | Patu | | |
| | cell line Patu 8988t | | | 8988t | | |
| L0251 | Homo sapiens laryngeal | laryngeal cancer | | | | |
| | cancer | | | | | |
| L0351 | Infant brain, Bento Soares | | | | | BA, M13- |
| | | | | | | derived |
| L0352 | Normalized infant brain, | | | | | BA, M13- |
| | Bento Soares | | | | | derived |
| L0353 | 21q Placenta, F. Tassone | | | | | Bluescript |
| | and K. Gardiner | | | | | |
| L0354 | JG, Human foetal Kidney | | | | | Bluescript |
| | tissue | | | | | |
| L0355 | P, Human foetal Brain | | | | | Bluescript |
| | Whole tissue | | | | | |
| L0356 | S, Human foetal Adrenals | | | | | Bluescript |
| | tissue | | | | | |
| L0357 | V, Human Placenta tissue | | | | | Bluescript |
| | | | | | | KS II+ |
| L0360 | Y, Human Placenta tissue | | | | | Bluescript |
| | | | | | | KS II+ |
| L0361 | Stratagene ovary | | ovary | | | Bluescript |
| | (#937217) | | | | | SK |
| L0362 | Stratagene ovarian cancer | | | | | Bluescript |
| | (#937219) | | | | | SK− |
| L0363 | NCI_CGAP_GC2 | germ cell tumor | | | | Bluescript |
| | | | | | | SK− |
| L0364 | NCI_CGAP_GC5 | germ cell tumor | | | | Bluescript |
| | | | | | | SK− |
| L0365 | NCI_CGAP_Phe1 | pheochromocytoma | | | | Bluescript |
| | | | | | | SK− |
| L0366 | Stratagene schizo brain | schizophrenic brain | | | | Bluescript |
| | S11 | S-11 frontal lobe | | | | SK− |
| L0367 | NCI_CGAP_Sch1 | Schwannoma tumor | | | | Bluescript |
| | | | | | | SK− |
| L0368 | NCI_CGAP_SS1 | synovial sarcoma | | | | Bluescript |
| | | | | | | SK− |
| L0369 | NCI_CGAP_AA1 | adrenal adenoma | adrenal gland | | | Bluescript |
| | | | | | | SK− |
| L0370 | Johnston frontal cortex | pooled frontal lobe | brain | | | Bluescript |
| | | | | | | SK− |
| L0371 | NCI_CGAP_Br3 | breast tumor | breast | | | Bluescript |
| | | | | | | SK− |
| L0372 | NCI_CGAP_Col2 | colon tumor | colon | | | Bluescript |
| | | | | | | SK− |
| L0373 | NCI_CGAP_Col1 | tumor | colon | | | Bluescript |
| | | | | | | SK− |
| L0374 | NCI_CGAP_Co2 | tumor | colon | | | Bluescript |
| | | | | | | SK− |
| L0375 | NCI_CGAP_Kid6 | kidney tumor | kidney | | | Bluescript |
| | | | | | | SK− |
| L0376 | NCI_CGAP_Lar1 | larynx | larynx | | | Bluescript |
| | | | | | | SK− |
| L0377 | NCI_CGAP_HN2 | squamous cell | larynx | | | Bluescript |
| | | carcinoma from | | | | SK− |
| | | vocal cord | | | | |
| L0378 | NCI_CGAP_Lu1 | lung tumor | lung | | | Bluescript |
| | | | | | | SK− |
| L0379 | NCI_CGAP_Lym3 | lymphoma | lymph node | | | Bluescript |
| | | | | | | SK− |
| L0381 | NCI_CGAP_HN4 | squamous cell | pharynx | | | Bluescript |
| | | carcinoma | | | | SK− |
| L0382 | NCI_CGAP_Pr25 | epithelium (cell line) | prostate | | | Bluescript |
| | | | | | | SK− |
| L0383 | NCI_CGAP_Pr24 | invasive tumor (cell | prostate | | | Bluescript |
| | | line) | | | | SK− |
| L0384 | NCI_CGAP_Pr23 | prostate tumor | prostate | | | Bluescript |
| | | | | | | SK− |
| L0385 | NCI_CGAP_Gas1 | gastric tumor | stomach | | | Bluescript |
| | | | | | | SK− |
| L0386 | NCI_CGAP_HN3 | squamous cell | tongue | | | Bluescript |
| | | carcinoma from base | | | | SK− |
| | | of tongue | | | | |
| L0387 | NCI_CGAP_GCB0 | germinal center B- | tonsil | | | Bluescript |
| | | cells | | | | SK− |
| L0388 | NCI_CGAP_HN6 | normal gingiva (cell | | | | Bluescript |
| | | line from | | | | SK− |
| | | immortalized kerati | | | | |
| L0389 | NCI_CGAP_HN5 | normal gingiva (cell | | | | Bluescript |
| | | line from primary | | | | SK− |
| | | keratinocyt | | | | |
| L0393 | B, Human Liver tissue | | | | | gt11 |
| L0394 | H, Human adult Brain | | | | | gt11 |
| | Cortex tissue | | | | | |
| L0411 | 1-NIB | | | | | Lafmid BA |
| L0415 | b4HB3MA Cot8-HAP-Ft | | | | | Lafmid BA |
| L0418 | b4HB3MA-Cot109 + 10- | | | | | Lafmid BA |
| | Bio | | | | | |
| L0422 | b4HB3MA-Cot12-HAP-B | | | | | Lafmid BA |
| L0423 | b4HB3MA-Cot12-HAP-Ft | | | | | Lafmid BA |
| L0426 | b4HB3MA-Cot51.5-HAP- | | | | | Lafmid BA |
| | Ft | | | | | |
| L0430 | Cot250Ft-b4HB3MA | | | | | Lafmid BA |
| L0435 | Infant brain, LLNL array | | | | | lafmid BA |
| | of Dr. M. Soares 1NIB | | | | | |
| L0438 | normalized infant brain | total brain | brain | | | lafmid BA |
| | cDNA | | | | | |
| L0439 | Soares infant brain 1NIB | | whole brain | | | Lafmid BA |
| L0442 | 4HB3MK | | | | | Lafmid BK |
| L0444 | HB3MK | | | | | Lafmid BK |
| L0446 | N4HB3MK | | | | | Lafmid BK |
| L0453 | BATM1 | | | | | lambda |
| | | | | | | gt10 |
| L0454 | Clontech adult human fat | | | | | lambda |
| | cell library HL1108A | | | | | gt10 |
| L0455 | Human retina cDNA | retina | eye | | | lambda |
| | randomly primed | | | | | gt10 |
| | sublibrary | | | | | |
| L0456 | Human retina cDNA | retina | eye | | | lambda |
| | Tsp509I-cleaved | | | | | gt10 |
| | sublibrary | | | | | |
| L0459 | Adult heart, Clontech | | | | | Lambda |
| | | | | | | gt11 |
| L0460 | Adult heart, Lambda gt11 | | | | | Lambda |
| | | | | | | gt11 |
| L0462 | WATM1 | | | | | lambda |
| | | | | | | gt11 |
| L0465 | TEST1, Human adult | | | | | lambda |
| | Testis tissue | | | | | nm1149 |
| L0468 | HE6W | | | | | lambda zap |
| L0469 | T, Human adult | | | | | Lambda |
| | Rhabdomyosarcoma cell- | | | | | Zap |
| | line | | | | | |
| L0471 | Human fetal heart, | | | | | Lambda |
| | Lambda ZAP Express | | | | | ZAP |
| | | | | | | Express |
| L0475 | KG1-a Lambda Zap | | | KG1-a | | Lambda |
| | Express cDNA library | | | | | Zap |
| | | | | | | Express |
| | | | | | | (Stratagene) |
| L0477 | HPLA CCLee | placenta | | | | Lambda |
| | | | | | | ZAP II |
| L0480 | Stratagene cat#937212 | | | | | Lambda |
| | (1992) | | | | | ZAP, |
| | | | | | | pBluescript |
| | | | | | | SK(−) |
| L0481 | CD34+DIRECTIONAL | | | | | Lambda |
| | | | | | | ZAPII |
| L0482 | HT29M6 | | | | | Lambda |
| | | | | | | ZAPII |
| L0483 | Human pancreatic islet | | | | | Lambda |
| | | | | | | ZAPII |
| L0485 | STRATAGENE Human | skeletal muscle | leg muscle | | | Lambda |
| | skeletal muscle cDNA | | | | | ZAPII |
| | library, cat. #936215. | | | | | |
| L0492 | Human Genomic | | | | | pAMP |
| L0493 | NCI_CGAP_Ov26 | papillary serous | ovary | | | pAMP1 |
| | | carcinoma | | | | |
| L0497 | NCI_CGAP_HSC4 | CD34+, CD38− from | bone marrow | | | pAMP1 |
| | | normal bone marrow | | | | |
| | | donor | | | | |
| L0498 | NCI_CGAP_HSC3 | CD34+, T negative, | bone marrow | | | pAMP1 |
| | | patient with chronic | | | | |
| | | myelogenou | | | | |
| L0499 | NCI_CGAP_HSC2 | stem cell 34+/38+ | bone marrow | | | pAMP1 |
| L0500 | NCI_CGAP_Brn20 | oligodendroglioma | brain | | | pAMP1 |
| L0501 | NCI_CGAP_Brn21 | oligodendroglioma | brain | | | pAMP1 |
| L0502 | NCI_CGAP_Br15 | adenocarcinoma | breast | | | pAMP1 |
| L0503 | NCI_CGAP_Br17 | adenocarcinoma | breast | | | pAMP1 |
| L0504 | NCI_CGAP_Br13 | breast carcinoma in | breast | | | pAMP1 |
| | | situ | | | | |
| L0505 | NCI_CGAP_Br12 | invasive carcinoma | breast | | | pAMP1 |
| L0506 | NCI_CGAP_Br16 | lobullar carcinoma | breast | | | pAMP1 |
| | | in situ | | | | |
| L0507 | NCI_CGAP_Br14 | normal epithelium | breast | | | pAMP1 |
| L0508 | NCI_CGAP_Lu25 | bronchioalveolar | lung | | | pAMP1 |
| | | carcinoma | | | | |
| L0509 | NCI_CGAP_Lu26 | invasive | lung | | | pAMP1 |
| | | adenocarcinoma | | | | |
| L0510 | NCI_CGAP_Ov33 | borderline ovarian | ovary | | | pAMP1 |
| | | carcinoma | | | | |
| L0511 | NCI_CGAP_Ov34 | borderline ovarian | ovary | | | pAMP1 |
| | | carcinoma | | | | |
| L0512 | NCI_CGAP_Ov36 | borderline ovarian | ovary | | | pAMP1 |
| | | carcinoma | | | | |
| L0513 | NCI_CGAP_Ov37 | early stage papillary | ovary | | | pAMP1 |
| | | serous carcinoma | | | | |
| L0514 | NCI_CGAP_Ov31 | papillary serous | ovary | | | pAMP1 |
| | | carcinoma | | | | |
| L0515 | NCI_CGAP_Ov32 | papillary serous | ovary | | | pAMP1 |
| | | carcinoma | | | | |
| L0516 | Chromosome 19p12-p13.1 | | | | | pAMP10 |
| | exon | | | | | |
| L0517 | NCI_CGAP_Pr1 | | | | | pAMP10 |
| L0518 | NCI_CGAP_Pr2 | | | | | pAMP10 |
| L0519 | NCI_CGAP_Pr3 | | | | | pAMP10 |
| L0520 | NCI_CGAP_Alv1 | alveolar | | | | pAMP10 |
| | | rhabdomyosarcoma | | | | |
| L0521 | NCI_CGAP_Ew1 | Ewing''s sarcoma | | | | pAMP10 |
| L0522 | NCI_CGAP_Kid1 | kidney | | | | pAMP10 |
| L0523 | NCI_CGAP_Lip2 | liposarcoma | | | | pAMP10 |
| L0524 | NCI_CGAP_Li1 | liver | | | | pAMP10 |
| L0525 | NCI_CGAP_Li2 | liver | | | | pAMP10 |
| L0526 | NCI_CGAP_Pr12 | metastatic prostate | | | | pAMP10 |
| | | bone lesion | | | | |
| L0527 | NCI_CGAP_Ov2 | ovary | | | | pAMP10 |
| L0528 | NCI_CGAP_Pr5 | prostate | | | | pAMP10 |
| L0529 | NCI_CGAP_Pr6 | prostate | | | | pAMP10 |
| L0530 | NCI_CGAP_Pr8 | prostate | | | | pAMP10 |
| L0531 | NCI_CGAP_Pr20 | prostate metastasis, | | | | pAMP10 |
| | | liver | | | | |
| L0532 | NCI_CGAP_Thy1 | thyroid | | | | pAMP10 |
| L0533 | NCI_CGAP_HSC1 | stem cells | bone marrow | | | pAMP10 |
| L0534 | Chromosome 7 Fetal | brain | brain | | | pAMP10 |
| | Brain cDNA Library | | | | | |
| L0535 | NCI_CGAP_Br5 | infiltrating ductal | breast | | | pAMP10 |
| | | carcinoma | | | | |
| L0536 | NCI_CGAP_Br4 | normal ductal tissue | breast | | | pAMP10 |
| L0537 | NCI_CGAP_Ov6 | normal cortical | ovary | | | pAMP10 |
| | | stroma | | | | |
| L0539 | Chromosome 7 Placental | | placenta | | | pAMP10 |
| | cDNA Library | | | | | |
| L0540 | NCI_CGAP_Pr10 | invasive prostate | prostate | | | pAMP10 |
| | | tumor | | | | |
| L0541 | NCI_CGAP_Pr7 | low-grade prostatic | prostate | | | pAMP10 |
| | | neoplasia | | | | |
| L0542 | NCI_CGAP_Pr11 | normal prostatic | prostate | | | pAMP10 |
| | | epithelial cells | | | | |
| L0543 | NCI_CGAP_Pr9 | normal prostatic | prostate | | | pAMP10 |
| | | epithelial cells | | | | |
| L0544 | NCI_CGAP_Pr4 | prostatic | prostate | | | pAMP10 |
| | | intraepithelial | | | | |
| | | neoplasia - high | | | | |
| | | grade | | | | |
| L0545 | NCI_CGAP_Pr4.1 | prostatic | prostate | | | pAMP10 |
| | | intraepithelial | | | | |
| | | neoplasia - high | | | | |
| | | grade | | | | |
| L0546 | NCI_CGAP_Pr18 | stroma | prostate | | | pAMP10 |
| L0547 | NCI_CGAP_Pr16 | tumor | prostate | | | pAMP10 |
| L0549 | NCI_CGAP_HN10 | carcinoma in situ | | | | pAMP10 |
| | | from retromolar | | | | |
| | | trigone | | | | |
| L0550 | NCI_CGAP_HN9 | normal squamous | | | | pAMP10 |
| | | epithelium from | | | | |
| | | retromolar trigone | | | | |
| L0551 | NCI_CGAP_HN7 | normal squamous | | | | pAMP10 |
| | | epithelium, floor of | | | | |
| | | mouth | | | | |
| L0552 | NCI_CGAP_HN8 | well-differentiated | | | | pAMP10 |
| | | invasive carcinoma, | | | | |
| | | floor of m | | | | |
| L0553 | NCI_CGAP_Co22 | colonic | colon | | | pAMP10 |
| | | adenocarcinoma | | | | |
| L0555 | NCI_CGAP_Lu34 | large cell carcinoma | lung | | | pAMP10 |
| L0556 | NCI_CGAP_Lu34.1 | large cell carcinoma | lung | | | pAMP10 |
| L0558 | NCI_CGAP_Ov40 | endometrioid | ovary | | | pAMP10 |
| | | ovarian metastasis | | | | |
| L0559 | NCI_CGAP_Ov39 | papillary serous | ovary | | | pAMP10 |
| | | ovarian metastasis | | | | |
| L0560 | NCI_CGAP_HN12 | moderate to poorly | tongue | | | pAMP10 |
| | | differentiated | | | | |
| | | invasive carcino | | | | |
| L0561 | NCI_CGAP_HN11 | normal squamous | tongue | | | pAMP10 |
| | | epithelium | | | | |
| L0562 | Chromosome 7 HeLa | | | HeLa cell | | pAMP10 |
| | cDNA Library | | | line; | | |
| | | | | ATCC | | |
| L0563 | Human Bone Marrow | bone marrow | | | | pBluescript |
| | Stromal Fibroblast | | | | | |
| L0564 | Jia bone marrow stroma | bone marrow stroma | | | | pBluescript |
| L0565 | Normal Human | Bone | Hip | | | pBluescript |
| | Trabecular Bone Cells | | | | | |
| L0579 | Human fetal brain | cerebrum and | | | | pBluescript |
| | QBoqin2 | cerebellum | | | | SK |
| L0581 | Stratagene liver (#937224) | | liver | | | pBluescript |
| | | | | | | SK |
| L0584 | Stratagene cDNA library | | | | | pBluescript |
| | Human heart, cat#936208 | | | | | SK(+) |
| L0586 | HTCDL1 | | | | | pBluescript |
| | | | | | | SK(−) |
| L0587 | Stratagene colon HT29 | | | | | pBluescript |
| | (#937221) | | | | | SK− |
| L0588 | Stratagene endothelial cell | | | | | pBluescript |
| | 937223 | | | | | SK− |
| L0589 | Stratagene fetal retina | | | | | pBluescript |
| | 937202 | | | | | SK− |
| L0590 | Stratagene fibroblast | | | | | pBluescript |
| | (#937212) | | | | | SK− |
| L0591 | Stratagene HeLa cell s3 | | | | | pBluescript |
| | 937216 | | | | | SK− |
| L0592 | Stratagene hNT neuron | | | | | pBluescript |
| | (#937233) | | | | | SK− |
| L0593 | Stratagene | | | | | pBluescript |
| | neuroepithelium | | | | | SK− |
| | (#937231) | | | | | |
| L0594 | Stratagene | | | | | pBluescript |
| | neuroepithelium | | | | | SK− |
| | NT2RAMI 937234 | | | | | |
| L0595 | Stratagene NT2 neuronal | neuroepithelial cells | brain | | | pBluescript |
| | precursor 937230 | | | | | SK− |
| L0596 | Stratagene colon | | colon | | | pBluescript |
| | (#937204) | | | | | SK− |
| L0597 | Stratagene corneal stroma | | cornea | | | pBluescript |
| | (#937222) | | | | | SK− |
| L0598 | Morton Fetal Cochlea | cochlea | ear | | | pBluescript |
| | | | | | | SK− |
| L0599 | Stratagene lung (#937210) | | lung | | | pBluescript |
| | | | | | | SK− |
| L0600 | Weizmann Olfactory | olfactory epithelium | nose | | | pBluescript |
| | Epithelium | | | | | SK− |
| L0601 | Stratagene pancreas | | pancreas | | | pBluescript |
| | (#937208) | | | | | SK− |
| L0602 | Pancreatic Islet | pancreatic islet | pancreas | | | pBluescript |
| | | | | | | SK− |
| L0603 | Stratagene placenta | | placenta | | | pBluescript |
| | (#937225) | | | | | SK− |
| L0604 | Stratagene muscle 937209 | muscle | skeletal | | | pBluescript |
| | | | muscle | | | SK− |
| L0605 | Stratagene fetal spleen | fetal spleen | spleen | | | pBluescript |
| | (#937205) | | | | | SK− |
| L0606 | NCI_CGAP_Lym5 | follicular lymphoma | lymph node | | | pBluescript |
| | | | | | | SK− |
| L0607 | NCI_CGAP_Lym6 | mantle cell | lymph node | | | pBluescript |
| | | lymphoma | | | | SK− |
| L0608 | Stratagene lung carcinoma | lung carcinoma | lung | NCI-H69 | | pBluescript |
| | 937218 | | | | | SK− |
| L0609 | Schiller astrocytoma | astrocytoma | brain | | | pBluescript |
| | | | | | | SK− |
| | | | | | | (Stratagene) |
| L0611 | Schiller meningioma | meningioma | brain | | | pBluescript |
| | | | | | | SK− |
| | | | | | | (Stratagene) |
| L0612 | Schiller | oligodendroglioma | brain | | | pBluescript |
| | oligodendroglioma | | | | | SK− |
| | | | | | | (Stratagene) |
| L0615 | 22 week old human fetal | | | | | pBluescript |
| | liver cDNA library | | | | | II SK(−) |
| L0617 | Chromosome 22 exon | | | | | pBluescript |
| | | | | | | IIKS+ |
| L0622 | HM1 | | | | | pcDNAII |
| | | | | | | (Invitrogen) |
| L0623 | HM3 | pectoral muscle | | | | pcDNAII |
| | | (after mastectomy) | | | | (Invitrogen) |
| L0625 | NCI_CGAP_AR1 | bulk alveolar tumor | | | | pCMV- |
| | | | | | | SPORT2 |
| L0626 | NCI_CGAP_GC1 | bulk germ cell | | | | pCMV- |
| | | seminoma | | | | SPORT2 |
| L0627 | NCI_CGAP_Co1 | bulk tumor | colon | | | pCMV- |
| | | | | | | SPORT2 |
| L0628 | NCI_CGAP_Ov1 | ovary bulk tumor | ovary | | | pCMV- |
| | | | | | | SPORT2 |
| L0629 | NCI_CGAP_Mel3 | metastatic | bowel (skin | | | pCMV- |
| | | melanoma to bowel | primary) | | | SPORT4 |
| L0630 | NCI_CGAP_CNS1 | substantia nigra | brain | | | pCMV- |
| | | | | | | SPORT4 |
| L0631 | NCI_CGAP_Br7 | | breast | | | pCMV- |
| | | | | | | SPORT4 |
| L0632 | NCI_CGAP_Li5 | hepatic adenoma | liver | | | pCMV- |
| | | | | | | SPORT4 |
| L0633 | NCI_CGAP_Lu6 | small cell carcinoma | lung | | | pCMV- |
| | | | | | | SPORT4 |
| L0634 | NCI_CGAP_Ov8 | serous | ovary | | | pCMV- |
| | | adenocarcinoma | | | | SPORT4 |
| L0635 | NCI_CGAP_PNS1 | dorsal root ganglion | peripheral | | | pCMV- |
| | | | nervous | | | SPORT4 |
| | | | system | | | |
| L0636 | NCI_CGAP_Pit1 | four pooled pituitary | brain | | | pCMV- |
| | | adenomas | | | | SPORT6 |
| L0637 | NCI_CGAP_Brn53 | three pooled | brain | | | pCMV- |
| | | meningiomas | | | | SPORT6 |
| L0638 | NCI_CGAP_Brn35 | tumor, 5 pooled (see | brain | | | pCMV- |
| | | description) | | | | SPORT6 |
| L0639 | NCI_CGAP_Brn52 | tumor, 5 pooled (see | brain | | | pCMV- |
| | | description) | | | | SPORT6 |
| L0640 | NCI_CGAP_Br18 | four pooled high- | breast | | | pCMV- |
| | | grade tumors, | | | | SPORT6 |
| | | including two prima | | | | |
| L0641 | NCI_CGAP_Co17 | juvenile granulosa | colon | | | pCMV- |
| | | tumor | | | | SPORT6 |
| L0642 | NCI_CGAP_Co18 | moderately | colon | | | pCMV- |
| | | differentiated | | | | SPORT6 |
| | | adenocarcinoma | | | | |
| L0643 | NCI_CGAP_Co19 | moderately | colon | | | pCMV- |
| | | differentiated | | | | SPORT6 |
| | | adenocarcinoma | | | | |
| L0644 | NCI_CGAP_Co20 | moderately | colon | | | pCMV- |
| | | differentiated | | | | SPORT6 |
| | | adenocarcinoma | | | | |
| L0645 | NCI_CGAP_Co21 | moderately | colon | | | pCMV- |
| | | differentiated | | | | SPORT6 |
| | | adenocarcinoma | | | | |
| L0646 | NCI_CGAP_Co14 | moderately- | colon | | | pCMV- |
| | | differentiated | | | | SPORT6 |
| | | adenocarcinoma | | | | |
| L0647 | NCI_CGAP_Sar4 | five pooled | connective | | | pCMV- |
| | | sarcomas, including | tissue | | | SPORT6 |
| | | myxoid liposarcoma | | | | |
| L0648 | NCI_CGAP_Eso2 | squamous cell | esophagus | | | pCMV- |
| | | carcinoma | | | | SPORT6 |
| L0649 | NCI_CGAP_GU1 | 2 pooled high-grade | genitourinary | | | pCMV- |
| | | transitional cell | tract | | | SPORT6 |
| | | tumors | | | | |
| L0650 | NCI_CGAP_Kid13 | 2 pooled Wilms'' | kidney | | | pCMV- |
| | | tumors, one primary | | | | SPORT6 |
| | | and one metast | | | | |
| L0651 | NCI_CGAP_Kid8 | renal cell tumor | kidney | | | pCMV- |
| | | | | | | SPORT6 |
| L0652 | NCI_CGAP_Lu27 | four pooled poorly- | lung | | | pCMV- |
| | | differentiated | | | | SPORT6 |
| | | adenocarcinomas | | | | |
| L0653 | NCI_CGAP_Lu28 | two pooled | lung | | | pCMV- |
| | | squamous cell | | | | SPORT6 |
| | | carcinomas | | | | |
| L0654 | NCI_CGAP_Lu31 | | lung, cell line | | | pCMV- |
| | | | | | | SPORT6 |
| L0655 | NCI_CGAP_Lym12 | lymphoma, | lymph node | | | pCMV- |
| | | follicular mixed | | | | SPORT6 |
| | | small and large cell | | | | |
| L0656 | NCI_CGAP_Ov38 | normal epithelium | ovary | | | pCMV- |
| | | | | | | SPORT6 |
| L0657 | NCI_CGAP_Ov23 | tumor, 5 pooled (see | ovary | | | pCMV- |
| | | description) | | | | SPORT6 |
| L0658 | NCI_CGAP_Ov35 | tumor, 5 pooled (see | ovary | | | pCMV- |
| | | description) | | | | SPORT6 |
| L0659 | NCI_CGAP_Pan1 | adenocarcinoma | pancreas | | | pCMV- |
| | | | | | | SPORT6 |
| L0661 | NCI_CGAP_Mel15 | malignant | skin | | | pCMV- |
| | | melanoma, | | | | SPORT6 |
| | | metastatic to lymph | | | | |
| | | node | | | | |
| L0662 | NCI_CGAP_Gas4 | poorly differentiated | stomach | | | pCMV- |
| | | adenocarcinoma | | | | SPORT6 |
| | | with signet r | | | | |
| L0663 | NCI_CGAP_Ut2 | moderately- | uterus | | | pCMV- |
| | | differentiated | | | | SPORT6 |
| | | endometrial | | | | |
| | | adenocarcino | | | | |
| L0664 | NCI_CGAP_Ut3 | poorly-differentiated | uterus | | | pCMV- |
| | | endometrial | | | | SPORT6 |
| | | adenocarcinoma, | | | | |
| L0665 | NCI_CGAP_Ut4 | serous papillary | uterus | | | pCMV- |
| | | carcinoma, high | | | | SPORT6 |
| | | grade, 2 pooled t | | | | |
| L0666 | NCI_CGAP_Ut1 | well-differentiated | uterus | | | pCMV- |
| | | endometrial | | | | SPORT6 |
| | | adenocarcinoma, 7 | | | | |
| L0667 | NCI_CGAP_CML1 | myeloid cells, 18 | whole blood | | | pCMV- |
| | | pooled CML cases, | | | | SPORT6 |
| | | BCR/ABL rearra | | | | |
| L0669 | Human MCF7 cDNA | breast | breast | MCF7 | | pCR II |
| | subtracted with MDA- | adenocarcinoma | | | | [Invitrogen] |
| | MB-231 cDNA | | | | | |
| L0682 | Stanley Frontal NB pool 2 | frontal lobe (see | brain | | | pCR2.1- |
| | | description) | | | | TOPO |
| | | | | | | (Invitrogen) |
| L0684 | Stanley Frontal SB pool 1 | frontal lobe (see | brain | | | pCR2.1- |
| | | description) | | | | TOPO |
| | | | | | | (Invitrogen) |
| L0686 | Stanley Frontal SN pool 2 | frontal lobe (see | brain | | | pCR2.1- |
| | | description) | | | | TOPO |
| | | | | | | (Invitrogen) |
| L0688 | Stanley Hippocampus SB | hippocampus (see | brain | | | pCR2.1- |
| | pool 1 | description) | | | | TOPO |
| | | | | | | (Invitrogen) |
| L0695 | Human Glialblastoma Cell | | Brain | BT-325 | | PCRII, |
| | | | | | | Invitrogen |
| L0697 | Testis 1 | | | | | PGEM |
| | | | | | | 5zf(+) |
| L0698 | Testis 2 | | | | | PGEM |
| | | | | | | 5zf(+) |
| L0708 | NIH_MGC_17 | rhabdomyosarcoma | muscle | | | pOTB7 |
| L0709 | NIH_MGC_21 | choriocarcinoma | placenta | | | pOTB7 |
| L0710 | NIH_MGC_7 | small cell carcinoma | lung | MGC3 | | pOTB7 |
| L0716 | PMA-induced HL60 cell | | | PMA- | | pSPORT 1 |
| | subtraction library | | | induced | | |
| | | | | HL60 | | |
| | | | | human | | |
| | | | | leukemic | | |
| | | | | cell line | | |
| L0717 | Gessler Wilms tumor | | | | | pSPORT1 |
| L0718 | Testis 5 | | | | | pSPORT1 |
| L0731 | Soares_pregnant_uterus_NbHPU | | uterus | | | pT7T3-Pac |
| L0738 | Human colorectal cancer | | | | | pT7T3D |
| L0740 | Soares melanocyte | melanocyte | | | | pT7T3D |
| | 2NbHM | | | | | (Pharmacia) |
| | | | | | | with a |
| | | | | | | modified |
| | | | | | | polylinker |
| L0741 | Soares adult brain | | brain | | | pT7T3D |
| | N2b4HB55Y | | | | | (Pharmacia) |
| | | | | | | with a |
| | | | | | | modified |
| | | | | | | polylinker |
| L0742 | Soares adult brain | | brain | | | pT7T3D |
| | N2b5HB55Y | | | | | (Pharmacia) |
| | | | | | | with a |
| | | | | | | modified |
| | | | | | | polylinker |
| L0743 | Soares breast 2NbHBst | | breast | | | pT7T3D |
| | | | | | | (Pharmacia) |
| | | | | | | with a |
| | | | | | | modified |
| | | | | | | polylinker |
| L0744 | Soares breast 3NbHBst | | breast | | | pT7T3D |
| | | | | | | (Pharmacia) |
| | | | | | | with a |
| | | | | | | modified |
| | | | | | | polylinker |
| L0745 | Soares retina N2b4HR | retina | eye | | | pT7T3D |
| | | | | | | (Pharmacia) |
| | | | | | | with a |
| | | | | | | modified |
| | | | | | | polylinker |
| L0746 | Soares retina N2b5HR | retina | eye | | | pT7T3D |
| | | | | | | (Pharmacia) |
| | | | | | | with a |
| | | | | | | modified |
| | | | | | | polylinker |
| L0747 | Soares_fetal_heart_NbHH19W | | heart | | | pT7T3D |
| | | | | | | (Pharmacia) |
| | | | | | | with a |
| | | | | | | modified |
| | | | | | | polylinker |
| L0748 | Soares fetal liver spleen | | Liver and | | | pT7T3D |
| | 1NFLS | | Spleen | | | (Pharmacia) |
| | | | | | | with a |
| | | | | | | modified |
| | | | | | | polylinker |
| L0749 | Soares_fetal_liver_spleen_1NFLS_S1 | | Liver and | | | pT7T3D |
| | | | Spleen | | | (Pharmacia) |
| | | | | | | with a |
| | | | | | | modified |
| | | | | | | polylinker |
| L0750 | Soares_fetal_lung_NbHL19W | | lung | | | pT7T3D |
| | | | | | | (Pharmacia) |
| | | | | | | with a |
| | | | | | | modified |
| | | | | | | polylinker |
| L0751 | Soares ovary tumor | ovarian tumor | ovary | | | pT7T3D |
| | NbHOT | | | | | (Pharmacia) |
| | | | | | | with a |
| | | | | | | modified |
| | | | | | | polylinker |
| L0752 | Soares_parathyroid_tumor_NbHPA | parathyroid tumor | parathyroid | | | pT7T3D |
| | | | gland | | | (Pharmacia) |
| | | | | | | with a |
| | | | | | | modified |
| | | | | | | polylinker |
| L0753 | Soares_pineal_gland_N3HPG | | pineal gland | | | pT7T3D |
| | | | | | | (Pharmacia) |
| | | | | | | with a |
| | | | | | | modified |
| | | | | | | polylinker |
| L0754 | Soares placenta Nb2HP | | placenta | | | pT7T3D |
| | | | | | | (Pharmacia) |
| | | | | | | with a |
| | | | | | | modified |
| | | | | | | polylinker |
| L0755 | Soares_placenta_8to9weeks_2NbHP8to9W | | placenta | | | pT7T3D |
| | | | | | | (Pharmacia) |
| | | | | | | with a |
| | | | | | | modified |
| | | | | | | polylinker |
| L0756 | Soares_multiple_sclerosis_2NbHMSP | multiple sclerosis | | | | pT7T3D |
| | | lesions | | | | (Pharmacia) |
| | | | | | | with a |
| | | | | | | modified |
| | | | | | | polylinker |
| | | | | | | V_TYPE |
| L0757 | Soares_senescent_fibroblasts_NbHSF | senescent fibroblast | | | | pT7T3D |
| | | | | | | (Pharmacia) |
| | | | | | | with a |
| | | | | | | modified |
| | | | | | | polylinker |
| | | | | | | V_TYPE |
| L0758 | Soares_testis_NHT | | | | | pT7T3D- |
| | | | | | | Pac |
| | | | | | | (Pharmacia) |
| | | | | | | with a |
| | | | | | | modified |
| | | | | | | polylinker |
| L0759 | Soares_total_fetus_Nb2HF8_9w | | | | | pT7T3D- |
| | | | | | | Pac |
| | | | | | | (Pharmacia) |
| | | | | | | with a |
| | | | | | | modified |
| | | | | | | polylinker |
| L0760 | Barstead aorta HPLRB3 | aorta | | | | pT7T3D- |
| | | | | | | Pac |
| | | | | | | (Pharmacia) |
| | | | | | | with a |
| | | | | | | modified |
| | | | | | | polylinker |
| L0761 | NCI_CGAP_CLL1 | B-cell, chronic | | | | pT7T3D- |
| | | lymphotic leukemia | | | | Pac |
| | | | | | | (Pharmacia) |
| | | | | | | with a |
| | | | | | | modified |
| | | | | | | polylinker |
| L0762 | NCI_CGAP_Br1.1 | breast | | | | pT7T3D- |
| | | | | | | Pac |
| | | | | | | (Pharmacia) |
| | | | | | | with a |
| | | | | | | modified |
| | | | | | | polylinker |
| L0763 | NCI_CGAP_Br2 | breast | | | | pT7T3D- |
| | | | | | | Pac |
| | | | | | | (Pharmacia) |
| | | | | | | with a |
| | | | | | | modified |
| | | | | | | polylinker |
| L0764 | NCI_CGAP_Co3 | colon | | | | pT7T3D- |
| | | | | | | Pac |
| | | | | | | (Pharmacia) |
| | | | | | | with a |
| | | | | | | modified |
| | | | | | | polylinker |
| L0765 | NCI_CGAP_Co4 | colon | | | | pT7T3D- |
| | | | | | | Pac |
| | | | | | | (Pharmacia) |
| | | | | | | with a |
| | | | | | | modified |
| | | | | | | polylinker |
| L0766 | NCI_CGAP_GCB1 | germinal center B | | | | pT7T3D- |
| | | cell | | | | Pac |
| | | | | | | (Pharmacia) |
| | | | | | | with a |
| | | | | | | modified |
| | | | | | | polylinker |
| L0767 | NCI_CGAP_GC3 | pooled germ cell | | | | pT7T3D- |
| | | tumors | | | | Pac |
| | | | | | | (Pharmacia) |
| | | | | | | with a |
| | | | | | | modified |
| | | | | | | polylinker |
| L0768 | NCI_CGAP_GC4 | pooled germ cell | | | | pT7T3D- |
| | | tumors | | | | Pac |
| | | | | | | (Pharmacia) |
| | | | | | | with a |
| | | | | | | modified |
| | | | | | | polylinker |
| L0769 | NCI_CGAP_Brn25 | anaplastic | brain | | | pT7T3D- |
| | | oligodendroglioma | | | | Pac |
| | | | | | | (Pharmacia) |
| | | | | | | with a |
| | | | | | | modified |
| | | | | | | polylinker |
| L0770 | NCI_CGAP_Brn23 | glioblastoma | brain | | | pT7T3D- |
| | | (pooled) | | | | Pac |
| | | | | | | (Pharmacia) |
| | | | | | | with a |
| | | | | | | modified |
| | | | | | | polylinker |
| L0771 | NCI_CGAP_Co8 | adenocarcinoma | colon | | | pT7T3D- |
| | | | | | | Pac |
| | | | | | | (Pharmacia) |
| | | | | | | with a |
| | | | | | | modified |
| | | | | | | polylinker |
| L0772 | NCI_CGAP_Co10 | colon tumor RER+ | colon | | | pT7T3D- |
| | | | | | | Pac |
| | | | | | | (Pharmacia) |
| | | | | | | with a |
| | | | | | | modified |
| | | | | | | polylinker |
| L0773 | NCI_CGAP_Co9 | colon tumor RER+ | colon | | | pT7T3D- |
| | | | | | | Pac |
| | | | | | | (Pharmacia) |
| | | | | | | with a |
| | | | | | | modified |
| | | | | | | polylinker |
| L0774 | NCI_CGAP_Kid3 | | kidney | | | pT7T3D- |
| | | | | | | Pac |
| | | | | | | (Pharmacia) |
| | | | | | | with a |
| | | | | | | modified |
| | | | | | | polylinker |
| L0775 | NCI_CGAP_Kid5 | 2 pooled tumors | kidney | | | pT7T3D- |
| | | (clear cell type) | | | | Pac |
| | | | | | | (Pharmacia) |
| | | | | | | with a |
| | | | | | | modified |
| | | | | | | polylinker |
| L0776 | NCI_CGAP_Lu5 | carcinoid | lung | | | pT7T3D- |
| | | | | | | Pac |
| | | | | | | (Pharmacia) |
| | | | | | | with a |
| | | | | | | modified |
| | | | | | | polylinker |
| L0777 | Soares_NhHMPu_S1 | Pooled human | mixed (see | | | pT7T3D- |
| | | melanocyte, fetal | below) | | | Pac |
| | | heart, and pregnant | | | | (Pharmacia) |
| | | | | | | with a |
| | | | | | | modified |
| | | | | | | polylinker |
| L0778 | Barstead pancreas | | pancreas | | | pT7T3D- |
| | HPLRB1 | | | | | Pac |
| | | | | | | (Pharmacia) |
| | | | | | | with a |
| | | | | | | modified |
| | | | | | | polylinker |
| L0779 | Soares_NFL_T_GBC_S1 | | pooled | | | pT7T3D- |
| | | | | | | Pac |
| | | | | | | (Pharmacia) |
| | | | | | | with a |
| | | | | | | modified |
| | | | | | | polylinker |
| L0780 | Soares_NSF_F8_9W_OT_PA_P_S1 | | pooled | | | pT7T3D- |
| | | | | | | Pac |
| | | | | | | (Pharmacia) |
| | | | | | | with a |
| | | | | | | modified |
| | | | | | | polylinker |
| L0782 | NCI_CGAP_Pr21 | normal prostate | prostate | | | pT7T3D- |
| | | | | | | Pac |
| | | | | | | (Pharmacia) |
| | | | | | | with a |
| | | | | | | modified |
| | | | | | | polylinker |
| L0783 | NCI_CGAP_Pr22 | normal prostate | prostate | | | pT7T3D- |
| | | | | | | Pac |
| | | | | | | (Pharmacia) |
| | | | | | | with a |
| | | | | | | modified |
| | | | | | | polylinker |
| L0784 | NCI_CGAP_Lei2 | leiomyosarcoma | soft tissue | | | pT7T3D- |
| | | | | | | Pac |
| | | | | | | (Pharmacia) |
| | | | | | | with a |
| | | | | | | modified |
| | | | | | | polylinker |
| L0785 | Barstead spleen HPLRB2 | | spleen | | | pT7T3D- |
| | | | | | | Pac |
| | | | | | | (Pharmacia) |
| | | | | | | with a |
| | | | | | | modified |
| | | | | | | polylinker |
| L0786 | Soares_NbHFB | | whole brain | | | pT7T3D- |
| | | | | | | Pac |
| | | | | | | (Pharmacia) |
| | | | | | | with a |
| | | | | | | modified |
| | | | | | | polylinker |
| L0787 | NCI_CGAP_Sub1 | | | | | pT7T3D- |
| | | | | | | Pac |
| | | | | | | (Pharmacia) |
| | | | | | | with a |
| | | | | | | modified |
| | | | | | | polylinker |
| L0788 | NCI_CGAP_Sub2 | | | | | pT7T3D- |
| | | | | | | Pac |
| | | | | | | (Pharmacia) |
| | | | | | | with a |
| | | | | | | modified |
| | | | | | | polylinker |
| L0789 | NCI_CGAP_Sub3 | | | | | pT7T3D- |
| | | | | | | Pac |
| | | | | | | (Pharmacia) |
| | | | | | | with a |
| | | | | | | modified |
| | | | | | | polylinker |
| L0790 | NCI_CGAP_Sub4 | | | | | pT7T3D- |
| | | | | | | Pac |
| | | | | | | (Pharmacia) |
| | | | | | | with a |
| | | | | | | modified |
| | | | | | | polylinker |
| L0791 | NCI_CGAP_Sub5 | | | | | pT7T3D- |
| | | | | | | Pac |
| | | | | | | (Pharmacia) |
| | | | | | | with a |
| | | | | | | modified |
| | | | | | | polylinker |
| L0792 | NCI_CGAP_Sub6 | | | | | pT7T3D- |
| | | | | | | Pac |
| | | | | | | (Pharmacia) |
| | | | | | | with a |
| | | | | | | modified |
| | | | | | | polylinker |
| L0793 | NCI_CGAP_Sub7 | | | | | pT7T3D- |
| | | | | | | Pac |
| | | | | | | (Pharmacia) |
| | | | | | | with a |
| | | | | | | modified |
| | | | | | | polylinker |
| L0794 | NCI_CGAP_GC6 | pooled germ cell | | | | pT7T3D- |
| | | tumors | | | | Pac |
| | | | | | | (Pharmacia) |
| | | | | | | with a |
| | | | | | | modified |
| | | | | | | polylinker |
| L0796 | NCI_CGAP_Brn50 | medulloblastoma | brain | | | pT7T3D- |
| | | | | | | Pac |
| | | | | | | (Pharmacia) |
| | | | | | | with a |
| | | | | | | modified |
| | | | | | | polylinker |
| L0800 | NCI_CGAP_Co16 | colon tumor, RER+ | colon | | | pT7T3D- |
| | | | | | | Pac |
| | | | | | | (Pharmacia) |
| | | | | | | with a |
| | | | | | | modified |
| | | | | | | polylinker |
| L0803 | NCI_CGAP_Kid11 | | kidney | | | pT7T3D- |
| | | | | | | Pac |
| | | | | | | (Pharmacia) |
| | | | | | | with a |
| | | | | | | modified |
| | | | | | | polylinker |
| L0804 | NCI_CGAP_Kid12 | 2 pooled tumors | kidney | | | pT7T3D- |
| | | (clear cell type) | | | | Pac |
| | | | | | | (Pharmacia) |
| | | | | | | with a |
| | | | | | | modified |
| | | | | | | polylinker |
| L0805 | NCI_CGAP_Lu24 | carcinoid | lung | | | pT7T3D- |
| | | | | | | Pac |
| | | | | | | (Pharmacia) |
| | | | | | | with a |
| | | | | | | modified |
| | | | | | | polylinker |
| L0806 | NCI_CGAP_Lu19 | squamous cell | lung | | | pT7T3D- |
| | | carcinoma, poorly | | | | Pac |
| | | differentiated (4 | | | | (Pharmacia) |
| | | | | | | with a |
| | | | | | | modified |
| | | | | | | polylinker |
| L0807 | NCI_CGAP_Ov18 | fibrotheoma | ovary | | | pT7T3D- |
| | | | | | | Pac |
| | | | | | | (Pharmacia) |
| | | | | | | with a |
| | | | | | | modified |
| | | | | | | polylinker |
| L0808 | Barstead prostate BPH | | prostate | | | pT7T3D- |
| | HPLRB4 1 | | | | | Pac |
| | | | | | | (Pharmacia) |
| | | | | | | with a |
| | | | | | | modified |
| | | | | | | polylinker |
| L0809 | NCI_CGAP_Pr28 | | prostate | | | pT7T3D- |
| | | | | | | Pac |
| | | | | | | (Pharmacia) |
| | | | | | | with a |
| | | | | | | modified |
| | | | | | | polylinker |
| L0811 | BATM2 | | | | | PTZ18 |
| L0946 | BT0333 | | breast | | | puc18 |
| L1430 | CT0225 | | colon | | | puc18 |
| L1441 | CT0249 | | colon | | | puc18 |
| L1446 | CT0254 | | colon | | | puc18 |
| L1477 | CT0297 | | colon | | | puc18 |
| L1562 | CN0027 | | colon_normal | | | puc18 |
| L1577 | CN0048 | | colon_normal | | | puc18 |
| L1584 | DT0001 | | denis_drash | | | puc18 |
| L1727 | HT0158 | | head_neck | | | puc18 |
| L1772 | HT0209 | | head_neck | | | puc18 |
| L1788 | HT0229 | | head_neck | | | puc18 |
| L1789 | HT0230 | | head_neck | | | puc18 |
| L1808 | HT0256 | | head_neck | | | puc18 |
| L1876 | HT0339 | | head_neck | | | puc18 |
| L1886 | HT0350 | | head_neck | | | puc18 |
| L1942 | HT0452 | | head_neck | | | puc18 |
| L1948 | HT0470 | | head_neck | | | puc18 |
| L2093 | ST0124 | | stomach | | | puc18 |
| L2094 | ST0125 | | stomach | | | puc18 |
| L2138 | ST0186 | | stomach | | | puc18 |
| L2174 | ST0240 | | stomach | | | puc18 |
| L2200 | ST0281 | | stomach | | | puc18 |
| L2210 | ST0293 | | stomach | | | puc18 |
| L2242 | subtracted 3″ EST library | | pancreas | AsPC- | | pUC18 |
| | | | | 1(ATCC: | | |
| | | | | CRL- | | |
| | | | | 1682) | | |
| L2250 | Human cerebral cortex | cerebral cortex | | | | |
| L2251 | Human fetal lung | Fetal lung | | | | |
| L2252 | Human placenta | placenta | | | | |
| L2255 | GLC | corresponding non | | | | pBluescript |
| | | cancerous liver | | | | sk(−) |
| | | tissue | | | | |
| L2257 | NIH_MGC_65 | adenocarcinoma | colon | | | pCMV- |
| | | | | | | SPORT6 |
| L2258 | NIH_MGC_67 | retinoblastoma | eye | | | pCMV- |
| | | | | | | SPORT6 |
| L2259 | NIH_MGC_68 | large cell carcinoma | lung | | | pCMV- |
| | | | | | | SPORT6 |
| L2260 | NIH_MGC_69 | large cell carcinoma, | lung | | | pCMV- |
| | | undifferentiated | | | | SPORT6 |
| L2261 | NIH_MGC_70 | epithelioid | pancreas | | | pCMV- |
| | | carcinoma | | | | SPORT6 |
| L2262 | NIH_MGC_72 | melanotic melanoma | skin | | | pCMV- |
| | | | | | | SPORT6 |
| L2263 | NIH_MGC_66 | adenocarcinoma | ovary | | | pCMV- |
| | | | | | | SPORT6 |
| L2264 | NIH_MGC_71 | leiomyosarcoma | uterus | | | pCMV- |
| | | | | | | SPORT6 |
| L2265 | NIH_MGC_39 | adenocarcinoma | pancreas | | | pOTB7 |
| L2270 | Lupski_dorsal_root_ganglion | dorsal root ganglia | | | | pCMV- |
| | | | | | | SPORT6 |
| | | | | | | (Life |
| | | | | | | Technologies) |
| L2279 | BT0659 | | breast | | | puc18 |
| L2282 | BT0703 | | breast | | | puc18 |
| L2286 | BT0729 | | breast | | | puc18 |
| L2300 | BT0789 | | breast | | | puc18 |
| L2308 | CT0383 | | colon | | | puc18 |
| L2310 | CT0389 | | colon | | | puc18 |
| L2319 | CT0402 | | colon | | | puc18 |
| L2332 | CT0416 | | colon | | | puc18 |
| L2338 | CT0432 | | colon | | | puc18 |
| L2357 | UT0021 | | uterus_tumor | | | puc18 |
| L2361 | UT0028 | | uterus_tumor | | | puc18 |
| L2366 | UT0038 | | uterus_tumor | | | puc18 |
| L2377 | NN0054 | | nervous_normal | | | puc18 |
| L2382 | NN0073 | | nervous_normal | | | puc18 |
| L2389 | NN0087 | | nervous_normal | | | puc18 |
| L2400 | NN0116 | | nervous_normal | | | puc18 |
| L2435 | NN1006 | | nervous_normal | | | puc18 |
| L2438 | NN1021 | | nervous_normal | | | puc18 |
| L2439 | NN1022 | | nervous_normal | | | puc18 |
| L2440 | NN1023 | | nervous_normal | | | puc18 |
| L2464 | NN1104 | | nervous_normal | | | puc18 |
| L2477 | HT0408 | | head_neck | | | puc18 |
| L2490 | HT0545 | | head_neck | | | puc18 |
| L2491 | HT0559 | | head_neck | | | puc18 |
| L2493 | HT0576 | | head_neck | | | puc18 |
| L2494 | HT0577 | | head_neck | | | puc18 |
| L2495 | HT0594 | | head_neck | | | puc18 |
| L2497 | HT0618 | | head_neck | | | puc18 |
| L2498 | HT0619 | | head_neck | | | puc18 |
| L2499 | HT0622 | | head_neck | | | puc18 |
| L2500 | HT0623 | | head_neck | | | puc18 |
| L2502 | HT0628 | | head_neck | | | puc18 |
| L2504 | HT0636 | | head_neck | | | puc18 |
| L2506 | HT0638 | | head_neck | | | puc18 |
| L2513 | HT0678 | | head_neck | | | puc18 |
| L2516 | HT0686 | | head_neck | | | puc18 |
| L2518 | HT0697 | | head_neck | | | puc18 |
| L2519 | HT0698 | | head_neck | | | puc18 |
| L2521 | HT0702 | | head_neck | | | puc18 |
| L2522 | HT0704 | | head_neck | | | puc18 |
| L2525 | HT0710 | | head_neck | | | puc18 |
| L2539 | HT0727 | | head_neck | | | puc18 |
| L2540 | HT0728 | | head_neck | | | puc18 |
| L2541 | HT0730 | | head_neck | | | puc18 |
| L2543 | HT0734 | | head_neck | | | puc18 |
| L2545 | HT0736 | | head_neck | | | puc18 |
| L2550 | HT0743 | | head_neck | | | puc18 |
| L2559 | HT0757 | | head_neck | | | puc18 |
| L2564 | HT0762 | | head_neck | | | puc18 |
| L2565 | HT0764 | | head_neck | | | puc18 |
| L2570 | HT0771 | | head_neck | | | puc18 |
| L2578 | HT0785 | | head_neck | | | puc18 |
| L2630 | HT0865 | | head_neck | | | puc18 |
| L2635 | HT0875 | | head_neck | | | puc18 |
| L2637 | HT0877 | | head_neck | | | puc18 |
| L2638 | HT0878 | | head_neck | | | puc18 |
| L2640 | HT0881 | | head_neck | | | puc18 |
| L2644 | HT0886 | | head_neck | | | puc18 |
| L2646 | HT0893 | | head_neck | | | puc18 |
| L2647 | HT0894 | | head_neck | | | puc18 |
| L2649 | HT0905 | | head_neck | | | puc18 |
| L2650 | HT0934 | | head_neck | | | puc18 |
| L2651 | NIH_MGC_20 | melanotic melanoma | skin | | | pOTB7 |
| L2652 | NIH_MGC_57 | glioblastoma | brain | | | pDNR-LIB |
| | | | | | | (Clontech) |
| L2653 | NIH_MGC_58 | hypernephroma | kidney | | | pDNR-LIB |
| | | | | | | (Clontech) |
| L2654 | NIH_MGC_9 | adenocarcinoma cell | ovary | | | pOTB7 |
| | | line | | | | |
| L2655 | NIH_MGC_55 | from acute | bone marrow | | | pDNR-LIB |
| | | myelogenous | | | | (Clontech) |
| | | leukemia | | | | |
| L2657 | NIH_MGC_54 | from chronic | bone marrow | | | pDNR-LIB |
| | | myelogenous | | | | (Clontech) |
| | | leukemia | | | | |
| L2661 | DT0078 | | denis_drash | | | puc18 |
| L2667 | NT0013 | | nervous_tumor | | | puc18 |
| L2668 | NT0018 | | nervous_tumor | | | puc18 |
| L2669 | NT0022 | | nervous_tumor | | | puc18 |
| L2670 | NT0023 | | nervous_tumor | | | puc18 |
| L2671 | NT0024 | | nervous_tumor | | | puc18 |
| L2674 | NT0029 | | nervous_tumor | | | puc18 |
| L2677 | NT0039 | | nervous_tumor | | | puc18 |
| L2681 | NT0048 | | nervous_tumor | | | puc18 |
| L2686 | NT0058 | | nervous_tumor | | | puc18 |
| L2702 | NT0098 | | nervous_tumor | | | puc18 |
| L2703 | NT0099 | | nervous_tumor | | | puc18 |
| L2706 | NT0102 | | nervous_tumor | | | puc18 |
| L2708 | NT0T04 | | nervous_tumor | | | puc18 |
| L2716 | NT0117 | | nervous_tumor | | | puc18 |
| L2734 | GN0042 | | placenta_normal | | | puc18 |
| L2738 | GN0049 | | placenta_normal | | | puc18 |
| L2744 | FT0004 | | prostate_tumor | | | puc18 |
| L2754 | FT0022 | | prostate_tumor | | | puc18 |
| L2756 | FT0024 | | prostate_tumor | | | puc18 |
| L2757 | FT0025 | | prostate_tumor | | | puc18 |
| L2766 | FT0042 | | prostate_tumor | | | puc18 |
| L2771 | FT0050 | | prostate_tumor | | | puc18 |
| L2775 | FT0054 | | prostate_tumor | | | puc18 |
| L2777 | FT0056 | | prostate_tumor | | | puc18 |
| L2785 | FT0068 | | prostate_tumor | | | puc18 |
| L2787 | FT0070 | | prostate_tumor | | | puc18 |
| L2788 | FT0071 | | prostate_tumor | | | puc18 |
| L2789 | FT0073 | | prostate_tumor | | | puc18 |
| L2791 | FT0077 | | prostate_tumor | | | puc18 |
| L2797 | FT0093 | | prostate_tumor | | | puc18 |
| L2799 | FT0096 | | prostate_tumor | | | puc18 |
| L2804 | FT0103 | | prostate_tumor | | | puc18 |
| L2812 | FT0123 | | prostate_tumor | | | puc18 |
| L2815 | FT0129 | | prostate_tumor | | | puc18 |
| L2819 | FT0134 | | prostate_tumor | | | puc18 |
| L2827 | FT0153 | | prostate_tumor | | | puc18 |
| L2836 | FT0169 | | prostate_tumor | | | puc18 |
| L2847 | UM0023 | | uterus | | | puc18 |
| L2851 | UM0076 | | uterus | | | puc18 |
| L2852 | UM0077 | | uterus | | | puc18 |
| L2853 | UM0081 | | uterus | | | puc18 |
| L2854 | UM0091 | | uterus | | | puc18 |
| L2865 | AN0004 | | amnion_normal | | | puc18 |
| L2869 | AN0012 | | amnion_normal | | | puc18 |
| L2878 | AN0029 | | amnion_normal | | | puc18 |
| L2884 | AN0041 | | amnion_normal | | | puc18 |
| L2893 | AN0062 | | amnion_normal | | | puc18 |
| L2899 | AN0094 | | amnion_normal | | | puc18 |
| L2902 | BN0036 | | breast_normal | | | puc18 |
| L2904 | BN0042 | | breast_normal | | | puc18 |
| L2910 | BN0070 | | breast_normal | | | puc18 |
| L2919 | BN0115 | | breast_normal | | | puc18 |
| L2924 | BN0138 | | breast_normal | | | puc18 |
| L2938 | BN0174 | | breast_normal | | | puc18 |
| L2945 | BN0190 | | breast_normal | | | puc18 |
| L2987 | BN0259 | | breast_normal | | | puc18 |
| L2990 | BN0263 | | breast_normal | | | puc18 |
| L2995 | BN0269 | | breast_normal | | | puc18 |
| L2999 | BN0273 | | breast_normal | | | puc18 |
| L3002 | BN0276 | | breast_normal | | | puc18 |
| L3010 | BN0294 | | breast_normal | | | puc18 |
| L3019 | BN0303 | | breast_normal | | | puc18 |
| L3020 | BN0304 | | breast_normal | | | puc18 |
| L3041 | BN0332 | | breast_normal | | | puc18 |
| L3054 | BN1058 | | breast_normal | | | puc18 |
| L3061 | EN0009 | | lung_normal | | | puc18 |
| L3065 | EN0014 | | lung_normal | | | puc18 |
| L3067 | EN0022 | | lung_normal | | | puc18 |
| L3071 | EN0026 | | lung_normal | | | puc18 |
| L3072 | EN0027 | | lung_normal | | | puc18 |
| L3082 | ET0008 | | lung_tumor | | | puc18 |
| L3087 | ET0016 | | lung_tumor | | | puc18 |
| L3089 | ET0018 | | lung_tumor | | | puc18 |
| L3092 | ET0023 | | lung_tumor | | | puc18 |
| L3095 | ET0027 | | lung_tumor | | | puc18 |
| L3104 | ET0041 | | lung_tumor | | | puc18 |
| L3109 | ET0046 | | lung_tumor | | | puc18 |
| L3114 | ET0063 | | lung_tumor | | | puc18 |
| L3117 | ET0068 | | lung_tumor | | | puc18 |
| L3119 | ET0072 | | lung_tumor | | | puc18 |
| L3140 | MT0031 | | marrow | | | puc18 |
| L3146 | MT0037 | | marrow | | | puc18 |
| L3157 | MT0056 | | marrow | | | puc18 |
| L3160 | MT0059 | | marrow | | | puc18 |
| L3162 | MT0061 | | marrow | | | puc18 |
| L3181 | MT0107 | | marrow | | | puc18 |
| L3187 | MT0114 | | marrow | | | puc18 |
| L3204 | OT0034 | | ovary | | | puc18 |
| L3207 | OT0063 | | ovary | | | puc18 |
| L3209 | OT0065 | | ovary | | | puc18 |
| L3210 | OT0067 | | ovary | | | puc18 |
| L3214 | OT0079 | | ovary | | | puc18 |
| L3215 | OT0083 | | ovary | | | puc18 |
| L3216 | OT0086 | | ovary | | | puc18 |
| L3217 | OT0091 | | ovary | | | puc18 |
| L3229 | FN0022 | | prostate_normal | | | puc18 |
| L3234 | FN0028 | | prostate_normal | | | puc18 |
| L3257 | FN0067 | | prostate_normal | | | puc18 |
| L3269 | FN0089 | | prostate_normal | | | puc18 |
| L3275 | FN0100 | | prostate_normal | | | puc18 |
| L3297 | FN0140 | | prostate_normal | | | puc18 |
| L3311 | FN0180 | | prostate_normal | | | puc18 |
| L3316 | FN0188 | | prostate_normal | | | puc18 |
| L3325 | SN0020 | | stomach_normal | | | puc18 |
| L3330 | SN0041 | | stomach_normal | | | puc18 |
| L3352 | TN0027 | | testis_normal | | | puc18 |
| L3355 | TN0032 | | testis_normal | | | puc18 |
| L3357 | TN0034 | | testis_normal | | | puc18 |
| L3370 | TN0066 | | testis_normal | | | puc18 |
| L3377 | TN0079 | | testis_normal | | | puc18 |
| L3378 | TN0080 | | testis_normal | | | puc18 |
| L3385 | Homo sapiens HeLa | | | HeLa | | |
| L3387 | GKB | hepatocellular | | | | pBluescript |
| | | carcinoma | | | | sk(−) |
| L3388 | GKC | hepatocellular | | | | pBluescript |
| | | carcinoma | | | | sk(−) |
| L3389 | GKD | hepatocellular | | | | pBluescript |
| | | carcinoma | | | | sk(−) |
| L3391 | NIH_MGC_53 | carcinoma, cell line | bladder | | | pDNR-LIB |
| | | | | | | (Clontech) |
| L3402 | AN0086 | | amnion_normal | | | puc18 |
| L3403 | AN0087 | | amnion_normal | | | puc18 |
| L3404 | AN0089 | | amnion_normal | | | puc18 |
| L3428 | BT0738 | | breast | | | puc18 |
| L3432 | CT0461 | | colon | | | puc18 |
| L3435 | CT0465 | | colon | | | puc18 |
| L3439 | CT0478 | | colon | | | puc18 |
| L3443 | CT0482 | | colon | | | puc18 |
| L3450 | CT0508 | | colon | | | puc18 |
| L3463 | GN0016 | | placenta_normal | | | puc18 |
| L3467 | GN0024 | | placenta_normal | | | puc18 |
| L3470 | GN0029 | | placenta_normal | | | puc18 |
| L3474 | GN0040 | | placenta_normal | | | puc18 |
| L3480 | GN0057 | | placenta_normal | | | puc18 |
| L3484 | GN0067 | | placenta_normal | | | puc18 |
| L3485 | GN0070 | | placenta_normal | | | puc18 |
| L3486 | GN0071 | | placenta_normal | | | puc18 |
| L3488 | GN0073 | | placenta_normal | | | puc18 |
| L3494 | HT0539 | | head_neck | | | puc18 |
| L3496 | HT0572 | | head_neck | | | puc18 |
| L3499 | HT0617 | | head_neck | | | puc18 |
| L3503 | HT0870 | | head_neck | | | puc18 |
| L3504 | HT0873 | | head_neck | | | puc18 |
| L3516 | HT0913 | | head_neck | | | puc18 |
| L3522 | HT0923 | | head_neck | | | puc18 |
| L3540 | MT0126 | | marrow | | | puc18 |
| L3547 | NN0045 | | nervous_normal | | | puc18 |
| L3554 | OT0035 | | ovary | | | puc18 |
| L3556 | SN0072 | | stomach_normal | | | puc18 |
| L3561 | TN0025 | | testis_normal | | | puc18 |
| L3562 | TN0030 | | testis_normal | | | puc18 |
| L3563 | TN0037 | | testis_normal | | | puc18 |
| L3566 | TN0046 | | testis_normal | | | puc18 |
| L3580 | TN0098 | | testis_normal | | | puc18 |
| L3586 | TN0120 | | testis_normal | | | puc18 |
| L3603 | UM0093 | | uterus | | | puc18 |
| L3604 | UM0095 | | uterus | | | puc18 |
| L3609 | UT0007 | | uterus_tumor | | | puc18 |
| L3610 | UT0009 | | uterus_tumor | | | puc18 |
| L3612 | UT0011 | | uterus_tumor | | | puc18 |
| L3618 | UT0050 | | uterus_tumor | | | puc18 |
| L3626 | UT0064 | | uterus_tumor | | | puc18 |
| L3632 | UT0074 | | uterus_tumor | | | puc18 |
| L3633 | UT0082 | | uterus_tumor | | | puc18 |
| L3634 | NIH_MGC_56 | primitive | brain | | | pDNR-LIB |
| | | neuroectoderm | | | | (Clontech) |
| L3636 | NIH_MGC_73 | | brain | | | pDNR-LIB |
| | | | | | | (Clontech) |
| L3638 | NIH_MGC_78 | | pancreas | | | pDNR-LIB |
| | | | | | | (Clontech) |
| L3641 | NIH_MGC_83 | | prostate | | | pDNR-LIB |
| | | | | | | (Clontech) |
| L3642 | ADA | Adrenal gland | | | | pBluescript |
| | | | | | | sk(−) |
| L3643 | ADB | Adrenal gland | | | | pBluescript |
| | | | | | | sk(−) |
| L3644 | ADC | Adrenal gland | | | | pBluescript |
| | | | | | | sk(−) |
| L3645 | Cu | adrenal cortico | | | | pBluescript |
| | | adenoma for | | | | sk(−) |
| | | Cushing''s syndrome | | | | |
| L3646 | DCA | | | | | pTriplEx2 |
| L3649 | DCB | | | | | pTriplEx2 |
| L3653 | HTB | Hypothalamus | | | | pBluescript |
| | | | | | | sk(−) |
| L3655 | HTC | Hypothalamus | | | | pBluescript |
| | | | | | | sk(−) |
| L3656 | HTE | Hypothalamus | | | | pBluescript |
| | | | | | | sk(−) |
| L3657 | HTF | Hypothalamus | | | | pBluescript |
| | | | | | | sk(−) |
| L3658 | cdA | pheochromocytoma | | | | pTriplEx2 |
| L3659 | CB | cord blood | | | | pBluescript |
| L3661 | NPA | pituitary | | | | pBluescript |
| | | | | | | sk(−) |
| L3663 | NIH_MGC_60 | adenocarcinoma | prostate | | | pDNR-LIB |
| | | | | | | (Clontech) |
| L3665 | NIH_MGC_75 | | kidney | | | pDNR-LIB |
| | | | | | | (Clontech) |
| L3666 | NIH_MGC_77 | | lung | | | pDNR-LIB |
| | | | | | | (Clontech) |
| L3667 | NIH_MGC_79 | | placenta | | | pDNR-LIB |
| | | | | | | (Clontech) |
| L3671 | AN0082 | | amnion_normal | | | puc18 |
| L3672 | AN0083 | | amnion_normal | | | puc18 |
| L3673 | AN0084 | | amnion_normal | | | puc18 |
| L3674 | BN0376 | | breast_normal | | | puc18 |
| L3679 | BN0395 | | breast_normal | | | puc18 |
| L3683 | BT0734 | | breast | | | puc18 |
| L3695 | CS0010 | | colon_est | | | puc18 |
| L3697 | CS0012 | | colon_est | | | puc18 |
| L3699 | CT0437 | | colon | | | puc18 |
| L3703 | CT0458 | | colon | | | puc18 |
| L3705 | CT0486 | | colon | | | puc18 |
| L3709 | CT0515 | | colon | | | puc18 |
| L3714 | CT0527 | | colon | | | puc18 |
| L3726 | GN0038 | | placenta_normal | | | puc18 |
| L3729 | GN0079 | | placenta_normal | | | puc18 |
| L3738 | GN0092 | | placenta_normal | | | puc18 |
| L3739 | HT0540 | | head_neck | | | puc18 |
| L3740 | HT0541 | | head_neck | | | puc18 |
| L3742 | HT0908 | | head_neck | | | puc18 |
| L3745 | HT0920 | | head_neck | | | puc18 |
| L3750 | HT0945 | | head_neck | | | puc18 |
| L3752 | HT0947 | | head_neck | | | puc18 |
| L3758 | NN1082 | | nervous_normal | | | puc18 |
| L3761 | NN1141 | | nervous_normal | | | puc18 |
| L3766 | TN0071 | | testis_normal | | | puc18 |
| L3780 | TN0115 | | testis_normal | | | puc18 |
| L3783 | TN0136 | | testis_normal | | | puc18 |
| L3787 | TN0141 | | testis_normal | | | puc18 |
| L3790 | TN0150 | | testis_normal | | | puc18 |
| L3801 | UT0047 | | uterus_tumor | | | puc18 |
| L3804 | UT0073 | | uterus_tumor | | | puc18 |
| L3807 | UT0077 | | uterus_tumor | | | puc18 |
| L3809 | UT0087 | | uterus_tumor | | | puc18 |
| L3811 | NPC | pituitary | | | | pBluescript |
| | | | | | | sk(−) |
| L3812 | NPD | pituitary | | | | pBluescript |
| | | | | | | sk(−) |
| L3813 | TP | pituitary tumor | | | | pTriplEx2 |
| L3814 | BM | Bone marrow | | | | pTriplEx2 |
| L3815 | MDS | Bone marrow | | | | pTriplEx2 |
| L3816 | HEMBA1 | whole embryo, | | | | pME18SFL3 |
| | | mainly head | | | | |
| L3817 | HEMBB1 | whole embryo, | | | | pME18SFL3 |
| | | mainly body | | | | |
| L3818 | MAMMA1 | mammary gland | | | | pME18SFL3 |
| L3819 | NIH_MGC_76 | | liver | | | pDNR-LIB |
| | | | | | | (Clontech) |
| L3821 | NIH_MGC_48 | primary B-Cells | B-Cells | | | pOTB7 |
| | | from tonsils (cell | | | | |
| | | line) | | | | |
| L3822 | NIH_MGC_59 | mucoepidermoid | lung | | | pDNR-LIB |
| | | carcinoma | | | | (Clontech |
| L3823 | NT2RM1 | | | NT2 | | pUC19FL3 |
| L3824 | NT2RM2 | | | NT2 | | pME18SFL3 |
| L3825 | NT2RM4 | | | NT2 | | pME18SFL3 |
| L3826 | NT2RP1 | | | NT2 | | pUC19FL3 |
| L3827 | NT2RP2 | | | NT2 | | pME18SFL3 |
| L3828 | NT2RP3 | | | NT2 | | pME18SFL3 |
| L3829 | NT2RP4 | | | NT2 | | pME18SFL3 |
| L3830 | NT2RP5 | | | NT2 | | pME18SFL3 |
| L3831 | OVARC1 | ovary, tumor tissue | | | | pME18SFL3 |
| L3832 | PLACE1 | placenta | | | | pME18SFL3 |
| L3833 | PLACE2 | placenta | | | | pME18SFL3 |
| L3834 | PLACE3 | placenta | | | | pME18SFL3 |
| L3836 | SKNMC1 | | | SK-N- | | pME18SFL3 |
| | | | | MC | | |
| L3837 | THYRO1 | thyroid gland | | | | pME18SFL3 |
| L3838 | VESEN1 | | | | | pME18SFL3 |
| L3839 | Y79AA1 | | | Y79 | | pME18SFL3 |
| L3840 | Human Epidermal | skin | | Clonetics | | pT-Adv |
| | Keratinocyte Subtraction | | | 4075 | | |
| | Library- | | | | | |
| L3841 | NIH_MGC_18 | large cell carcinoma | lung | | | pOTB7 |
| L3854 | BT0817 | | breast | | | puc18 |
| L3871 | NIH_MGC_19 | neuroblastoma | brain | | | pOTB7 |
| L3872 | NCI_CGAP_Skn1 | | skin, normal, | | | pCMV- |
| | | | 4 pooled sa | | | SPORT6 |
| L3904 | NCI_CGAP_Brn64 | glioblastoma with | brain | | | pCMV- |
| | | EGFR amplification | | | | SPORT6 |
| L3905 | NCI_CGAP_Brn67 | anaplastic | brain | | | pCMV- |
| | | oligodendroglioma | | | | SPORT6 |
| | | with 1p/19q loss | | | | |
| L4497 | NCI_CGAP_Br22 | invasive ductal | breast | | | pCMV- |
| | | carcinoma, 3 pooled | | | | SPORT6 |
| | | samples | | | | |
| L4501 | NCI_CGAP_Sub8 | | | | | pT7T3D- |
| | | | | | | Pac |
| | | | | | | (Pharmacia) |
| | | | | | | with a |
| | | | | | | modified |
| | | | | | | polylinker |
| L4508 | NCI_CGAP_Thy8 | normal epithelium | thyroid | | | pAMP10 |
| L4537 | NCI_CGAP_Thy7 | follicular adenoma | thyroid | | | pAMP10 |
| | | (benign lesion) | | | | |
| L4556 | NCI_CGAP_HN13 | squamous cell | tongue | | | pCMV- |
| | | carcinoma | | | | SPORT6 |
| L4557 | NCI_CGAP_Adr1 | neuroblastoma | adrenal gland | | | pCMV- |
| | | | | | | SPORT6 |
| L4559 | NCI_CGAP_Thy3 | follicular carcinoma | thyroid | | | pCMV- |
| | | | | | | SPORT6 |
| L4560 | NCI_CGAP_Ut7 | tumor | uterus | | | pCMV- |
| | | | | | | SPORT6 |
| L4669 | NCI_CGAP_Ov41 | serous papillary | ovary | | | pCMV- |
| | | tumor | | | | SPORT6 |
| L4747 | NCI_CGAP_Brn41 | oligodendroglioma | brain | | | pT7T3D- |
| | | | | | | Pac |
| | | | | | | (Pharmacia) |
| | | | | | | with a |
| | | | | | | modified |
| | | | | | | polylinker |
| L4753 | NCI_CGAP_HN15 | leukoplakia of the | mouth | | | pAMP10 |
| | | buccal mucosa | | | | |
| L5286 | NCI_CGAP_Thy10 | medullary | thyroid | | | pAMP10 |
| | | carcinoma | | | | |
| L5564 | NCI_CGAP_HN20 | | normal | | | pAMP1 |
| | | | head/neck | | | |
| | | | tissue | | | |
| L5565 | NCI_CGAP_Brn66 | glioblastoma with | brain | | | pCMV- |
| | | probably TP53 | | | | SPORT6 |
| | | mutation and witho | | | | |
| L5566 | NCI_CGAP_Brn70 | anaplastic | brain | | | pCMV- |
| | | oligodendroglioma | | | | SPORT6.ccdb |
| L5568 | NCI_CGAP_HN21 | nasopharyngeal | head/neck | | | pAMP1 |
| | | carcinoma | | | | |
| L5569 | NCI_CGAP_HN17 | normal epithelium | nasopharynx | | | pAMP10 |
| L5574 | NCI_CGAP_HN19 | normal epithelium | nasopharynx | | | pAMP10 |
| L5575 | NCI_CGAP_Brn65 | glioblastoma | brain | | | pCMV- |
| | | without EGFR | | | | SPORT6 |
| | | amplification | | | | |
| L5622 | NCI_CGAP_Skn3 | | skin | | | pCMV- |
| | | | | | | SPORT6 |
| L5623 | NCI_CGAP_Skn4 | squamous cell | skin | | | pCMV- |
| | | carcinoma | | | | SPORT6 |

Description of Table 5

[0206] Table 5 provides a key to the OMIM reference identification numbers disclosed in Table 1B.1, column 9. OMIM reference identification numbers (Column 1) were derived from Online Mendelian Inheritance in Man (Online Mendelian Inheritance in Man, OMIM. McKusick-Nathans Institute for Genetic Medicine, Johns Hopkins University (Baltimore, Md.) and National Center for Biotechnology Information, National Library of Medicine, (Bethesda, Md.) 2000. World Wide Web URL: http://www.ncbi.nlm.nih.gov/omim/). Column 2 provides diseases associated with the cytologic band disclosed in Table 1B.1, column 8, as determined using the Morbid Map database.

Mature Polypeptides

[0207] The present invention also encompasses mature forms of a polypeptide having the amino acid sequence of SEQ ID NO:Y and/or the amino acid sequence encoded by the cDNA in a deposited clone. Polynucleotides encoding the mature forms (such as, for example, the polynucleotide sequence in SEQ ID NO:X and/or the polynucleotide sequence contained in the cDNA of a deposited clone) are also encompassed by the invention. Moreover, fragments or variants of these polypeptides (such as, fragments as described herein, polypeptides at least 80%, 85%, 90%, 95%, 96%, 97%, 98%, 99%, or 100% identical to these polypeptides, or polypeptides encoded by a polynucleotide that hybridizes under stringent conditions to the complementary strand of the polynucleotide encoding these polypeptides) are also encompassed by the invention. In preferred embodiments, these fragments or variants retain one or more functional acitivities of the full-length or mature form of the polypeptide (e.g., biological activity (such as, for example, activity in detecting, preventing, treating and/or indicated disorders), antigenicity (ability to bind, or compete with a polypeptide of the invention for binding, to an anti-polypeptide of the invention antibody), immunogenicity (ability to generate antibody which binds to a specific polypeptide of the invention), ability to form multimers with polypeptides of the invention, and ability to bind to a receptor or ligand for a polypeptide of the invention). Antibodies that bind the polypeptides of the invention, and polynucleotides encoding these polypeptides are also encompassed by the invention.

[0208] According to the signal hypothesis, proteins secreted by mammalian cells have a signal or secretary leader sequence which is cleaved from the mature protein once export of the growing protein chain across the rough endoplasmic reticulum has been initiated. Most mammalian cells and even insect cells cleave secreted proteins with the same specificity. However, in some cases, cleavage of a secreted protein is not entirely uniform, which results in two or more mature species of the protein. Further, it has long been known that cleavage specificity of a secreted protein is ultimately determined by the primary structure of the complete protein, that is, it is inherent in the amino acid sequence of the polypeptide.

[0209] Methods for predicting whether a protein has a signal sequence, as well as the cleavage point for that sequence, are available. For instance, the method of McGeoch, Virus Res. 3:271-286 (1985), uses the information from a short N-terminal charged region and a subsequent uncharged region of the complete (uncleaved) protein. The method of von Heinje, Nucleic Acids Res. 14:4683-4690 (1986) uses the information from the residues surrounding the cleavage site, typically residues −13 to +2, where +1 indicates the amino terminus of the secreted protein. The accuracy of predicting the cleavage points of known mammalian secretory proteins for each of these methods is in the range of 75-80%. (von Heinje, supra.) However, the two methods do not always produce the same predicted cleavage point(s) for a given protein.

[0210] In the present case, the deduced amino acid sequence of the secreted polypeptide was analyzed by a computer program called SignalP (Henrik Nielsen et al., Protein Engineering 10:1-6 (1997)), which predicts the cellular location of a protein based on the amino acid sequence. As part of this computational prediction of localization, the methods of McGeoch and von Heinje are incorporated. The analysis of the amino acid sequences of the secreted proteins described herein by this program provided the results shown in Table 1A.

[0211] In specific embodiments, polypeptides of the invention comprise, or alternatively consist of, the predicted mature form of the polypeptide as delineated in columns 14 and 15 of Table 1A. Moreover, fragments or variants of these polypeptides (such as, fragments as described herein, polypeptides at least 80%, 85%, 90%, 95%, 96%, 97%, 98%, 99%, or 100% identical to these polypeptides, or polypeptides encoded by a polynucleotide that hybridizes under stringent conditions to the complementary strand of the polynucleotide encoding these polypeptides) are also encompassed by the invention. In preferred embodiments, these fragments or variants retain one or more functional acitivities of the full-length or mature form of the polypeptide (e.g., biological activity, antigenicity [ability to bind (or compete with a polypeptide of the invention for binding) to an anti-polypeptide of the invention antibody], immunogenicity (ability to generate antibody which binds to a specific polypeptide of the invention), ability to form multimers with polypeptides of the invention, and ability to bind to a receptor or ligand for a polypeptide of the invention). Antibodies that bind the polypeptides of the invention, and polynucleotides encoding these polypeptides are also encompassed by the invention.

[0212] Polynucleotides encoding proteins comprising, or consisting of, the predicted mature form of polypeptides of the invention (e.g., polynucleotides having the sequence of SEQ ID NO: X (Table 1A, column 4), the sequence delineated in columns 7 and 8 of Table 1A, and a sequence encoding the mature polypeptide delineated in columns 14 and 15 of Table 1A (e.g., the sequence of SEQ ID NO:X encoding the mature polypeptide delineated in columns 14 and 15 of Table 1)) are also encompassed by the invention, as are fragments or variants of these polynucleotides (such as, fragments as described herein, polynucleotides at least 80%, 85%, 90%, 95%, 96%, 97%, 98%, 99%, or 100% identical to these polyncueotides, and nucleic acids which hybridizes under stringent conditions to the complementary strand of the polynucleotide).

[0213] As one of ordinary skill would appreciate, however, cleavage sites sometimes vary from organism to organism and cannot be predicted with absolute certainty. Accordingly, the present invention provides secreted polypeptides having a sequence shown in SEQ ID NO:Y which have an N-terminus beginning within 15 residues of the predicted cleavage point (i.e., having 1, 2, 3, 4, 5, 6, 7, 8, 9, 10, 11, 12, 13, 14, or 15 more or less contiguous residues of SEQ ID NO:Y at the N-terminus when compared to the predicted mature form of the polypeptide (e.g., the mature polypeptide delineated in columns 14 and 15 of Table 1). Similarly, it is also recognized that in some cases, cleavage of the signal sequence from a secreted protein is not entirely uniform, resulting in more than one secreted species. These polypeptides, and the polynucleotides encoding such polypeptides, are contemplated by the present invention.

[0214] Moreover, the signal sequence identified by the above analysis may not necessarily predict the naturally occurring signal sequence. For example, the naturally occurring signal sequence may be further upstream from the predicted signal sequence. However, it is likely that the predicted signal sequence will be capable of directing the secreted protein to the ER. Nonetheless, the present invention provides the mature protein produced by expression of the polynucleotide sequence of SEQ ID NO:X and/or the polynucleotide sequence contained in the cDNA of a deposited clone, in a mammalian cell (e.g., COS cells, as desribed below). These polypeptides, and the polynucleotides encoding such polypeptides, are contemplated by the present invention.

Polynucleotide and Polypeptide Variants

[0215] The present invention is also directed to variants of the polynucleotide sequence disclosed in SEQ ID NO:X or the complementary strand thereto, nucleotide sequences encoding the polypeptide of SEQ ID NO:Y, the nucleotide sequence of SEQ ID NO:X that encodes the polypeptide sequence as defined in columns 13 and 14 of Table 1A, nucleotide sequences encoding the polypeptide sequence as defined in columns 13 and 14 of Table 1A, the nucleotide sequence of SEQ ID NO:X encoding the polypeptide sequence as defined in column 5 of Table 1B.1, nucleotide sequences encoding the polypeptide as defined in column 6 and column 7 of Table 1B.1, the nucleotide sequence as defined in columns 8 and 9 of Table 2, nucleotide sequences encoding the polypeptide encoded by the nucleotide sequence as defined in columns 8 and 9 of Table 2, the nucleotide sequence as defined in column 6 of Table 1C, nucleotide sequences encoding the polypeptide encoded by the nucleotide sequence as defined in column 6 of Table 1C, the cDNA sequence contained in ATCC Deposit NO:Z, nucleotide sequences encoding the polypeptide encoded by the cDNA sequence contained in ATCC Deposit NO:Z, and/or nucleotide sequences encoding a mature (secreted) polypeptide encoded by the cDNA sequence contained in ATCC Deposit NO:Z.

[0216] The present invention also encompasses variants of the polypeptide sequence disclosed in SEQ ID NO:Y, the polypeptide as defined in columns 13 and 14 of Table 1A, the polypeptide sequence as defined in columns 6 and 7 of Table 1B.1, a polypeptide sequence encoded by the polynucleotide sequence in SEQ ID NO:X, a polypeptide sequence encoded by the nucleotide sequence as defined in columns 8 and 9 of Table 2, a polypeptide sequence encoded by the nucleotide sequence as defined in column 6 of Table 1C, a polypeptide sequence encoded by the complement of the polynucleotide sequence in SEQ ID NO:X, the polypeptide sequence encoded by the cDNA sequence contained in ATCC Deposit NO:Z and/or a mature (secreted) polypeptide encoded by the cDNA sequence contained in ATCC Deposit NO:Z.

[0217] “Variant” refers to a polynucleotide or polypeptide differing from the polynucleotide or polypeptide of the present invention, but retaining essential properties thereof. Generally, variants are overall closely similar, and, in many regions, identical to the polynucleotide or polypeptide of the present invention.

[0218] Thus, one aspect of the invention provides an isolated nucleic acid molecule comprising, or alternatively consisting of, a polynucleotide having a nucleotide sequence selected from the group consisting of: (a) a nucleotide sequence described in SEQ ID NO:X or contained in the cDNA sequence of ATCC Deposit No:Z; (b) a nucleotide sequence in SEQ ID NO:X or the cDNA in ATCC Deposit No:Z which encodes the complete amino acid sequence of SEQ ID NO:Y or the complete amino acid sequence encoded by the cDNA in ATCC Deposit No:Z; (c) a nucleotide sequence in SEQ ID NO:X or the cDNA in ATCC Deposit No:Z which encodes a mature polypeptide (i.e., a secreted polypeptide (e.g., as delineated in columns 14 and 15 of Table 1A)); (d) a nucleotide sequence in SEQ ID NO:X or the cDNA sequence of ATCC Deposit No:Z, which encodes a biologically active fragment of a polypeptide; (e) a nucleotide sequence in SEQ ID NO:X or the cDNA sequence of ATCC Deposit No:Z, which encodes an antigenic fragment of a polypeptide; (f) a nucleotide sequence encoding a polypeptide comprising the complete amino acid sequence of SEQ ID NO:Y or the complete amino acid sequence encoded by the cDNA in ATCC Deposit No:Z; (g) a nucleotide sequence encoding a mature polypeptide of the amino acid sequence of SEQ ID NO:Y (i.e., a secreted polypeptide (e.g., as delineated in columns 14 and 15 of Table 1A)) or a mature polypeptide of the amino acid sequence encoded by the cDNA in ATCC Deposit No:Z; (h) a nucleotide sequence encoding a biologically active fragment of a polypeptide having the complete amino acid sequence of SEQ ID NO:Y or the complete amino acid sequence encoded by the cDNA in ATCC Deposit No:Z; (i) a nucleotide sequence encoding an antigenic fragment of a polypeptide having the complete amino acid sequence of SEQ ID NO:Y or the complete amino acid sequence encoded by the cDNA in ATCC Deposit No:Z; and (j) a nucleotide sequence complementary to any of the nucleotide sequences in (a), (b), (c), (d), (e), (f), (g), (h), or (i) above.

[0219] The present invention is also directed to nucleic acid molecules which comprise, or alternatively consist of, a nucleotide sequence which is at least 80%, 85%, 90%, 95%, 96%, 97%, 98%, 99% or 100%, identical to, for example, any of the nucleotide sequences in (a), (b), (c), (d), (e), (f), (g), (h), (i), or (j) above, the nucleotide coding sequence in SEQ ID NO:X or the complementary strand thereto, the nucleotide coding sequence of the cDNA contained in ATCC Deposit No:Z or the complementary strand thereto, a nucleotide sequence encoding the polypeptide of SEQ ID NO:Y, a nucleotide sequence encoding a polypeptide sequence encoded by the nucleotide sequence in SEQ ID NO:X, a polypeptide sequence encoded by the complement of the polynucleotide sequence in SEQ ID NO:X, a nucleotide sequence encoding the polypeptide encoded by the cDNA contained in ATCC Deposit No:Z, the nucleotide coding sequence in SEQ ID NO:X as defined in columns 8 and 9 of Table 2 or the complementary strand thereto, a nucleotide sequence encoding the polypeptide encoded by the nucleotide sequence in SEQ ID NO:X as defined in columns 8 and 9 of Table 2 or the complementary strand thereto, the nucleotide coding sequence in SEQ ID NO:B as defined in column 6 of Table 1C or the complementary strand thereto, a nucleotide sequence encoding the polypeptide encoded by the nucleotide sequence in SEQ ID NO:B as defined in column 6 of Table 1C or the complementary strand thereto, the nucleotide sequence in SEQ ID NO:X encoding the polypeptide sequence as defined in columns 6 and 7 of Table 1B.1 or the complementary strand thereto, nucleotide sequences encoding the polypeptide as defined in column 6 and 7 of Table 1B.1 or the complementary strand thereto, and/or polynucleotide fragments of any of these nucleic acid molecules (e.g., those fragments described herein). Polynucleotides which hybridize to the complement of these nucleic acid molecules under stringent hybridization conditions or alternatively, under lower stringency conditions, are also encompassed by the invention, as are polypeptides encoded by these polynucleotides and nucleic acids.

[0220] In a preferred embodiment, the invention encompasses nucleic acid molecules which comprise, or alternatively, consist of a polynucleotide which hybridizes under stringent hybridization conditions, or alternatively, under lower stringency conditions, to a polynucleotide in (a), (b), (c), (d), (e), (f), (g), (h), or (i), above, as are polypeptides encoded by these polynucleotides. In another preferred embodiment, polynucleotides which hybridize to the complement of these nucleic acid molecules under stringent hybridization conditions, or alternatively, under lower stringency conditions, are also encompassed by the invention, as are polypeptides encoded by these polynucleotides.

[0221] In another embodiment, the invention provides a purified protein comprising, or alternatively consisting of, a polypeptide having an amino acid sequence selected from the group consisting of: (a) the complete amino acid sequence of SEQ ID NO:Y or the complete amino acid sequence encoded by the cDNA in ATCC Deposit No:Z; (b) the amino acid sequence of a mature (secreted) form of a polypeptide having the amino acid sequence of SEQ ID NO:Y (e.g., as delineated in columns 14 and 15 of Table 1A) or a mature form of the amino acid sequence encoded by the cDNA in ATCC Deposit No:Z mature; (c) the amino acid sequence of a biologically active fragment of a polypeptide having the complete amino acid sequence of SEQ ID NO:Y or the complete amino acid sequence encoded by the cDNA in ATCC Deposit No:Z; and (d) the amino acid sequence of an antigenic fragment of a polypeptide having the complete amino acid sequence of SEQ ID NO:Y or the complete amino acid sequence encoded by the cDNA in ATCC Deposit No:Z.

[0222] The present invention is also directed to proteins which comprise, or alternatively consist of, an amino acid sequence which is at least 80%, 85%, 90%, 95%, 96%, 97%, 98%, 99% or 100%, identical to, for example, any of the amino acid sequences in (a), (b), (c), or (d), above, the amino acid sequence shown in SEQ ID NO:Y, the amino acid sequence encoded by the cDNA contained in ATCC Deposit No:Z, the amino acid sequence of the polypeptide encoded by the nucleotide sequence in SEQ ID NO:X as defined in columns 8 and 9 of Table 2, the amino acid sequence of the polypeptide encoded by the nucleotide sequence in SEQ ID NO:B as defined in column 6 of Table 1C, the amino acid sequence as defined in column 6 and 7 of Table 1B.1, an amino acid sequence encoded by the nucleotide sequence in SEQ ID NO:X, and an amino acid sequence encoded by the complement of the polynucleotide sequence in SEQ ID NO:X. Fragments of these polypeptides are also provided (e.g., those fragments described herein). Further proteins encoded by polynucleotides which hybridize to the complement of the nucleic acid molecules encoding these amino acid sequences under stringent hybridization conditions or alternatively, under lower stringency conditions, are also encompassed by the invention, as are the polynucleotides encoding these proteins.

[0223] By a nucleic acid having a nucleotide sequence at least, for example, 95% “identical” to a reference nucleotide sequence of the present invention, it is intended that the nucleotide sequence of the nucleic acid is identical to the reference sequence except that the nucleotide sequence may include up to five point mutations per each 100 nucleotides of the reference nucleotide sequence encoding the polypeptide. In other words, to obtain a nucleic acid having a nucleotide sequence at least 95% identical to a reference nucleotide sequence, up to 5% of the nucleotides in the reference sequence may be deleted or substituted with another nucleotide, or a number of nucleotides up to 5% of the total nucleotides in the reference sequence may be inserted into the reference sequence. The query sequence may be an entire sequence referred to in Table 1B or 2 as the ORF (open reading frame), or any fragment specified as described herein.

[0224] As a practical matter, whether any particular nucleic acid molecule or polypeptide is at least 80%, 85%, 90%, 95%, 96%, 97%, 98% or 99% identical to a nucleotide sequence of the present invention can be determined conventionally using known computer programs. A preferred method for determining the best overall match between a query sequence (a sequence of the present invention) and a subject sequence, also referred to as a global sequence alignment, can be determined using the FASTDB computer program based on the algorithm of Brutlag et al. (Comp. App. Biosci. 6:237-245 (1990)). In a sequence alignment the query and subject sequences are both DNA sequences. An RNA sequence can be compared by converting U's to T's. The result of said global sequence alignment is expressed as percent identity. Preferred parameters used in a FASTDB alignment of DNA sequences to calculate percent identity are: Matrix=Unitary, k-tuple=4, Mismatch Penalty=1, Joining Penalty=30, Randomization Group Length=0, Cutoff Score=1, Gap Penalty=5, Gap Size Penalty 0.05, Window Size=500 or the length of the subject nucleotide sequence, whichever is shorter.

[0225] If the subject sequence is shorter than the query sequence because of 5′ or 3′ deletions, not because of internal deletions, a manual correction must be made to the results. This is because the FASTDB program does not account for 5′ and 3′ truncations of the subject sequence when calculating percent identity. For subject sequences truncated at the 5′ or 3′ ends, relative to the query sequence, the percent identity is corrected by calculating the number of bases of the query sequence that are 5′ and 3′ of the subject sequence, which are not matched/aligned, as a percent of the total bases of the query sequence. Whether a nucleotide is matched/aligned is determined by results of the FASTDB sequence alignment. This percentage is then subtracted from the percent identity, calculated by the above FASTDB program using the specified parameters, to arrive at a final percent identity score. This corrected score is what is used for the purposes of the present invention. Only bases outside the 5′ and 3′ bases of the subject sequence, as displayed by the FASTDB alignment, which are not matched/aligned with the query sequence, are calculated for the purposes of manually adjusting the percent identity score.

[0226] For example, a 90 base subject sequence is aligned to a 100 base query sequence to determine percent identity. The deletions occur at the 5′ end of the subject sequence and therefore, the FASTDB alignment does not show a matched/alignment of the first 10 bases at 5′ end. The 10 unpaired bases represent 10% of the sequence (number of bases at the 5′ and 3′ ends not matched/total number of bases in the query sequence) so 10% is subtracted from the percent identity score calculated by the FASTDB program. If the remaining 90 bases were perfectly matched the final percent identity would be 90%. In another example, a 90 base subject sequence is compared with a 100 base query sequence. This time the deletions are internal deletions so that there are no bases on the 5′ or 3′ of the subject sequence which are not matched/aligned with the query. In this case the percent identity calculated by FASTDB is not manually corrected. Once again, only bases 5′ and 3′ of the subject sequence which are not matched/aligned with the query sequence are manually corrected for. No other manual corrections are to be made for the purposes of the present invention.

[0227] By a polypeptide having an amino acid sequence at least, for example, 95% “identical” to a query amino acid sequence of the present invention, it is intended that the amino acid sequence of the subject polypeptide is identical to the query sequence except that the subject polypeptide sequence may include up to five amino acid alterations per each 100 amino acids of the query amino acid sequence. In other words, to obtain a polypeptide having an amino acid sequence at least 95% identical to a query amino acid sequence, up to 5% of the amino acid residues in the subject sequence may be inserted, deleted, (indels) or substituted with another amino acid. These alterations of the reference sequence may occur at the amino or carboxy terminal positions of the reference amino acid sequence or anywhere between those terminal positions, interspersed either individually among residues in the reference sequence or in one or more contiguous groups within the reference sequence.

[0228] As a practical matter, whether any particular polypeptide is at least 80%, 85%, 90%, 95%, 96%, 97%, 98% or 99% identical to, for instance, the amino acid sequence of a polypeptide referred to in Table 1A (e.g., the amino acid sequence delineated in columns 14 and 15) or a fragment thereof, Table 1B.1 (e.g., the amino acid sequence identified in column 6) or a fragment thereof, Table 2 (e.g., the amino acid sequence of the polypeptide encoded by the polynucleotide sequence defined in columns 8 and 9 of Table 2) or a fragment thereof, the amino acid sequence of the polypeptide encoded by the polynucleotide sequence in SEQ ID NO:B as defined in column 6 of Table 1C or a fragment thereof, the amino acid sequence of the polypeptide encoded by the nucleotide sequence in SEQ ID NO:X or a fragment thereof, or the amino acid sequence of the polypeptide encoded by cDNA contained in ATCC Deposit No:Z, or a fragment thereof, the amino acid sequence of a mature (secreted) polypeptide encoded by cDNA contained in ATCC Deposit No:Z, or a fragment thereof, can be determined conventionally using known computer programs. A preferred method for determining the best overall match between a query sequence (a sequence of the present invention) and a subject sequence, also referred to as a global sequence alignment, can be determined using the FASTDB computer program based on the algorithm of Brutlag et al. (Comp. App. Biosci. 6:237-245 (1990)). In a sequence alignment the query and subject sequences are either both nucleotide sequences or both amino acid sequences. The result of said global sequence alignment is expressed as percent identity. Preferred parameters used in a FASTDB amino acid alignment are: Matrix=PAM 0, k-tuple=2, Mismatch Penalty=1, Joining Penalty=20, Randomization Group Length=0, Cutoff Score=1, Window Size=sequence length, Gap Penalty=5, Gap Size Penalty=0.05, Window Size=500 or the length of the subject amino acid sequence, whichever is shorter.

[0229] If the subject sequence is shorter than the query sequence due to N- or C-terminal deletions, not because of internal deletions, a manual correction must be made to the results. This is because the FASTDB program does not account for N- and C-terminal truncations of the subject sequence when calculating global percent identity. For subject sequences truncated at the N- and C-termini, relative to the query sequence, the percent identity is corrected by calculating the number of residues of the query sequence that are N- and C-terminal of the subject sequence, which are not matched/aligned with a corresponding subject residue, as a percent of the total bases of the query sequence. Whether a residue is matched/aligned is determined by results of the FASTDB sequence alignment. This percentage is then subtracted from the percent identity, calculated by the above FASTDB program using the specified parameters, to arrive at a final percent identity score. This final percent identity score is what is used for the purposes of the present invention. Only residues to the N- and C-termini of the subject sequence, which are not matched/aligned with the query sequence, are considered for the purposes of manually adjusting the percent identity score. That is, only query residue positions outside the farthest N- and C-terminal residues of the subject sequence.

[0230] For example, a 90 amino acid residue subject sequence is aligned with a 100 residue query sequence to determine percent identity. The deletion occurs at the N-terminus of the subject sequence and therefore, the FASTDB alignment does not show a matching/alignment of the first 10 residues at the N-terminus. The 10 unpaired residues represent 10% of the sequence (number of residues at the N- and C-termini not matched/total number of residues in the query sequence) so 10% is subtracted from the percent identity score calculated by the FASTDB program. If the remaining 90 residues were perfectly matched the final percent identity would be 90%. In another example, a 90 residue subject sequence is compared with a 100 residue query sequence. This time the deletions are internal deletions so there are no residues at the N- or C-termini of the subject sequence which are not matched/aligned with the query. In this case the percent identity calculated by FASTDB is not manually corrected. Once again, only residue positions outside the N- and C-terminal ends of the subject sequence, as displayed in the FASTDB alignment, which are not matched/aligned with the query sequnce are manually corrected for. No other manual corrections are to made for the purposes of the present invention.

[0231] The polynucleotide variants of the invention may contain alterations in the coding regions, non-coding regions, or both. Especially preferred are polynucleotide variants containing alterations which produce silent substitutions, additions, or deletions, but do not alter the properties or activities of the encoded polypeptide. Nucleotide variants produced by silent substitutions due to the degeneracy of the genetic code are preferred. Moreover, polypeptide variants in which less than 50, less than 40, less than 30, less than 20, less than 10, or 5-50, 5-25, 5-10, 1-5, or 1-2 amino acids are substituted, deleted, or added in any combination are also preferred. Polynucleotide variants can be produced for a variety of reasons, e.g., to optimize codon expression for a particular host (change codons in the human mRNA to those preferred by a bacterial host such as E. coli).

[0232] Naturally occurring variants are called “allelic variants,” and refer to one of several alternate forms of a gene occupying a given locus on a chromosome of an organism. (Genes II, Lewin, B., ed., John Wiley & Sons, New York (1985)). These allelic variants can vary at either the polynucleotide and/or polypeptide level and are included in the present invention. Alternatively, non-naturally occurring variants may be produced by mutagenesis techniques or by direct synthesis.

[0233] Using known methods of protein engineering and recombinant DNA technology, variants may be generated to improve or alter the characteristics of the polypeptides of the present invention. For instance, one or more amino acids can be deleted from the N-terminus or C-terminus of the polypeptide of the present invention without substantial loss of biological function. As an example, Ron et al. (J. Biol. Chem. 268: 2984-2988 (1993)) reported variant KGF proteins having heparin binding activity even after deleting 3, 8, or 27 amino-terminal amino acid residues. Similarly, Interferon gamma exhibited up to ten times higher activity after deleting 8-10 amino acid residues from the carboxy terminus of this protein. (Dobeli et al., J. Biotechnology 7:199-216 (1988).)

[0234] Moreover, ample evidence demonstrates that variants often retain a biological activity similar to that of the naturally occurring protein. For example, Gayle and coworkers (J. Biol. Chem. 268:22105-22111 (1993)) conducted extensive mutational analysis of human cytokine IL-1a. They used random mutagenesis to generate over 3,500 individual IL-1a mutants that averaged 2.5 amino acid changes per variant over the entire length of the molecule. Multiple mutations were examined at every possible amino acid position. The investigators found that “[m]ost of the molecule could be altered with little effect on either [binding or biological activity].” In fact, only 23 unique amino acid sequences, out of more than 3,500 nucleotide sequences examined, produced a protein that significantly differed in activity from wild-type.

[0235] Furthermore, even if deleting one or more amino acids from the N-terminus or C-terminus of a polypeptide results in modification or loss of one or more biological functions, other biological activities may still be retained. For example, the ability of a deletion variant to induce and/or to bind antibodies which recognize the secreted form will likely be retained when less than the majority of the residues of the secreted form are removed from the N-terminus or C-terminus. Whether a particular polypeptide lacking N- or C-terminal residues of a protein retains such immunogenic activities can readily be determined by routine methods described herein and otherwise known in the art.

[0236] Thus, the invention further includes polypeptide variants which show a functional activity (e.g., biological activity) of the polypeptides of the invention. Such variants include deletions, insertions, inversions, repeats, and substitutions selected according to general rules known in the art so as have little effect on activity.

[0237] The present application is directed to nucleic acid molecules at least 80%, 85%, 90%, 95%, 96%, 97%, 98%, 99% or 100% identical to the nucleic acid sequences disclosed herein, (e.g., encoding a polypeptide having the amino acid sequence of an N and/or C terminal deletion), irrespective of whether they encode a polypeptide having functional activity. This is because even where a particular nucleic acid molecule does not encode a polypeptide having functional activity, one of skill in the art would still know how to use the nucleic acid molecule, for instance, as a hybridization probe or a polymerase chain reaction (PCR) primer. Uses of the nucleic acid molecules of the present invention that do not encode a polypeptide having functional activity include, inter alia, (1) isolating a gene or allelic or splice variants thereof in a cDNA library; (2) in situ hybridization (e.g., “FISH”) to metaphase chromosomal spreads to provide precise chromosomal location of the gene, as described in Verma et al., Human Chromosomes: A Manual of Basic Techniques, Pergamon Press, New York (1988); (3) Northern Blot analysis for detecting mRNA expression in specific tissues (e.g., normal or diseased tissues); and (4) in situ hybridization (e.g., histochemistry) for detecting mRNA expression in specific tissues (e.g., normal or diseased tissues).

[0238] Preferred, however, are nucleic acid molecules having sequences at least 80%, 85%, 90%, 95%, 96%, 97%, 98%, 99% or 100% identical to the nucleic acid sequences disclosed herein, which do, in fact, encode a polypeptide having functional activity. By a polypeptide having “functional activity” is meant, a polypeptide capable of displaying one or more known functional activities associated with a full-length (complete) protein and/or a mature (secreted) protein of the invention. Such functional activities include, but are not limited to, biological activity, antigenicity [ability to bind (or compete with a polypeptide of the invention for binding) to an anti-polypeptide of the invention antibody], immunogenicity (ability to generate antibody which binds to a specific polypeptide of the invention), ability to form multimers with polypeptides of the invention, and ability to bind to a receptor or ligand for a polypeptide of the invention.

[0239] The functional activity of the polypeptides, and fragments, variants and derivatives of the invention, can be assayed by various methods.

[0240] For example, in one embodiment where one is assaying for the ability to bind or compete with a full-length polypeptide of the present invention for binding to an anti-polypetide antibody, various immunoassays known in the art can be used, including but not limited to, competitive and non-competitive assay systems using techniques such as radioimmunoassays, ELISA (enzyme linked immunosorbent assay), “sandwich” immunoassays, immunoradiometric assays, gel diffusion precipitation reactions, immunodiffusion assays, in situ immunoassays (using colloidal gold, enzyme or radioisotope labels, for example), western blots, precipitation reactions, agglutination assays (e.g., gel agglutination assays, hemagglutination assays), complement fixation assays, immunofluorescence assays, protein A assays, and immunoelectrophoresis assays, etc. In one embodiment, antibody binding is detected by detecting a label on the primary antibody. In another embodiment, the primary antibody is detected by detecting binding of a secondary antibody or reagent to the primary antibody. In a further embodiment, the secondary antibody is labeled. Many means are known in the art for detecting binding in an immunoassay and are within the scope of the present invention.

[0241] In another embodiment, where a ligand is identified, or the ability of a polypeptide fragment, variant or derivative of the invention to multimerize is being evaluated, binding can be assayed, e.g., by means well-known in the art, such as, for example, reducing and non-reducing gel chromatography, protein affinity chromatography, and affinity blotting. See generally, Phizicky et al., Microbiol. Rev. 59:94-123 (1995). In another embodiment, the ability of physiological correlates of a polypeptide of the present invention to bind to a substrate(s) of the polypeptide of the invention can be routinely assayed using techniques known in the art.

[0242] In addition, assays described herein (see Examples) and otherwise known in the art may routinely be applied to measure the ability of polypeptides of the present invention and fragments, variants and derivatives thereof to elicit polypeptide related biological activity (either in vitro or in vivo). Other methods will be known to the skilled artisan and are within the scope of the invention.

[0243] Of course, due to the degeneracy of the genetic code, one of ordinary skill in the art will immediately recognize that a large number of the nucleic acid molecules having a sequence at least 80%, 85%, 90%, 95%, 96%, 97%, 98%, 99%, or 100% identical to, for example, the nucleic acid sequence of the cDNA contained in ATCC Deposit No:Z, the nucleic acid sequence referred to in Table 1B (SEQ ID NO:X), the nucleic acid sequence disclosed in Table 1A (e.g., the nucleic acid sequence delineated in columns 7 and 8), the nucleic acid sequence disclosed in Table 2 (e.g., the nucleic acid sequence delineated in columns 8 and 9) or fragments thereof, will encode polypeptides “having functional activity.” In fact, since degenerate variants of any of these nucleotide sequences all encode the same polypeptide, in many instances, this will be clear to the skilled artisan even without performing the above described comparison assay. It will be further recognized in the art that, for such nucleic acid molecules that are not degenerate variants, a reasonable number will also encode a polypeptide having functional activity. This is because the skilled artisan is fully aware of amino acid substitutions that are either less likely or not likely to significantly effect protein function (e.g., replacing one aliphatic amino acid with a second aliphatic amino acid), as further described below.

[0244] For example, guidance concerning how to make phenotypically silent amino acid substitutions is provided in Bowie et al., “Deciphering the Message in Protein Sequences: Tolerance to Amino Acid Substitutions,” Science 247:1306-1310 (1990), wherein the authors indicate that there are two main strategies for studying the tolerance of an amino acid sequence to change.

[0245] The first strategy exploits the tolerance of amino acid substitutions by natural selection during the process of evolution. By comparing amino acid sequences in different species, conserved amino acids can be identified. These conserved amino acids are likely important for protein function. In contrast, the amino acid positions where substitutions have been tolerated by natural selection indicates that these positions are not critical for protein function. Thus, positions tolerating amino acid substitution could be modified while still maintaining biological activity of the protein.

[0246] The second strategy uses genetic engineering to introduce amino acid changes at specific positions of a cloned gene to identify regions critical for protein function. For example, site directed mutagenesis or alanine-scanning mutagenesis (introduction of single alanine mutations at every residue in the molecule) can be used. See Cunningham and Wells, Science 244:1081-1085 (1989). The resulting mutant molecules can then be tested for biological activity.

[0247] As the authors state, these two strategies have revealed that proteins are surprisingly tolerant of amino acid substitutions. The authors further indicate which amino acid changes are likely to be permissive at certain amino acid positions in the protein. For example, most buried (within the tertiary structure of the protein) amino acid residues require nonpolar side chains, whereas few features of surface side chains are generally conserved. Moreover, tolerated conservative amino acid substitutions involve replacement of the aliphatic or hydrophobic amino acids Ala, Val, Leu and Ile; replacement of the hydroxyl residues Ser and Thr; replacement of the acidic residues Asp and Glu; replacement of the amide residues Asn and Gln, replacement of the basic residues Lys, Arg, and His; replacement of the aromatic residues Phe, Tyr, and Trp, and replacement of the small-sized amino acids Ala, Ser, Thr, Met, and Gly.

[0248] Besides conservative amino acid substitution, variants of the present invention include (i) substitutions with one or more of the non-conserved amino acid residues, where the substituted amino acid residues may or may not be one encoded by the genetic code, or (ii) substitutions with one or more of the amino acid residues having a substituent group, or (iii) fusion of the mature polypeptide with another compound, such as a compound to increase the stability and/or solubility of the polypeptide (for example, polyethylene glycol), (iv) fusion of the polypeptide with additional amino acids, such as, for example, an IgG Fc fusion region peptide, serum albumin (preferably human serum albumin) or a fragment thereof, or leader or secretory sequence, or a sequence facilitating purification, or (v) fusion of the polypeptide with another compound, such as albumin (including but not limited to recombinant albumin (see, e.g., U.S. Pat. No. 5,876,969, issued Mar. 2, 1999, EP Patent 0 413 622, and U.S. Pat. No. 5,766,883, issued Jun. 16, 1998, herein incorporated by reference in their entirety)). Such variant polypeptides are deemed to be within the scope of those skilled in the art from the teachings herein.

[0249] For example, polypeptide variants, containing amino acid substitutions of charged amino acids with other charged or neutral amino acids may produce proteins with improved characteristics, such as less aggregation. Aggregation of pharmaceutical formulations both reduces activity and increases clearance due to the aggregate's immunogenic activity. See Pinckard et al., Clin. Exp. Immunol. 2:331-340 (1967); Robbins et al., Diabetes 36: 838-845 (1987); Cleland et al., Crit. Rev. Therapeutic Drug Carrier Systems 10:307-377 (1993).

[0250] A further embodiment of the invention relates to polypeptides which comprise the amino acid sequence of a polypeptide having an amino acid sequence which contains at least one amino acid substitution, but not more than 50 amino acid substitutions, even more preferably, not more than 40 amino acid substitutions, still more preferably, not more than 30 amino acid substitutions, and still even more preferably, not more than 20 amino acid substitutions from a polypeptide sequence disclosed herein. Of course it is highly preferable for a polypeptide to have an amino acid sequence which, for example, comprises the amino acid sequence of a polypeptide of SEQ ID NO:Y, the amino acid sequence of the mature (e.g., secreted) polypeptide of SEQ ID NO:Y, an amino acid sequence encoded by SEQ ID NO:X, an amino acid sequence encoded by the portion of SEQ ID NO:X as defined in columnns 8 and 9 of Table 2, an amino acid sequence encoded by the complement of SEQ ID NO:X, an amino acid sequence encoded by cDNA contained in ATCC Deposit No:Z, and/or the amino acid sequence of a mature (secreted) polypeptide encoded by cDNA contained in ATCC Deposit No:Z, or a fragment thereof, which contains, in order of ever-increasing preference, at least one, but not more than 10, 9, 8, 7, 6, 5, 4, 3, 2 or 1 amino acid substitutions.

[0251] In specific embodiments, the polypeptides of the invention comprise, or alternatively, consist of, fragments or variants of a reference amino acid sequence selected from: (a) the amino acid sequence of SEQ ID NO:Y or fragments thereof (e.g., the mature form and/or other fragments described herein); (b) the amino acid sequence encoded by SEQ ID NO:X or fragments thereof; (c) the amino acid sequence encoded by the complement of SEQ ID NO:X or fragments thereof, (d) the amino acid sequence encoded by the portion of SEQ ID NO:X as defined in columns 8 and 9 of Table 2 or fragments thereof; and (e) the amino acid sequence encoded by cDNA contained in ATCC Deposit No:Z or fragments thereof, wherein the fragments or variants have 1-5, 5-10, 5-25, 5-50, 10-50 or 50-150, amino acid residue additions, substitutions, and/or deletions when compared to the reference amino acid sequence. In preferred embodiments, the amino acid substitutions are conservative. Polynucleotides encoding these polypeptides are also encompassed by the invention.

Polynucleotide and Polypeptide Fragments

[0252] The present invention is also directed to polynucleotide fragments of the polynucleotides (nucleic acids) of the invention. In the present invention, a “polynucleotide fragment” refers to a polynucleotide having a nucleic acid sequence which, for example: is a portion of the cDNA contained in ATCC Deposit No:Z or the complementary strand thereto; is a portion of the polynucleotide sequence encoding the polypeptide encoded by the cDNA contained in ATCC Deposit No:Z or the complementary strand thereto; is a portion of the polynucleotide sequence encoding the mature (secreted) polypeptide encoded by the cDNA contained in ATCC Deposit No:Z or the complementary strand thereto; is a portion of a polynucleotide sequence encoding the mature amino acid sequence as defined in columns 14 and 15 of Table 1A or the complementary strand thereto; is a portion of a polynucleotide sequence encoding the amino acid sequence encoded by the region of SEQ ID NO:X as defined in columns 8 and 9 of Table 2 or the complementary strand thereto; is a portion of the polynucleotide sequence of SEQ ID NO:X as defined in columns 8 and 9 of Table 2 or the complementary strand thereto; is a portion of the polynucleotide sequence in SEQ ID NO:X or the complementary strand thereto; is a polynucleotide sequence encoding a portion of the polypeptide of SEQ ID NO:Y; is a polynucleotide sequence encoding a portion of a polypeptide encoded by SEQ ID NO:X; is a polynucleotide sequence encoding a portion of a polypeptide encoded by the complement of the polynucleotide sequence in SEQ ID NO:X; is a portion of a polynucleotide sequence encoding the amino acid sequence encoded by the region of SEQ ID NO:B as defined in column 6 of Table 1C or the complementary strand thereto; or is a portion of the polynucleotide sequence of SEQ ID NO:B as defined in column 6 of Table 1C or the complementary strand thereto.

[0253] The polynucleotide fragments of the invention are preferably at least about 15 nt, and more preferably at least about 20 nt, still more preferably at least about 30 nt, and even more preferably, at least about 40 nt, at least about 50 nt, at least about 75 nt, or at least about 150 nt in length. A fragment “at least 20 nt in length,” for example, is intended to include 20 or more contiguous bases from the cDNA sequence contained in ATCC Deposit No:Z, or the nucleotide sequence shown in SEQ ID NO:X or the complementary stand thereto. In this context “about” includes the particularly recited value or a value larger or smaller by several (5, 4, 3, 2, or 1) nucleotides, at either terminus or at both termini. These nucleotide fragments have uses that include, but are not limited to, as diagnostic probes and primers as discussed herein. Of course, larger fragments (e.g., at least 160, 170, 180, 190, 200, 250, 500, 600, 1000, or 2000 nucleotides in length) are also encompassed by the invention.

[0254] Moreover, representative examples of polynucleotide fragments of the invention comprise, or alternatively consist of, a sequence from about nucleotide number 1-50, 51-100, 101-150, 151-200, 201-250, 251-300, 301-350, 351-400, 401-450, 451-500, 501-550, 551-600, 601-650, 651-700, 701-750, 751-800, 801-850, 851-900, 901-950, 951-1000, 1001-1050, 1051-1100, 1101-1150, 1151-1200, 1201-1250, 1251-1300, 1301-1350, 1351-1400, 1401-1450, 1451-1500, 1501-1550, 1551-1600, 1601-1650, 1651-1700, 1701-1750, 1751-1800, 1801-1850, 1851-1900, 1901-1950, 1951-2000, 2001-2050, 2051-2100, 2101-2150, 2151-2200, 2201-2250, 2251-2300, 2301-2350, 2351-2400, 2401-2450, 2451-2500, 2501-2550, 2551-2600, 2601-2650, 2651-2700, 2701-2750, 2751-2800, 2801-2850, 2851-2900, 2901-2950, 2951-3000, 3001-3050, 3051-3100, 3101-3150, 3151-3200, 3201-3250, 3251-3300, 3301-3350, 3351-3400, 3401-3450, 3451-3500, 3501-3550, 3551-3600, 3601-3650, 3651-3700, 3701-3750, 3751-3800, 3801-3850, 3851-3900, 3901-3950, 3951-4000, 4001-4050, 4051-4100, 4101-4150, 4151-4200, 4201-4250, 4251-4300, 4301-4350, 4351-4400, 4401-4450, 4451-4500, 4501-4550, 4551-4600, 4601-4650, 4651-4700, 4701-4750, 4751-4800, 4801-4850, 4851-4900, 4901-4950, 4951-5000, 5001-5050, 5051-5100, 5101-5150, 5151-5200, 5201-5250, 5251-5300, 5301-5350, 5351-5400, 5401-5450, 5451-5500, 5501-5550, 5551-5600, 5601-5650, 5651-5700, 5701-5750, 5751-5800, 5801-5850, 5851-5900, 5901-5950, 5951-6000, 6001-6050, 6051-6100, 6101-6150, 6151-6200, 6201-6250, 6251-6300, 6301-6350, 6351-6400, 6401-6450, 6451-6500, 6501-6550, 6551-6600, 6601-6650, 6651-6700, 6701-6750, 6751-6800, 6801-6850, 6851-6900, 6901-6950, 6951-7000, 7001-7050, 7051-7100, 7101-7150, 7151-7200, 7201-7250, 7251-7300 or 7301 to the end of SEQ ID NO:X, or the complementary strand thereto. In this context “about” includes the particularly recited range or a range larger or smaller by several (5, 4, 3, 2, or 1) nucleotides, at either terminus or at both termini. Preferably, these fragments encode a polypeptide which has a functional activity (e.g., biological activity). More preferably, these polynucleotides can be used as probes or primers as discussed herein. Polynucleotides which hybridize to one or more of these polynucleotides under stringent hybridization conditions or alternatively, under lower stringency conditions are also encompassed by the invention, as are polypeptides encoded by these polynucleotides.

[0255] Further representative examples of polynucleotide fragments of the invention comprise, or alternatively consist of, a sequence from about nucleotide number 1-50, 51-100, 101-150, 151-200, 201-250, 251-300, 301-350, 351-400, 401-450, 451-500, 501-550, 551-600, 601-650, 651-700, 701-750, 751-800, 801-850, 851-900, 901-950, 951-1000, 1001-1050, 1051-1100, 1101-1150, 1151-1200, 1201-1250, 1251-1300, 1301-1350, 1351-1400, 1401-1450, 1451-1500, 1501-1550, 1551-1600, 1601-1650, 1651-1700, 1701-1750, 1751-1800, 1801-1850, 1851-1900, 1901-1950, 1951-2000, 2001-2050, 2051-2100, 2101-2150, 2151-2200, 2201-2250, 2251-2300, 2301-2350, 2351-2400, 2401-2450, 2451-2500, 2501-2550, 2551-2600, 2601-2650, 2651-2700, 2701-2750, 2751-2800, 2801-2850, 2851-2900, 2901-2950, 2951-3000, 3001-3050, 3051-3100, 3101-3150, 3151-3200, 3201-3250, 3251-3300, 3301-3350, 3351-3400, 3401-3450, 3451-3500, 3501-3550, 3551-3600, 3601-3650, 3651-3700, 3701-3750, 3751-3800, 3801-3850, 3851-3900, 3901-3950, 3951-4000, 4001-4050, 4051-4100, 4101-4150, 4151-4200, 4201-4250, 4251-4300, 4301-4350, 4351-4400, 4401-4450, 4451-4500, 4501-4550, 4551-4600, 4601-4650, 4651-4700, 4701-4750, 4751-4800, 4801-4850, 4851-4900, 4901-4950, 4951-5000, 5001-5050, 5051-5100, 5101-5150, 5151-5200, 5201-5250, 5251-5300, 5301-5350, 5351-5400, 5401-5450, 5451-5500, 5501-5550, 5551-5600, 5601-5650, 5651-5700, 5701-5750, 5751-5800, 5801-5850, 5851-5900, 5901-5950, 5951-6000, 6001-6050, 6051-6100, 6101-6150, 6151-6200, 6201-6250, 6251-6300, 6301-6350, 6351-6400, 6401-6450, 6451-6500, 6501-6550, 6551-6600, 6601-6650, 6651-6700, 6701-6750, 6751-6800, 6801-6850, 6851-6900, 6901-6950, 6951-7000, 7001-7050, 7051-7100, 7101-7150, 7151-7200, 7201-7250, 7251-7300 or 7301 to the end of the cDNA sequence contained in ATCC Deposit No:Z, or the complementary strand thereto. In this context “about” includes the particularly recited range or a range larger or smaller by several (5, 4, 3, 2, or 1) nucleotides, at either terminus or at both termini. Preferably, these fragments encode a polypeptide which has a functional activity (e.g., biological activity). More preferably, these polynucleotides can be used as probes or primers as discussed herein. Polynucleotides which hybridize to one or more of these polynucleotides under stringent hybridization conditions or alternatively, under lower stringency conditions are also encompassed by the invention, as are polypeptides encoded by these polynucleotides.

[0256] Moreover, representative examples of polynucleotide fragments of the invention comprise, or alternatively consist of, a nucleic acid sequence comprising one, two, three, four, five, six, seven, eight, nine, ten, or more of the above described polynucleotide fragments of the invention in combination with a polynucleotide sequence delineated in Table 1C column 6. Additional, representative examples of polynucleotide fragments of the invention comprise, or alternatively consist of, a nucleic acid sequence comprising one, two, three, four, five, six, seven, eight, nine, ten, or more of the above described polynucleotide fragments of the invention in combination with a polynucleotide sequence that is the complementary strand of a sequence delineated in column 6 of Table 1C. In further embodiments, the above-described polynucleotide fragments of the invention comprise, or alternatively consist of, sequences delineated in Table 1C, column 6, and have a nucleic acid sequence which is different from that of the BAC fragment having the sequence disclosed in SEQ ID NO:B (see Table 1C, column 5). In additional embodiments, the above-described polynucleotide fragments of the invention comprise, or alternatively consist of, sequences delineated in Table 1C, column 6, and have a nucleic acid sequence which is different from that published for the BAC clone identified as BAC ID NO:A (see Table 1C, column 4). In additional embodiments, the above-described polynucleotides of the invention comprise, or alternatively consist of, sequences delineated Table 1C, column 6, and have a nucleic acid sequence which is different from that contained in the BAC clone identified as BAC ID NO:A (see Table 1C, column 4). Polypeptides encoded by these polynucleotides, other polynucleotides that encode these polypeptides, and antibodies that bind these polypeptides are also encompassed by the invention. Additionally, fragments and variants of the above-described polynucleotides and polypeptides are also encompassed by the invention.

[0257] In additional specific embodiments, polynucleotides of the invention comprise, or alternatively consist of, one, two, three, four, five, six, seven, eight, nine, ten, or more fragments of the sequences delineated in column 6 of Table 1C, and the polynucleotide sequence of SEQ ID NO:X (e.g., as defined in Table 1C, column 2) or fragments or variants thereof. Polypeptides encoded by these polynucleotides, other polynucleotides that encode these polypeptides, and antibodies that bind these polypeptides are also encompassed by the invention.

[0258] In additional specific embodiments, polynucleotides of the invention comprise, or alternatively consist of, one, two, three, four, five, six, seven, eight, nine, ten, or more fragments of the sequences delineated in column 6 of Table 1C which correspond to the same ATCC Deposit No:Z (see Table 1C, column 1), and the polynucleotide sequence of SEQ ID NO:X (e.g., as defined in Table 1A, 1B, or 1C) or fragments or variants thereof. Polypeptides encoded by these polynucleotides, other polynucleotides that encode these polypeptides, and antibodies that bind these polypeptides are also encompassed by the invention.

[0259] In further specific embodiments, polynucleotides of the invention comprise, or alternatively consist of, one, two, three, four, five, six, seven, eight, nine, ten, or more fragments of the sequences delineated in the same row of column 6 of Table 1C, and the polynucleotide sequence of SEQ ID NO:X (e.g., as defined in Table 1A, 1B, or 1C) or fragments or variants thereof. Polypeptides encoded by these polynucleotides, other polynucleotides that encode these polypeptides, and antibodies that bind these polypeptides are also encompassed by the invention.

[0260] In additional specific embodiments, polynucleotides of the invention comprise, or alternatively consist of a polynucleotide sequence in which the 3′ 10 polynucleotides of one of the sequences delineated in column 6 of Table 1C and the 5′ 10 polynucleotides of the sequence of SEQ ID NO:X are directly contiguous. Nucleic acids which hybridize to the complement of these 20 contiguous polynucleotides under stringent hybridization conditions or alternatively, under lower stringency conditions, are also encompassed by the invention. Polypeptides encoded by these polynucleotides and/or nucleic acids, other polynucleotides and/or nucleic acids that encode these polypeptides, and antibodies that bind these polypeptides are also encompassed by the invention. Additionally, fragments and variants of the above-described polynucleotides, nucleic acids, and polypeptides are also encompassed by the invention.

[0261] In additional specific embodiments, polynucleotides of the invention comprise, or alternatively consist of a polynucleotide sequence in which the 3′ 10 polynucleotides of one of the sequences delineated in column 6 of Table 1C and the 5′ 10 polynucleotides of a fragment or variant of the sequence of SEQ ID NO:X (e.g., as described herein) are directly contiguous Nucleic acids which hybridize to the complement of these 20 contiguous polynucleotides under stringent hybridization conditions or alternatively, under lower stringency conditions, are also encompassed by the invention. Polypeptides encoded by these polynucleotides and/or nucleic acids, other polynucleotides and/or nucleic acids encoding these polypeptides, and antibodies that bind these polypeptides are also encompassed by the invention. Additionally, fragments and variants of the above-described polynucleotides, nucleic acids, and polypeptides are also encompassed by the invention.

[0262] In further specific embodiments, polynucleotides of the invention comprise, or alternatively consist of a polynucleotide sequence in which the 3′ 10 polynucleotides of a fragment or variant of the sequence of SEQ ID NO:X and the 5′ 10 polynucleotides of the sequence of one of the sequences delineated in column 6 of Table 1C are directly contiguous. Nucleic acids which hybridize to the complement of these 20 contiguous polynucleotides under stringent hybridization conditions or alternatively, under lower stringency conditions, are also encompassed by the invention. Polypeptides encoded by these polynucleotides and/or nucleic acids, other polynucleotides and/or nucleic acids encoding these polypeptides, and antibodies that bind these polypeptides are also encompassed by the invention. Additionally, fragments and variants of the above-described polynucleotides, nucleic acids, and polypeptides are also encompassed by the invention.

[0263] In specific embodiments, polynucleotides of the invention comprise, or alternatively consist of a polynucleotide sequence in which the 3′ 10 polynucleotides of one of the sequences delineated in column 6 of Table 1C and the 5′ 10 polynucleotides of another sequence in column 6 are directly contiguous. In preferred embodiments, the 3′ 10 polynucleotides of one of the sequences delineated in column 6 of Table 1C is directly contiguous with the 5′ 10 polynucleotides of the next sequential exon delineated in Table 1C, column 6. Nucleic acids which hybridize to the complement of these 20 contiguous polynucleotides under stringent hybridization conditions or alternatively, under lower stringency conditions, are also encompassed by the invention. Polypeptides encoded by these polynucleotides and/or nucleic acids, other polynucleotides and/or nucleic acids encoding these polypeptides, and antibodies that bind these polypeptides are also encompassed by the invention. Additionally, fragments and variants of the above-described polynucleotides, nucleic acids, and polypeptides are also encompassed by the invention.

[0264] In the present invention, a “polypeptide fragment” refers to an amino acid sequence which is a portion of the amino acid sequence contained in SEQ ID NO:Y, is a portion of the mature form of SEQ ID NO:Y as defined in columns 14 and 15 of Table 1A, a portion of an amino acid sequence encoded by the portion of SEQ ID NO:X as defined in columns 8 and 9 of Table 2, is a portion of an amino acid sequence encoded by the polynucleotide sequence of SEQ ID NO:X, is a portion of an amino acid sequence encoded by the complement of the polynucleotide sequence in SEQ ID NO:X, is a portion of the amino acid sequence of a mature (secreted) polypeptide encoded by the cDNA contained in ATCC Deposit No:Z, and/or is a portion of an amino acid sequence encoded by the cDNA contained in ATCC Deposit No:Z. Protein (polypeptide) fragments may be “free-standing,” or comprised within a larger polypeptide of which the fragment forms a part or region, most preferably as a single continuous region. Representative examples of polypeptide fragments of the invention, include, for example, fragments comprising, or alternatively consisting of, from about amino acid number 1-20, 21-40, 41-60, 61-80, 81-100, 101-120, 121-140, 141-160, 161-180, 181-200, 201-220, 221-240, 241-260, 261-280, 281-300, 301-320, 321-340, 341-360, 361-380, 381-400, 401-420, 421-440, 441-460, 461-480, 481-500, 501-520, 521-540, 541-560, 561-580, 581-600, 601-620, 621-640, 641-660, 661-680, 681-700, 701-720, 721-740, 741-760, 761-780, 781-800, 801-820, 821-840, 841-860, 861-880, 881-900, 901-920, 921-940, 941-960, 961-980, 981-1000, 1001-1020, 1021-1040, 1041-1060, 1061-1080, 1081-1100, 1101-1120, 1121-1140, 1141-1160, 1161-1180, 1181-1200, 1201-1220, 1221-1240, 1241-1260, 1261-1280, 1281-1300, 1301-1320, 1321-1340, 1341-1360, 1361-1380, 1381-1400, 1401-1420, 1421-1440, or 1441 to the end of the coding region of cDNA and SEQ ID NO: Y. In a preferred embodiment, polypeptide fragments of the invention include, for example, fragments comprising, or alternatively consisting of, from about amino acid number 1-20, 21-40, 41-60, 61-80, 81-100, 101-120, 121-140, 141-160, 161-180, 181-200, 201-220, 221-240, 241-260, 261-280, 281-300, 301-320, 321-340, 341-360, 361-380, 381-400, 401-420, 421-440, 441-460, 461-480, 481-500, 501-520, 521-540, 541-560, 561-580, 581-600, 601-620, 621-640, 641-660, 661-680, 681-700, 701-720, 721-740, 741-760, 761-780, 781-800, 801-820, 821-840, 841-860, 861-880, 881-900, 901-920, 921-940, 941-960, 961-980, 981-1000, 1001-1020, 1021-1040, 1041-1060, 1061-1080, 1081-1100, 1101-1120, 1121-1140, 1141-1160, 1161-1180, 1181-1200, 1201-1220, 1221-1240, 1241-1260, 1261-1280, 1281-1300, 1301-1320, 1321-1340, 1341-1360, 1361-1380, 1381-1400, 1401-1420, 1421-1440, or 1441 to the end of the coding region of SEQ ID NO:Y. Moreover, polypeptide fragments of the invention may be at least about 10, 15, 20, 25, 30, 35, 140, 45, 50, 55, 60, 65, 70, 75, 80, 85, 90, 100, 110, 120, 130, 140, or 150 amino acids in length. In this context “about” includes the particularly recited ranges or values, or ranges or values larger or smaller by several (5, 4, 3, 2, or 1) amino acids, at either extreme or at both extremes. Polynucleotides encoding these polypeptide fragments are also encompassed by the invention.

[0265] Even if deletion of one or more amino acids from the N-terminus of a protein results in modification of loss of one or more biological functions of the protein, other functional activities (e.g., biological activities, ability to multimerize, ability to bind a ligand) may still be retained. For example, the ability of shortened muteins to induce and/or bind to antibodies which recognize the complete or mature forms of the polypeptides generally will be retained when less than the majority of the residues of the complete or mature polypeptide are removed from the N-terminus. Whether a particular polypeptide lacking N-terminal residues of a complete polypeptide retains such immunologic activities can readily be determined by routine methods described herein and otherwise known in the art. It is not unlikely that a mutein with a large number of deleted N-terminal amino acid residues may retain some biological or immunogenic activities. In fact, peptides composed of as few as six amino acid residues may often evoke an immune response.

[0266] Accordingly, polypeptide fragments include the secreted protein as well as the mature form. Further preferred polypeptide fragments include the secreted protein or the mature form having a continuous series of deleted residues from the amino or the carboxy terminus, or both. For example, any number of amino acids, ranging from 1-60, can be deleted from the amino terminus of either the secreted polypeptide or the mature form. Similarly, any number of amino acids, ranging from 1-30, can be deleted from the carboxy terminus of the secreted protein or mature form. Furthermore, any combination of the above amino and carboxy terminus deletions are preferred. Similarly, polynucleotides encoding these polypeptide fragments are also preferred.

[0267] The present invention further provides polypeptides having one or more residues deleted from the amino terminus of the amino acid sequence of a polypeptide disclosed herein (e.g., a polypeptide of SEQ ID NO:Y, a polypeptide as defined in columns 14 and 15 of Table 1A, a polypeptide encoded by the polynucleotide sequence contained in SEQ ID NO:X or the complement thereof, a polypeptide encoded by the portion of SEQ ID NO:X as defined in columns 8 and 9 of Table 2, a polypeptide encoded by the portion of SEQ ID NO:B as defined in column 6 of Table 1C, a polypeptide encoded by the cDNA contained in ATCC Deposit No:Z, and/or a mature polypeptide encoded by the cDNA contained in ATCC Deposit No:Z). In particular, N-terminal deletions may be described by the general formula m-q, where q is a whole integer representing the total number of amino acid residues in a polypeptide of the invention (e.g., the polypeptide disclosed in SEQ ID NO:Y, the mature (secreted) portion of SEQ ID NO:Y as defined in columns 14 and 15 of Table 1A, or the polypeptide encoded by the portion of SEQ ID NO:X as defined in columns 8 and 9 of Table 2), and m is defined as any integer ranging from 2 to q-6. Polynucleotides encoding these polypeptides are also encompassed by the invention.

[0268] The present invention further provides polypeptides having one or more residues from the carboxy terminus of the amino acid sequence of a polypeptide disclosed herein (e.g., a polypeptide of SEQ ID NO:Y, the mature (secreted) portion of SEQ ID NO:Y as defined in columns 14 and 15 of Table 1A, a polypeptide encoded by the polynucleotide sequence contained in SEQ ID NO:X, a polypeptide encoded by the portion of SEQ ID NO:X as defined in columns 8 and 9 of Table 2, a polypeptide encoded by the portion of SEQ ID NO:B as defined in column 6 of Table 1C, a polypeptide encoded by the cDNA contained in ATCC Deposit No:Z, and/or a mature polypeptide encoded by the cDNA contained in ATCC Deposit No:Z). In particular, C-terminal deletions may be described by the general formula 1-n, where n is any whole integer ranging from 6 to q−1, and where n corresponds to the position of amino acid residue in a polypeptide of the invention. Polynucleotides encoding these polypeptides are also encompassed by the invention.

[0269] In addition, any of the above described N- or C-terminal deletions can be combined to produce a N- and C-terminal deleted polypeptide. The invention also provides polypeptides having one or more amino acids deleted from both the amino and the carboxyl termini, which may be described generally as having residues m-n of a polypeptide encoded by SEQ ID NO:X (e.g., including, but not limited to, the preferred polypeptide disclosed as SEQ ID NO:Y, the mature (secreted) portion of SEQ ID NO:Y as defined in columns 14 and 15 of Table 1A, and the polypeptide encoded by the portion of SEQ ID NO:X as defined in columns 8 and 9 of Table 2), the cDNA contained in ATCC Deposit No:Z, and/or the complement thereof, where n and m are integers as described above. Polynucleotides encoding these polypeptides are also encompassed by the invention.

[0270] Also as mentioned above, even if deletion of one or more amino acids from the C-terminus of a protein results in modification of loss of one or more biological functions of the protein, other functional activities (e.g., biological activities, ability to multimerize, ability to bind a ligand) may still be retained. For example the ability of the shortened mutein to induce and/or bind to antibodies which recognize the complete or mature forms of the polypeptide generally will be retained when less than the majority of the residues of the complete or mature polypeptide are removed from the C-terminus. Whether a particular polypeptide lacking C-terminal residues of a complete polypeptide retains such immunologic activities can readily be determined by routine methods described herein and otherwise known in the art. It is not unlikely that a mutein with a large number of deleted C-terminal amino acid residues may retain some biological or immunogenic activities. In fact, peptides composed of as few as six amino acid residues may often evoke an immune response.

[0271] The present application is also directed to proteins containing polypeptides at least 80%, 85%, 90%, 95%, 96%, 97%, 98% or 99% identical to a polypeptide sequence set forth herein. In preferred embodiments, the application is directed to proteins containing polypeptides at least 80%, 85%, 90%, 95%, 96%, 97%, 98% or 99% identical to polypeptides having the amino acid sequence of the specific N- and C-terminal deletions. Polynucleotides encoding these polypeptides are also encompassed by the invention.

[0272] Any polypeptide sequence encoded by, for example, the polynucleotide sequences set forth as SEQ ID NO:X or the complement thereof, (presented, for example, in Tables 1A and 2), the cDNA contained in ATCC Deposit No:Z, or the polynucleotide sequence as defined in column 6 of Table 1C, may be analyzed to determine certain preferred regions of the polypeptide. For example, the amino acid sequence of a polypeptide encoded by a polynucleotide sequence of SEQ ID NO:X (e.g., the polypeptide of SEQ ID NO:Y and the polypeptide encoded by the portion of SEQ ID NO:X as defined in columnns 8 and 9 of Table 2) or the cDNA contained in ATCC Deposit No:Z may be analyzed using the default parameters of the DNASTAR computer algorithm (DNASTAR, Inc., 1228 S. Park St., Madison, Wis. 53715 USA; http://www.dnastar.com/).

[0273] Polypeptide regions that may be routinely obtained using the DNASTAR computer algorithm include, but are not limited to, Garnier-Robson alpha-regions, beta-regions, turn-regions, and coil-regions; Chou-Fasman alpha-regions, beta-regions, and turn-regions; Kyte-Doolittle hydrophilic regions and hydrophobic regions; Eisenberg alpha- and beta-amphipathic regions; Karplus-Schulz flexible regions; Emini surface-forming regions; and Jameson-Wolf regions of high antigenic index. Among highly preferred polynucleotides of the invention in this regard are those that encode polypeptides comprising regions that combine several structural features, such as several (e.g., 1, 2, 3 or 4) of the features set out above.

[0274] Additionally, Kyte-Doolittle hydrophilic regions and hydrophobic regions, Emini surface-forming regions, and Jameson-Wolf regions of high antigenic index (i.e., containing four or more contiguous amino acids having an antigenic index of greater than or equal to 1.5, as identified using the default parameters of the Jameson-Wolf program) can routinely be used to determine polypeptide regions that exhibit a high degree of potential for antigenicity. Regions of high antigenicity are determined from data by DNASTAR analysis by choosing values which represent regions of the polypeptide which are likely to be exposed on the surface of the polypeptide in an environment in which antigen recognition may occur in the process of initiation of an immune response.

[0275] Preferred polypeptide fragments of the invention are fragments comprising, or alternatively, consisting of, an amino acid sequence that displays a functional activity (e.g. biological activity) of the polypeptide sequence of which the amino acid sequence is a fragment. By a polypeptide displaying a “functional activity” is meant a polypeptide capable of one or more known functional activities associated with a full-length protein, such as; for example, biological activity, antigenicity, immunogenicity, and/or multimerization, as described herein.

[0276] Other preferred polypeptide fragments are biologically active fragments. Biologically active fragments are those exhibiting activity similar, but not necessarily identical, to an activity of the polypeptide of the present invention. The biological activity of the fragments may include an improved desired activity, or a decreased undesirable activity.

[0277] In preferred embodiments, polypeptides of the invention comprise, or alternatively consist of, one, two, three, four, five or more of the antigenic fragments of the polypeptide of SEQ ID NO:Y, or portions thereof. Polynucleotides encoding these polypeptides are also encompassed by the invention.

Epitopes and Antibodies

[0278] The present invention encompasses polypeptides comprising, or alternatively consisting of, an epitope of: the polypeptide sequence shown in SEQ ID NO:Y; a polypeptide sequence encoded by SEQ ID NO:X or the complementary strand thereto; the polypeptide sequence encoded by the portion of SEQ ID NO:X as defined in columns 8 and 9 of Table 2; the polypeptide sequence encoded by the portion of SEQ ID NO:B as defined in column 6 of Table 1C or the complement thereto; the polypeptide sequence encoded by the cDNA contained in ATCC Deposit No:Z; or the polypeptide sequence encoded by a polynucleotide that hybridizes to the sequence of SEQ ID NO:X, the complement of the sequence of SEQ ID NO:X, the complement of a portion of SEQ ID NO:X as defined in columns 8 and 9 of Table 2, or the cDNA sequence contained in ATCC Deposit No:Z under stringent hybridization conditions or alternatively, under lower stringency hybridization as defined supra. The present invention further encompasses polynucleotide sequences encoding an epitope of a polypeptide sequence of the invention (such as, for example, the sequence disclosed in SEQ ID NO:X, or a fragment thereof), polynucleotide sequences of the complementary strand of a polynucleotide sequence encoding an epitope of the invention, and polynucleotide sequences which hybridize to the complementary strand under stringent hybridization conditions or alternatively, under lower stringency hybridization conditions defined supra.

[0279] The term “epitopes,” as used herein, refers to portions of a polypeptide having antigenic or immunogenic activity in an animal, preferably a mammal, and most preferably in a human. In a preferred embodiment, the present invention encompasses a polypeptide comprising an epitope, as well as the polynucleotide encoding this polypeptide. An “immunogenic epitope,” as used herein, is defined as a portion of a protein that elicits an antibody response in an animal, as determined by any method known in the art, for example, by the methods for generating antibodies described infra. (See, for example, Geysen et al., Proc. Natl. Acad. Sci. USA 81:3998-4002 (1983)). The term “antigenic epitope,” as used herein, is defined as a portion of a protein to which an antibody can immunospecifically bind its antigen as determined by any method well known in the art, for example, by the immunoassays described herein. Immunospecific binding excludes non-specific binding but does not necessarily exclude cross-reactivity with other antigens. Antigenic epitopes need not necessarily be immunogenic.

[0280] Fragments which function as epitopes may be produced by any conventional means. (See, e.g., Houghten, R. A., Proc. Natl. Acad. Sci. USA 82:5131-5135 (1985) further described in U.S. Pat. No. 4,631,211.)

[0281] In the present invention, antigenic epitopes preferably contain a sequence of at least 4, at least 5, at least 6, at least 7, more preferably at least 8, at least 9, at least 10, at least 11, at least 12, at least 13, at least 14, at least 15, at least 20, at least 25, at least 30, at least 40, at least 50, and, most preferably, between about 15 to about 30 amino acids. Preferred polypeptides comprising immunogenic or antigenic epitopes are at least 10, 15, 20, 25, 30, 35, 40, 45, 50, 55, 60, 65, 70, 75, 80, 85, 90, 95, or 100 amino acid residues in length. Additional non-exclusive preferred antigenic epitopes include the antigenic epitopes disclosed herein, as well as portions thereof. Antigenic epitopes are useful, for example, to raise antibodies, including monoclonal antibodies, that specifically bind the epitope. Preferred antigenic epitopes include the antigenic epitopes disclosed herein, as well as any combination of two, three, four, five or more of these antigenic epitopes. Antigenic epitopes can be used as the target molecules in immunoassays. (See, for instance, Wilson et al., Cell 37:767-778 (1984); Sutcliffe et al., Science 219:660-666 (1983)).

[0282] Non-limiting examples of epitopes of polypeptides that can be used to generate antibodies of the invention include a polypeptide comprising, or alternatively consisting of, at least one, two, three, four, five, six or more of the portion(s) of SEQ ID NO:Y specified in column 6 of Table 1B.1. These polypeptide fragments have been determined to bear antigenic epitopes of the proteins of the invention by the analysis of the Jameson-Wolf antigenic index which is included in the DNAStar suite of computer programs. By “comprise” it is intended that a polypeptide contains at least one, two, three, four, five, six or more of the portion(s) of SEQ ID NO:Y shown in column 6 of Table 1B.1, but it may contain additional flanking residues on either the amino or carboxyl termini of the recited portion. Such additional flanking sequences are preferably sequences naturally found adjacent to the portion; i.e., contiguous sequence shown in SEQ ID NO:Y. The flanking sequence may, however, be sequences from a heterolgous polypeptide, such as from another protein described herein or from a heterologous polypeptide not described herein. In particular embodiments, epitope portions of a polypeptide of the invention comprise one, two, three, or more of the portions of SEQ ID NO:Y shown in column 6 of Table 1B.1.

[0283] Similarly, immunogenic epitopes can be used, for example, to induce antibodies according to methods well known in the art. See, for instance, Sutcliffe et al., supra; Wilson et al., supra; Chow et al., Proc. Natl. Acad. Sci. USA 82:910-914; and Bittle et al., J. Gen. Virol. 66:2347-2354 (1985). Preferred immunogenic epitopes include the immunogenic epitopes disclosed herein, as well as any combination of two, three, four, five or more of these immunogenic epitopes. The polypeptides comprising one or more immunogenic epitopes may be presented for eliciting an antibody response together with a carrier protein, such as an albumin, to an animal system (such as rabbit or mouse), or, if the polypeptide is of sufficient length (at least about 25 amino acids), the polypeptide may be presented without a carrier. However, immunogenic epitopes comprising as few as 8 to 10 amino acids have been shown to be sufficient to raise antibodies capable of binding to, at the very least, linear epitopes in a denatured polypeptide (e.g., in Western blotting).

[0284] Epitope-bearing polypeptides of the present invention may be used to induce antibodies according to methods well known in the art including, but not limited to, in vivo immunization, in vitro immunization, and phage display methods. See, e.g., Sutcliffe et al., supra; Wilson et al., supra, and Bittle et al., J. Gen. Virol., 66:2347-2354 (1985). If in vivo immunization is used, animals may be immunized with free peptide; however, anti-peptide antibody titer may be boosted by coupling the peptide to a macromolecular carrier, such as keyhole limpet hemacyanin (KLH) or tetanus toxoid. For instance, peptides containing cysteine residues may be coupled to a carrier using a linker such as maleimidobenzoyl-N-hydroxysuccinimide ester (MBS), while other peptides may be coupled to carriers using a more general linking agent such as glutaraldehyde. Animals such as rabbits, rats and mice are immunized with either free or carrier-coupled peptides, for instance, by intraperitoneal and/or intradermal injection of emulsions containing about 100 μg of peptide or carrier protein and Freund's adjuvant or any other adjuvant known for stimulating an immune response. Several booster injections may be needed, for instance, at intervals of about two weeks, to provide a useful titer of anti-peptide antibody which can be detected, for example, by ELISA assay using free peptide adsorbed to a solid surface. The titer of anti-peptide antibodies in serum from an immunized animal may be increased by selection of anti-peptide antibodies, for instance, by adsorption to the peptide on a solid support and elution of the selected antibodies according to methods well known in the art.

[0285] As one of skill in the art will appreciate, and as discussed above, the polypeptides of the present invention (e.g., those comprising an immunogenic or antigenic epitope) can be fused to heterologous polypeptide sequences. For example, polypeptides of the present invention (including fragments or variants thereof), may be fused with the constant domain of immunoglobulins (IgA, IgE, IgG, IgM), or portions thereof (CH1, CH2, CH3, or any combination thereof and portions thereof, resulting in chimeric polypeptides. By way of another non-limiting example, polypeptides and/or antibodies of the present invention (including fragments or variants thereof) may be fused with albumin (including but not limited to recombinant human serum albumin or fragments or variants thereof (see, e.g., U.S. Pat. No. 5,876,969, issued Mar. 2, 1999, EP Patent 0 413 622, and U.S. Pat. No. 5,766,883, issued Jun. 16, 1998, herein incorporated by reference in their entirety)). In a preferred embodiment, polypeptides and/or antibodies of the present invention (including fragments or variants thereof) are fused with the mature form of human serum albumin (i.e., amino acids 1-585 of human serum albumin as shown in FIGS. 1 and 2 of EP Patent 0 322 094) which is herein incorporated by reference in its entirety. In another preferred embodiment, polypeptides and/or antibodies of the present invention (including fragments or variants thereof) are fused with polypeptide fragments comprising, or alternatively consisting of, amino acid residues 1-z of human serum albumin, where z is an integer from 369 to 419, as described in U.S. Pat. No. 5,766,883 herein incorporated by reference in its entirety. Polypeptides and/or antibodies of the present invention (including fragments or variants thereof) may be fused to either the N- or C-terminal end of the heterologous protein (e.g., immunoglobulin Fe polypeptide or human serum albumin polypeptide). Polynucleotides encoding fusion proteins of the invention are also encompassed by the invention.

[0286] Such fusion proteins as those described above may facilitate purification and may increase half-life in vivo. This has been shown for chimeric proteins consisting of the first two domains of the human CD4-polypeptide and various domains of the constant regions of the heavy or light chains of mammalian immunoglobulins. See, e.g., EP 394,827; Traunecker et al., Nature, 331:84-86 (1988). Enhanced delivery of an antigen across the epithelial barrier to the immune system has been demonstrated for antigens (e.g., insulin) conjugated to an FcRn binding partner such as IgG or Fe fragments (see, e.g., PCT Publications WO 96/22024 and WO 99/04813). IgG fusion proteins that have a disulfide-linked dimeric structure due to the IgG portion desulfide bonds have also been found to be more efficient in binding and neutralizing other molecules than monomeric polypeptides or fragments thereof alone. See, e.g., Fountoulakis et al., J. Biochem., 270:3958-3964 (1995). Nucleic acids encoding the above epitopes can also be recombined with a gene of interest as an epitope tag (e.g., the hemagglutinin (HA) tag or flag tag) to aid in detection and purification of the expressed polypeptide. For example, a system described by Janknecht et al. allows for the ready purification of non-denatured fusion proteins expressed in human cell lines (Janknecht et al., 1991, Proc. Natl. Acad. Sci. USA 88:8972-897). In this system, the gene of interest is subcloned into a vaccinia recombination plasmid such that the open reading frame of the gene is translationally fused to an amino-terminal tag consisting of six histidine residues. The tag serves as a matrix binding domain for the fusion protein. Extracts from cells infected with the recombinant vaccinia virus are loaded onto Ni2+ nitriloacetic acid-agarose column and histidine-tagged proteins can be selectively eluted with imidazole-containing buffers.

Fusion Proteins

[0287] Any polypeptide of the present invention can be used to generate fusion proteins. For example, the polypeptide of the present invention, when fused to a second protein, can be used as an antigenic tag. Antibodies raised against the polypeptide of the present invention can be used to indirectly detect the second protein by binding to the polypeptide. Moreover, because secreted proteins target cellular locations based on trafficking signals, polypeptides of the present invention which are shown to be secreted can be used as targeting molecules once fused to other proteins.

[0288] Examples of domains that can be fused to polypeptides of the present invention include not only heterologous signal sequences, but also other heterologous functional regions. The fusion does not necessarily need to be direct, but may occur through linker sequences.

[0289] In certain preferred embodiments, proteins of the invention are fusion proteins comprising an amino acid sequence that is an N and/or C-terminal deletion of a polypeptide of the invention. In preferred embodiments, the invention is directed to a fusion protein comprising an amino acid sequence that is at least 90%, 95%, 96%, 97%, 98% or 99% identical to a polypeptide sequence of the invention. Polynucleotides encoding these proteins are also encompassed by the invention.

[0290] Moreover, fusion proteins may also be engineered to improve characteristics of the polypeptide of the present invention. For instance, a region of additional amino acids, particularly charged amino acids, may be added to the N-terminus of the polypeptide to improve stability and persistence during purification from the host cell or subsequent handling and storage. Also, peptide moieties may be added to the polypeptide to facilitate purification. Such regions may be removed prior to final preparation of the polypeptide. The addition of peptide moieties to facilitate handling of polypeptides are familiar and routine techniques in the art.

[0291] As one of skill in the art will appreciate that, as discussed above, polypeptides of the present invention, and epitope-bearing fragments thereof, can be combined with heterologous polypeptide sequences. For example, the polypeptides of the present invention may be fused with heterologous polypeptide sequences, for example, the polypeptides of the present invention may be fused with the constant domain of immunoglobulins (IgA, IgE, IgG, IgM) or portions thereof (CH1, CH2, CH3, and any combination thereof, including both entire domains and portions thereof), or albumin (including, but not limited to, native or recombinant human albumin or fragments or variants thereof (see, e.g., U.S. Pat. No. 5,876,969, issued Mar. 2, 1999, EP Patent 0 413 622, and U.S. Pat. No. 5,766,883, issued Jun. 16, 1998, herein incorporated by reference in their entirety)), resulting in chimeric polypeptides. For example, EP-A-O 464 533 (Canadian counterpart 2045869) discloses fusion proteins comprising various portions of constant region of immunoglobulin molecules together with another human protein or part thereof. In many cases, the Fc part in a fusion protein is beneficial in therapy and diagnosis, and thus can result in, for example, improved pharmacokinetic properties (EP-A 0232 262). Alternatively, deleting the Fc part after the fusion protein has been expressed, detected, and purified, would be desired. For example, the Fe portion may hinder therapy and diagnosis if the fusion protein is used as an antigen for immunizations. In drug discovery, for example, human proteins, such as hIL-5, have been fused with Fc portions for the purpose of high-throughput screening assays to identify antagonists of hIL-5. See, D. Bennett et al., J. Molecular Recognition 8:52-58 (1995); K. Johanson et al., J. Biol. Chem. 270:9459-9471 (1995).

[0292] Moreover, the polypeptides of the present invention can be fused to marker sequences, such as a polypeptide which facilitates purification of the fused polypeptide. In preferred embodiments, the marker amino acid sequence is a hexa-histidine peptide, such as the tag provided in a pQE vector (QIAGEN, Inc., 9259 Eton Avenue, Chatsworth, Calif., 91311), among others, many of which are commercially available. As described in Gentz et al., Proc. Natl. Acad. Sci. USA 86:821-824 (1989), for instance, hexa-histidine provides for convenient purification of the fusion protein. Another peptide tag useful for purification, the “HA” tag, corresponds to an epitope derived from the influenza hemagglutinin protein (Wilson et al., Cell 37:767 (1984)).

[0293] Additional fusion proteins of the invention may be generated through the techniques of gene-shuffling, motif-shuffling, exon-shuffling, and/or codon-shuffling (collectively referred to as “DNA shuffling”). DNA shuffling may be employed to modulate the activities of polypeptides of the invention, such methods can be used to generate polypeptides with altered activity, as well as agonists and antagonists of the polypeptides. See, generally, U.S. Pat. Nos. 5,605,793; 5,811,238; 5,830,721; 5,834,252; and 5,837,458, and Patten et al., Curr. Opinion Biotechnol. 8:724-33 (1997); Harayama, Trends Biotechnol. 16(2):76-82 (1998); Hansson, et al., J. Mol. Biol. 287:265-76 (1999); and Lorenzo and Blasco, Biotechniques 24(2):308-13 (1998) (each of these patents and publications are hereby incorporated by reference in its entirety). In one embodiment, alteration of polynucleotides corresponding to SEQ ID NO:X and the polypeptides encoded by these polynucleotides may be achieved by DNA shuffling. DNA shuffling involves the assembly of two or more DNA segments by homologous or site-specific recombination to generate variation in the polynucleotide sequence. In another embodiment, polynucleotides of the invention, or the encoded polypeptides, may be altered by being subjected to random mutagenesis by error-prone PCR, random nucleotide insertion or other methods prior to recombination. In another embodiment, one or more components, motifs, sections, parts, domains, fragments, etc., of a polynucleotide encoding a polypeptide of the invention may be recombined with one or more components, motifs, sections, parts, domains, fragments, etc. of one or more heterologous molecules.

[0294] Thus, any of these above fusions can be engineered using the polynucleotides or the polypeptides of the present invention.

Recombinant and Synthetic Production of Polypeptides of the Invention

[0295] The present invention also relates to vectors containing the polynucleotide of the present invention, host cells, and the production of polypeptides by synthetic and recombinant techniques. The vector may be, for example, a phage, plasmid, viral, or retroviral vector. Retroviral vectors may be replication competent or replication defective. In the latter case, viral propagation generally will occur only in complementing host cells.

[0296] The polynucleotides of the invention may be joined to a vector containing a selectable marker for propagation in a host. Generally, a plasmid vector is introduced in a precipitate, such as a calcium phosphate precipitate, or in a complex with a charged lipid. If the vector is a virus, it may be packaged in vitro using an appropriate packaging cell line and then transduced into host cells.

[0297] The polynucleotide insert should be operatively linked to an appropriate promoter, such as the phage lambda PL promoter, the E. coli lac, trp, phoA and tac promoters, the SV40 early and late promoters and promoters of retroviral LTRs, to name a few. Other suitable promoters will be known to the skilled artisan. The expression constructs will further contain sites for transcription initiation, termination, and, in the transcribed region, a ribosome binding site for translation. The coding portion of the transcripts expressed by the constructs will preferably include a translation initiating codon at the beginning and a termination codon (UAA, UGA or UAG) appropriately positioned at the end of the polypeptide to be translated.

[0298] As indicated, the expression vectors will preferably include at least one selectable marker. Such markers include dihydrofolate reductase, G418, glutamine synthase, or neomycin resistance for eukaryotic cell culture, and tetracycline, kanamycin or ampicillin resistance genes for culturing in E. coli and other bacteria. Representative examples of appropriate hosts include, but are not limited to, bacterial cells, such as E. coli, Streptomyces and Salmonella typhimurium cells; fungal cells, such as yeast cells (e.g., Saccharomyces cerevisiae or Pichia pastoris (ATCC Accession No. 201178)); insect cells such as Drosophila S2 and Spodoptera Sf9 cells; animal cells such as CHO, COS, 293, and Bowes melanoma cells; and plant cells. Appropriate culture mediums and conditions for the above-described host cells are known in the art.

[0299] Among vectors preferred for use in bacteria include pQE70, pQE60 and pQE-9, available from QIAGEN, Inc., pBluescript vectors, Phagescript vectors, pNH8A, pNH16a, pNH18A, pNH46A, available from Stratagene Cloning Systems, Inc.; and ptrc99a, pKK223-3, pKK233-3, pDR540, pRIT5 available from Pharmacia Biotech, Inc. Among preferred eukaryotic vectors are pWLNEO, pSV2CAT, pOG44, pXT1 and pSG available from Stratagene; and pSVK3, pBPV, pMSG and pSVL available from Pharmacia. Preferred expression vectors for use in yeast systems include, but are not limited to pYES2, pYD1, pTEF1/Zeo, pYES2/GS, pPICZ, pGAPZ, pGAPZalph, pPIC9, pPIC3.5, pHIL-D2, pHIL-S1, pPIC3.5K, pPIC9K, and PAO815 (all available from Invitrogen, Carlbad, Calif.). Other suitable vectors will be readily apparent to the skilled artisan.

[0300] Vectors which use glutamine synthase (GS) or DHFR as the selectable markers can be amplified in the presence of the drugs methionine sulphoximine or methotrexate, respectively. An advantage of glutamine synthase based vectors are the availabilty of cell lines (e.g., the murine myeloma cell line, NSO) which are glutamine synthase negative. Glutamine synthase expression systems can also function in glutamine synthase expressing cells (e.g., Chinese Hamster Ovary (CHO) cells) by providing additional inhibitor to prevent the functioning of the endogenous gene. A glutamine synthase expression system and components thereof are detailed in PCT publications: WO87/04462; WO86/05807; WO89/01036; WO89/10404; and WO91/06657, which are hereby incorporated in their entireties by reference herein. Additionally, glutamine synthase expression vectors can be obtained from Lonza Biologics, Inc. (Portsmouth, N.H.). Expression and production of monoclonal antibodies using a GS expression system in murine myeloma cells is described in Bebbington et al., Bio/technology 10:169(1992) and in Biblia and Robinson Biotechnol. Prog. 11:1 (1995) which are herein incorporated by reference.

[0301] The present invention also relates to host cells containing the above-described vector constructs described herein, and additionally encompasses host cells containing nucleotide sequences of the invention that are operably associated with one or more heterologous control regions (e.g., promoter and/or enhancer) using techniques known of in the art. The host cell can be a higher eukaryotic cell, such as a mammalian cell (e.g., a human derived cell), or a lower eukaryotic cell, such as a yeast cell, or the host cell can be a prokaryotic cell, such as a bacterial cell. A host strain may be chosen which modulates the expression of the inserted gene sequences, or modifies and processes the gene product in the specific fashion desired. Expression from certain promoters can be elevated in the presence of certain inducers; thus expression of the genetically engineered polypeptide may be controlled. Furthermore, different host cells have characteristics and specific mechanisms for the translational and post-translational processing and modification (e.g., phosphorylation, cleavage) of proteins. Appropriate cell lines can be chosen to ensure the desired modifications and processing of the foreign protein expressed.

[0302] Introduction of the nucleic acids and nucleic acid constructs of the invention into the host cell can be effected by calcium phosphate transfection, DEAE-dextran mediated transfection, cationic lipid-mediated transfection, electroporation, transduction, infection, or other methods. Such methods are described in many standard laboratory manuals, such as Davis et al., Basic Methods In Molecular Biology (1986). It is specifically contemplated that the polypeptides of the present invention may in fact be expressed by a host cell lacking a recombinant vector.

[0303] In addition to encompassing host cells containing the vector constructs discussed herein, the invention also encompasses primary, secondary, and immortalized host cells of vertebrate origin, particularly mammalian origin, that have been engineered to delete or replace endogenous genetic material (e.g., the coding sequence), and/or to include genetic material (e.g., heterologous polynucleotide sequences) that is operably associated with polynucleotides of the invention, and which activates, alters, and/or amplifies endogenous polynucleotides. For example, techniques known in the art may be used to operably associate heterologous control regions (e.g., promoter and/or enhancer) and endogenous polynucleotide sequences via homologous recombination (see, e.g., U.S. Pat. No. 5,641,670, issued Jun. 24, 1997; International Publication Number WO 96/29411; International Publication Number WO 94/12650; Koller et al., Proc. Natl. Acad. Sci. USA 86:8932-8935 (1989); and Zijlstra et al., Nature 342:435-438 (1989), the disclosures of each of which are incorporated by reference in their entireties).

[0304] Polypeptides of the invention can be recovered and purified from recombinant cell cultures by well-known methods including ammonium sulfate or ethanol precipitation, acid extraction, anion or cation exchange chromatography, phosphocellulose chromatography, hydrophobic interaction chromatography, affinity chromatography, hydroxylapatite chromatography and lectin chromatography. Most preferably, high performance liquid chromatography (“HPLC”) is employed for purification.

[0305] Polypeptides of the present invention can also be recovered from: products purified from natural sources, including bodily fluids, tissues and cells, whether directly isolated or cultured; products of chemical synthetic procedures; and products produced by recombinant techniques from a prokaryotic or eukaryotic host, including, for example, bacterial, yeast, higher plant, insect, and mammalian cells. Depending upon the host employed in a recombinant production procedure, the polypeptides of the present invention may be glycosylated or may be non-glycosylated. In addition, polypeptides of the invention may also include an initial modified methionine residue, in some cases as a result of host-mediated processes. Thus, it is well known in the art that the N-terminal methionine encoded by the translation initiation codon generally is removed with high efficiency from any protein after translation in all eukaryotic cells. While the N-terminal methionine on most proteins also is efficiently removed in most prokaryotes, for some proteins, this prokaryotic removal process is inefficient, depending on the nature of the amino acid to which the N-terminal methionine is covalently linked.

[0306] In one embodiment, the yeast Pichia pastoris is used to express polypeptides of the invention in a eukaryotic system. Pichia pastoris is a methylotrophic yeast which can metabolize methanol as its sole carbon source. A main step in the methanol metabolization pathway is the oxidation of methanol to formaldehyde using O₂. This reaction is catalyzed by the enzyme alcohol oxidase. In order to metabolize methanol as its sole carbon source, Pichia pastoris must generate high levels of alcohol oxidase due, in part, to the relatively low affinity of alcohol oxidase for O₂. Consequently, in a growth medium depending on methanol as a main carbon source, the promoter region of one of the two alcohol oxidase genes (AOXI) is highly active. In the presence of methanol, alcohol oxidase produced from the AOXI gene comprises up to approximately 30% of the total soluble protein in Pichia pastoris. See Ellis, S. B., et al., Mol. Cell. Biol. 5:1111-21 (1985); Koutz, P. J, et al., Yeast 5:167-77 (1989); Tschopp, J. F., et al., Nucl. Acids Res. 15:3859-76 (1987). Thus, a heterologous coding sequence, such as, for example, a polynucleotide of the present invention, under the transcriptional regulation of all or part of the AOXI regulatory sequence is expressed at exceptionally high levels in Pichia yeast grown in the presence of methanol.

[0307] In one example, the plasmid vector pPIC9K is used to express DNA encoding a polypeptide of the invention, as set forth herein, in a Pichea yeast system essentially as described in “Pichia Protocols: Methods in Molecular Biology,” D. R. Higgins and J. Cregg, eds. The Humana Press, Totowa, N.J., 1998. This expression vector allows expression and secretion of a polypeptide of the invention by virtue of the strong AOXI promoter linked to the Pichia pastoris alkaline phosphatase (PHO) secretory signal peptide (i.e., leader) located upstream of a multiple cloning site.

[0308] Many other yeast vectors could be used in place of pPIC9K, such as, pYES2, pYD1, pTEF1/Zeo, pYES2/GS, pPICZ, pGAPZ, pGAPZalpha, pPIC9, pPIC3.5, pHIL-D2, pHIL-S1, pPIC3.5K, and PAO815, as one skilled in the art would readily appreciate, as long as the proposed expression construct provides appropriately located signals for transcription, translation, secretion (if desired), and the like, including an in-frame AUG as required.

[0309] In another embodiment, high-level expression of a heterologous coding sequence, such as, for example, a polynucleotide of the present invention, may be achieved by cloning the heterologous polynucleotide of the invention into an expression vector such as, for example, pGAPZ or pGAPZalpha, and growing the yeast culture in the absence of methanol.

[0310] In addition to encompassing host cells containing the vector constructs discussed herein, the invention also encompasses primary, secondary, and immortalized host cells of vertebrate origin, particularly mammalian origin, that have been engineered to delete or replace endogenous genetic material (e.g., coding sequence), and/or to include genetic material (e.g., heterologous polynucleotide sequences) that is operably associated with polynucleotides of the invention, and which activates, alters, and/or amplifies endogenous polynucleotides. For example, techniques known in the art may be used to operably associate heterologous control regions (e.g., promoter and/or enhancer) and endogenous polynucleotide sequences via homologous recombination (see, e.g., U.S. Pat. No. 5,641,670, issued Jun. 24, 1997; International Publication No. WO 96/29411, published Sep. 26, 1996; International Publication No. WO 94/12650, published Aug. 4, 1994; Koller et al., Proc. Natl. Acad. Sci. USA 86:8932-8935 (1989); and Zijlstra et al., Nature 342:435-438 (1989), the disclosures of each of which are incorporated by reference in their entireties).

[0311] In addition, polypeptides of the invention can be chemically synthesized using techniques known in the art (e.g., see Creighton, 1983, Proteins: Structures and Molecular Principles, W.H. Freeman & Co., N.Y., and Hunkapiller et al., Nature, 310:105-111 (1984)). For example, a polypeptide corresponding to a fragment of a polypeptide can be synthesized by use of a peptide synthesizer. Furthermore, if desired, nonclassical amino acids or chemical amino acid analogs can be introduced as a substitution or addition into the polypeptide sequence. Non-classical amino acids include, but are not limited to, to the D-isomers of the common amino acids, 2,4-diaminobutyric acid, a-amino isobutyric acid, 4-aminobutyric acid, Abu, 2-amino butyric acid, g-Abu, e-Ahx, 6-amino hexanoic acid, Aib, 2-amino isobutyric acid, 3-amino propionic acid, ornithine, norleucine, norvaline, hydroxyproline, sarcosine, citrulline, homocitrulline, cysteic acid, t-butylglycine, t-butylalanine, phenylglycine, cyclohexylalanine, b-alanine, fluoro-amino acids, designer amino acids such as b-methyl amino acids, Ca-methyl amino acids, Na-methyl amino acids, and amino acid analogs in general. Furthermore, the amino acid can be D (dextrorotary) or L (levorotary).

[0312] The invention encompasses polypeptides of the present invention which are differentially modified during or after translation, e.g., by glycosylation, acetylation, phosphorylation, amidation, derivatization by known protecting/blocking groups, proteolytic cleavage, linkage to an antibody molecule or other cellular ligand, etc. Any of numerous chemical modifications may be carried out by known techniques, including but not limited, to specific chemical cleavage by cyanogen bromide, trypsin, chymotrypsin, papain, V8 protease, NaBH₄; acetylation, formylation, oxidation, reduction; metabolic synthesis in the presence of tunicamycin; etc.

[0313] Additional post-translational modifications encompassed by the invention include, for example, e.g., N-linked or O-linked carbohydrate chains, processing of N-terminal or C-terminal ends), attachment of chemical moieties to the amino acid backbone, chemical modifications of N-linked or O-linked carbohydrate chains, and addition or deletion of an N-terminal methionine residue as a result of procaryotic host cell expression. The polypeptides may also be modified with a detectable label, such as an enzymatic, fluorescent, isotopic or affinity label to allow for detection and isolation of the protein.

[0314] Examples of suitable enzymes include horseradish peroxidase, alkaline phosphatase, beta-galactosidase, or acetylcholinesterase; examples of suitable prosthetic group complexes include streptavidin/biotin and avidin/biotin; examples of suitable fluorescent materials include umbelliferone, fluorescein, fluorescein isothiocyanate, rhodamine, dichlorotriazinylamine fluorescein, dansyl chloride or phycoerythrin; an example of a luminescent material includes luminol; examples of bioluminescent materials include luciferase, luciferin, and aequorin; and examples of suitable radioactive material include iodine (¹²¹I, ¹²³I, ¹²⁵I, ¹³¹I), carbon (¹⁴C) sulfur (³⁵S), tritium (³H), indium (¹¹¹In, ¹¹²In, ^{113m}In, ^{115m}In), technetium (⁹⁹Tc, ^{99m}Tc), thallium (²⁰¹Ti), gallium (⁶⁸Ga, ⁶⁷Ga), palladium (¹⁰³Pd), molybdenum (⁹⁹Mo), xenon (¹³³Xe), fluorine (¹⁸F), ¹⁵³Sm, ¹⁷⁷Lu, ¹⁵⁹Gd, ¹⁴⁹Pm, ¹⁴⁰La, ¹⁷⁵Yb, ¹⁶⁶Ho, ⁹⁰Y, ⁴⁷Sc, ¹⁸⁶Re, ¹⁸⁸Re, ¹⁴²Pr, ¹⁰⁵Rh, and ⁹⁷Ru.

[0315] In specific embodiments, a polypeptide of the present invention or fragment or variant thereof is attached to macrocyclic chelators that associate with radiometal ions, including but not limited to, ¹⁷⁷Lu, ⁹⁰Y, ¹⁶⁶Ho, and ¹⁵³Sm, to polypeptides. In a preferred embodiment, the radiometal ion associated with the macrocyclic chelators is ¹¹¹In. In another preferred embodiment, the radiometal ion associated with the macrocyclic chelator is ⁹⁰Y. In specific embodiments, the macrocyclic chelator is 1,4,7,10-tetraazacyclododecane-N,N′,N″,N′″-tetraacetic acid (DOTA). In other specific embodiments, DOTA is attached to an antibody of the invention or fragment thereof via a linker molecule. Examples of linker molecules useful for conjugating DOTA to a polypeptide are commonly known in the art—see, for example, DeNardo et al., Clin Cancer Res. 4(10):2483-90 (1998); Peterson et al., Bioconjug. Chem. 10(4):553-7 (1999); and Zimmerman et al, Nucl. Med. Biol. 26(8):943-50 (1999); which are hereby incorporated by reference in their entirety.

[0316] As mentioned, the proteins of the invention may be modified by either natural processes, such as posttranslational processing, or by chemical modification techniques which are well known in the art. It will be appreciated that the same type of modification may be present in the same or varying degrees at several sites in a given polypeptide. Polypeptides of the invention may be branched, for example, as a result of ubiquitination, and they may be cyclic, with or without branching. Cyclic, branched, and branched cyclic polypeptides may result from posttranslation natural processes or may be made by synthetic methods. Modifications include acetylation, acylation, ADP-ribosylation, amidation, covalent attachment of flavin, covalent attachment of a heme moiety, covalent attachment of a nucleotide or nucleotide derivative, covalent attachment of a lipid or lipid derivative, covalent attachment of phosphotidylinositol, cross-linking, cyclization, disulfide bond formation, demethylation, formation of covalent cross-links, formation of cysteine, formation of pyroglutamate, formylation, gamma-carboxylation, glycosylation, GPI anchor formation, hydroxylation, iodination, methylation, myristoylation, oxidation, pegylation, proteolytic processing, phosphorylation, prenylation, racemization, selenoylation, sulfation, transfer-RNA mediated addition of amino acids to proteins such as arginylation, and ubiquitination. (See, for instance, PROTEINS—STRUCTURE AND MOLECULAR PROPERTIES, 2nd Ed., T. E. Creighton, W. H. Freeman and Company, New York (1993); POSTTRANSLATIONAL COVALENT MODIFICATION OF PROTEINS, B. C. Johnson, Ed., Academic Press, New York, pgs. 1-12 (1983); Seifter et al., Meth. Enzymol. 182:626-646 (1990); Rattan et al., Ann. N.Y. Acad. Sci. 663:48-62 (1992)).

[0317] Also provided by the invention are chemically modified derivatives of the polypeptides of the invention which may provide additional advantages such as increased solubility, stability and circulating time of the polypeptide, or decreased immunogenicity (see U.S. Pat. No. 4,179,337). The chemical moieties for derivitization may be selected from water soluble polymers such as polyethylene glycol, ethylene glycol/propylene glycol copolymers, carboxymethylcellulose, dextran, polyvinyl alcohol and the like. The polypeptides may be modified at random positions within the molecule, or at predetermined positions within the molecule and may include one, two, three or more attached chemical moieties.

[0318] The polymer may be of any molecular weight, and may be branched or unbranched. For polyethylene glycol, the preferred molecular weight is between about 1 kDa and about 100 kDa (the term “about” indicating that in preparations of polyethylene glycol, some molecules will weigh more, some less, than the stated molecular weight) for ease in handling and manufacturing. Other sizes may be used, depending on the desired therapeutic profile (e.g., the duration of sustained release desired, the effects, if any on biological activity, the ease in handling, the degree or lack of antigenicity and other known effects of the polyethylene glycol to a therapeutic protein or analog). For example, the polyethylene glycol may have an average molecular weight of about 200, 500, 1000, 1500, 2000, 2500, 3000, 3500, 4000, 4500, 5000, 5500, 6000, 6500, 7000, 7500, 8000, 8500, 9000, 9500, 10,000, 10,500, 11,000, 11,500, 12,000, 12,500, 13,000, 13,500, 14,000, 14,500, 15,000, 15,500, 16,000, 16,500, 17,000, 17,500, 18,000, 18,500, 19,000, 19,500, 20,000, 25,000, 30,000, 35,000, 40,000, 45,000, 50,000, 55,000, 60,000, 65,000, 70,000, 75,000, 80,000, 85,000, 90,000, 95,000, or 100,000 kDa.

[0319] As noted above, the polyethylene glycol may have a branched structure. Branched polyethylene glycols are described, for example, in U.S. Pat. No. 5,643,575; Morpurgo et al., Appl. Biochem. Biotechnol. 56:59-72 (1996); Vorobjev et al., Nucleosides Nucleotides 18:2745-2750 (1999); and Caliceti et al., Bioconjug. Chem. 10:638-646 (1999), the disclosures of each of which are incorporated herein by reference.

[0320] The polyethylene glycol molecules (or other chemical moieties) should be attached to the protein with consideration of effects on functional or antigenic domains of the protein. There are a number of attachment methods available to those skilled in the art, such as, for example, the method disclosed in EP 0 401 384 (coupling PEG to G-CSF), herein incorporated by reference; see also Malik et al., Exp. Hematol. 20:1028-1035 (1992), reporting pegylation of GM-CSF using tresyl chloride. For example, polyethylene glycol may be covalently bound through amino acid residues via a reactive group, such as a free amino or carboxyl group. Reactive groups are those to which an activated polyethylene glycol molecule may be bound. The amino acid residues having a free amino group may include lysine residues and the N-terminal amino acid residues; those having a free carboxyl group may include aspartic acid residues glutamic acid residues and the C-terminal amino acid residue. Sulfydryl groups may also be used as a reactive group for attaching the polyethylene glycol molecules. Preferred for therapeutic purposes is attachment at an amino group, such as attachment at the N-terminus or lysine group.

[0321] As suggested above, polyethylene glycol may be attached to proteins via linkage to any of a number of amino acid residues. For example, polyethylene glycol can be linked to proteins via covalent bonds to lysine, histidine, aspartic acid, glutamic acid, or cysteine residues. One or more reaction chemistries may be employed to attach polyethylene glycol to specific amino acid residues (e.g., lysine, histidine, aspartic acid, glutamic acid, or cysteine) of the protein or to more than one type of amino acid residue (e.g., lysine, histidine, aspartic acid, glutamic acid, cysteine and combinations thereof) of the protein.

[0322] One may specifically desire proteins chemically modified at the N-terminus. Using polyethylene glycol as an illustration of the present composition, one may select from a variety of polyethylene glycol molecules (by molecular weight, branching, etc.), the proportion of polyethylene glycol molecules to protein (polypeptide) molecules in the reaction mix, the type of pegylation reaction to be performed, and the method of obtaining the selected N-terminally pegylated protein. The method of obtaining the N-terminally pegylated preparation (i.e., separating this moiety from other monopegylated moieties if necessary) may be by purification of the N-terminally pegylated material from a population of pegylated protein molecules. Selective proteins chemically modified at the N-terminus modification may be accomplished by reductive alkylation which exploits differential reactivity of different types of primary amino groups (lysine versus the N-terminal) available for derivatization in a particular protein. Under the appropriate reaction conditions, substantially selective derivatization of the protein at the N-terminus with a carbonyl group containing polymer is achieved.

[0323] As indicated above, pegylation of the proteins of the invention may be accomplished by any number of means. For example, polyethylene glycol may be attached to the protein either directly or by an intervening linker. Linkerless systems for attaching polyethylene glycol to proteins are described in Delgado et al., Crit. Rev. Thera. Drug Carrier Sys. 9:249-304 (1992); Francis et al., Intern. J. of Hematol. 68:1-18 (1998); U.S. Pat. No. 4,002,531; U.S. Pat. No. 5,349,052; WO 95/06058; and WO 98/32466, the disclosures of each of which are incorporated herein by reference.

[0324] One system for attaching polyethylene glycol directly to amino acid residues of proteins without an intervening linker employs tresylated MPEG, which is produced by the modification of monmethoxy polyethylene glycol (MPEG) using tresylchloride (ClSO₂CH₂CF₃). Upon reaction of protein with tresylated MPEG, polyethylene glycol is directly attached to amine groups of the protein. Thus, the invention includes protein-polyethylene glycol conjugates produced by reacting proteins of the invention with a polyethylene glycol molecule having a 2,2,2-trifluoreothane sulphonyl group.

[0325] Polyethylene glycol can also be attached to proteins using a number of different intervening linkers. For example, U.S. Pat. No. 5,612,460, the entire disclosure of which is incorporated herein by reference, discloses urethane linkers for connecting polyethylene glycol to proteins. Protein-polyethylene glycol conjugates wherein the polyethylene glycol is attached to the protein by a linker can also be produced by reaction of proteins with compounds such as MPEG-succinimidylsuccinate, MPEG activated with 1,1′-carbonyldiimidazole, MPEG-2,4,5-trichloropenylcarbonate, MPEG-p-nitrophenolcarbonate, and various MPEG-succinate derivatives. A number of additional polyethylene glycol derivatives and reaction chemistries for attaching polyethylene glycol to proteins are described in International Publication No. WO 98/32466, the entire disclosure of which is incorporated herein by reference. Pegylated protein products produced using the reaction chemistries set out herein are included within the scope of the invention.

[0326] The number of polyethylene glycol moieties attached to each protein of the invention (i.e., the degree of substitution) may also vary. For example, the pegylated proteins of the invention may be linked, on average, to 1, 2, 3, 4, 5, 6, 7, 8, 9, 10, 12, 15, 17, 20, or more polyethylene glycol molecules. Similarly, the average degree of substitution within ranges such as 1-3, 2-4, 3-5, 4-6, 5-7, 6-8, 7-9, 8-10, 9-11, 10-12, 11-13, 12-14, 13-15, 14-16, 15-17, 16-18, 17-19, or 18-20 polyethylene glycol moieties per protein molecule. Methods for determining the degree of substitution are discussed, for example, in Delgado et al., Crit. Rev. Thera. Drug Carrier Sys. 9:249-304 (1992).

[0327] The polypeptides of the invention can be recovered and purified from chemical synthesis and recombinant cell cultures by standard methods which include, but are not limited to, ammonium sulfate or ethanol precipitation, acid extraction, anion or cation exchange chromatography, phosphocellulose chromatography, hydrophobic interaction chromatography, affinity chromatography, hydroxylapatite chromatography and lectin chromatography. Most preferably, high performance liquid chromatography (“HPLC”) is employed for purification. Well known techniques for refolding protein may be employed to regenerate active conformation when the polypeptide is denatured during isolation and/or purification.

[0328] The polypeptides of the invention may be in monomers or multimers (i.e., dimers, trimers, tetramers and higher multimers). Accordingly, the present invention relates to monomers and multimers of the polypeptides of the invention, their preparation, and compositions (preferably, Therapeutics) containing them. In specific embodiments, the polypeptides of the invention are monomers, dimers, trimers or tetramers. In additional embodiments, the multimers of the invention are at least dimers, at least trimers, or at least tetramers.

[0329] Multimers encompassed by the invention may be homomers or heteromers. As used herein, the term homomer refers to a multimer containing only polypeptides corresponding to a protein of the invention (e.g., the amino acid sequence of SEQ ID NO:Y, an amino acid sequence encoded by SEQ ID NO:X or the complement of SEQ ID NO:X, the amino acid sequence encoded by the portion of SEQ ID NO:X as defined in columns 8 and 9 of Table 2, and/or an amino acid sequence encoded by cDNA contained in ATCC Deposit No:Z (including fragments, variants, splice variants, and fusion proteins, corresponding to these as described herein)). These homomers may contain polypeptides having identical or different amino acid sequences. In a specific embodiment, a homomer of the invention is a multimer containing only polypeptides having an identical amino acid sequence. In another specific embodiment, a homomer of the invention is a multimer containing polypeptides having different amino acid sequences. In specific embodiments, the multimer of the invention is a homodimer (e.g., containing two polypeptides having identical or different amino acid sequences) or a homotrimer (e.g., containing three polypeptides having identical and/or different amino acid sequences). In additional embodiments, the homomeric multimer of the invention is at least a homodimer, at least a homotrimer, or at least a homotetramer.

[0330] As used herein, the term heteromer refers to a multimer containing one or more heterologous polypeptides (i.e., polypeptides of different proteins) in addition to the polypeptides of the invention. In a specific embodiment, the multimer of the invention is a heterodimer, a heterotrimer, or a heterotetramer. In additional embodiments, the heteromeric multimer of the invention is at least a heterodimer, at least a heterotrimer, or at least a heterotetramer.

[0331] Multimers of the invention may be the result of hydrophobic, hydrophilic, ionic and/or covalent associations and/or may be indirectly linked by, for example, liposome formation. Thus, in one embodiment, multimers of the invention, such as, for example, homodimers or homotrimers, are formed when polypeptides of the invention contact one another in solution. In another embodiment, heteromultimers of the invention, such as, for example, heterotrimers or heterotetramers, are formed when polypeptides of the invention contact antibodies to the polypeptides of the invention (including antibodies to the heterologous polypeptide sequence in a fusion protein of the invention) in solution. In other embodiments, multimers of the invention are formed by covalent associations with and/or between the polypeptides of the invention. Such covalent associations may involve one or more amino acid residues contained in the polypeptide sequence (e.g., that recited in SEQ ID NO:Y, encoded by the portion of SEQ ID NO:X as defined in columns 8 and 9 of Table 2, and/or encoded by the cDNA contained in ATCC Deposit No:Z). In one instance, the covalent associations are cross-linking between cysteine residues located within the polypeptide sequences which interact in the native (i.e., naturally occurring) polypeptide. In another instance, the covalent associations are the consequence of chemical or recombinant manipulation. Alternatively, such covalent associations may involve one or more amino acid residues contained in the heterologous polypeptide sequence in a fusion protein. In one example, covalent associations are between the heterologous sequence contained in a fusion protein of the invention (see, e.g., U.S. Pat. No. 5,478,925). In a specific example, the covalent associations are between the heterologous sequence contained in a Fc fusion protein of the invention (as described herein). In another specific example, covalent associations of fusion proteins of the invention are between heterologous polypeptide sequence from another protein that is capable of forming covalently associated multimers, such as for example, osteoprotegerin (see, e.g., International Publication NO: WO 98/49305, the contents of which are herein incorporated by reference in its entirety). In another embodiment, two or more polypeptides of the invention are joined through peptide linkers. Examples include those peptide linkers described in U.S. Pat. No. 5,073,627 (hereby incorporated by reference). Proteins comprising multiple polypeptides of the invention separated by peptide linkers may be produced using conventional recombinant DNA technology.

[0332] Another method for preparing multimer polypeptides of the invention involves use of polypeptides of the invention fused to a leucine zipper or isoleucine zipper polypeptide sequence. Leucine zipper and isoleucine zipper domains are polypeptides that promote multimerization of the proteins in which they are found. Leucine zippers were originally identified in several DNA-binding proteins (Landschulz et al., Science 240:1759, (1988)), and have since been found in a variety of different proteins. Among the known leucine zippers are naturally occurring peptides and derivatives thereof that dimerize or trimerize. Examples of leucine zipper domains suitable for producing soluble multimeric proteins of the invention are those described in PCT application WO 94/10308, hereby incorporated by reference. Recombinant fusion proteins comprising a polypeptide of the invention fused to a polypeptide sequence that dimerizes or trimerizes in solution are expressed in suitable host cells, and the resulting soluble multimeric fusion protein is recovered from the culture supernatant using techniques known in the art.

[0333] Trimeric polypeptides of the invention may offer the advantage of enhanced biological activity. Preferred leucine zipper moieties and isoleucine moieties are those that preferentially form trimers. One example is a leucine zipper derived from lung surfactant protein D (SPD), as described in Hoppe et al. (FEBS Letters 344:191, (1994)) and in U.S. patent application Ser. No. 08/446,922, hereby incorporated by reference. Other peptides derived from naturally occurring trimeric proteins may be employed in preparing trimeric polypeptides of the invention.

[0334] In another example, proteins of the invention are associated by interactions between Flag® polypeptide sequence contained in fusion proteins of the invention containing Flag® polypeptide sequence. In a further embodiment, proteins of the invention are associated by interactions between heterologous polypeptide sequence contained in Flag® fusion proteins of the invention and anti-Flag® antibody.

[0335] The multimers of the invention may be generated using chemical techniques known in the art. For example, polypeptides desired to be contained in the multimers of the invention may be chemically cross-linked using linker molecules and linker molecule length optimization techniques known in the art (see, e.g., U.S. Pat. No. 5,478,925, which is herein incorporated by reference in its entirety). Additionally, multimers of the invention may be generated using techniques known in the art to form one or more inter-molecule cross-links between the cysteine residues located within the sequence of the polypeptides desired to be contained in the multimer (see, e.g., U.S. Pat. No. 5,478,925, which is herein incorporated by reference in its entirety). Further, polypeptides of the invention may be routinely modified by the addition of cysteine or biotin to the C-terminus or N-terminus of the polypeptide and techniques known in the art may be applied to generate multimers containing one or more of these modified polypeptides (see, e.g., U.S. Pat. No. 5,478,925, which is herein incorporated by reference in its entirety). Additionally, techniques known in the art may be applied to generate liposomes containing the polypeptide components desired to be contained in the multimer of the invention (see, e.g., U.S. Pat. No. 5,478,925, which is herein incorporated by reference in its entirety).

[0336] Alternatively, multimers of the invention may be generated using genetic engineering techniques known in the art. In one embodiment, polypeptides contained in multimers of the invention are produced recombinantly using fusion protein technology described herein or otherwise known in the art (see, e.g., U.S. Pat. No. 5,478,925, which is herein incorporated by reference in its entirety). In a specific embodiment, polynucleotides coding for a homodimer of the invention are generated by ligating a polynucleotide sequence encoding a polypeptide of the invention to a sequence encoding a linker polypeptide and then further to a synthetic polynucleotide encoding the translated product of the polypeptide in the reverse orientation from the original C-terminus to the N-terminus (lacking the leader sequence) (see, e.g., U.S. Pat. No. 5,478,925, which is herein incorporated by reference in its entirety). In another embodiment, recombinant techniques described herein or otherwise known in the art are applied to generate recombinant polypeptides of the invention which contain a transmembrane domain (or hydrophobic or signal peptide) and which can be incorporated by membrane reconstitution techniques into liposomes (see, e.g., U.S. Pat. No. 5,478,925, which is herein incorporated by reference in its entirety).

Antibodies

[0337] Further polypeptides of the invention relate to antibodies and T-cell antigen receptors (TCR) which immunospecifically bind a polypeptide, polypeptide fragment, or variant of the invention (e.g., a polypeptide or fragment or variant of the amino acid sequence of SEQ ID NO:Y or a polypeptide encoded by the cDNA contained in ATCC Deposit No:Z, and/or an epitope, of the present invention) as determined by immunoassays well known in the art for assaying specific antibody-antigen binding. Antibodies of the invention include, but are not limited to, polyclonal, monoclonal, multispecific, human, humanized or chimeric antibodies, single chain antibodies, Fab fragments, F(ab′) fragments, fragments produced by a Fab expression library, anti-idiotypic (anti-Id) antibodies (including, e.g., anti-Id antibodies to antibodies of the invention), intracellularly-made antibodies (i.e., intrabodies), and epitope-binding fragments of any of the above. The term “antibody,” as used herein, refers to immunoglobulin molecules and immunologically active portions of immunoglobulin molecules, i.e., molecules that contain an antigen binding site that immunospecifically binds an antigen. The immunoglobulin molecules of the invention can be of any type (e.g., IgG, IgE, IgM, IgD, IgA and IgY), class (e.g., IgG1, IgG2, IgG3, IgG4, IgA1 and IgA2) or subclass of immunoglobulin molecule. In preferred embodiments, the immunoglobulin molecules of the invention are IgG1. In other preferred embodiments, the immunoglobulin molecules of the invention are IgG4.

[0338] Most preferably the antibodies are human antigen-binding antibody fragments of the present invention and include, but are not limited to, Fab, Fab′ and F(ab′)2, Fd, single-chain Fvs (scFv), single-chain antibodies, disulfide-linked Fvs (sdFv) and fragments comprising either a VL or VH domain. Antigen-binding antibody fragments, including single-chain antibodies, may comprise the variable region(s) alone or in combination with the entirety or a portion of the following: hinge region, CH1, CH2, and CH3 domains. Also included in the invention are antigen-binding fragments also comprising any combination of variable region(s) with a hinge region, CH1, CH2, and CH3 domains. The antibodies of the invention may be from any animal origin including birds and mammals. Preferably, the antibodies are human, murine (e.g., mouse and rat), donkey, ship rabbit, goat, guinea pig, camel, horse, or chicken. As used herein, “human” antibodies include antibodies having the amino acid sequence of a human immunoglobulin and include antibodies isolated from human immunoglobulin libraries or from animals transgenic for one or more human immunoglobulin and that do not express endogenous immunoglobulins, as described infra and, for example in, U.S. Pat. No. 5,939,598 by Kucherlapati et al.

[0339] The antibodies of the present invention may be monospecific, bispecific, trispecific or of greater multispecificity. Multispecific antibodies may be specific for different epitopes of a polypeptide of the present invention or may be specific for both a polypeptide of the present invention as well as for a heterologous epitope, such as a heterologous polypeptide or solid support material. See, e.g., PCT publications WO 93/17715; WO 92/08802; WO 91/00360; WO 92/05793; Tutt, et al., J. Immunol. 147:60-69 (1991); U.S. Pat. Nos. 4,474,893; 4,714,681; 4,925,648; 5,573,920; 5,601,819; Kostelny et al., J. Immunol. 148:1547-1553 (1992).

[0340] Antibodies of the present invention may be described or specified in terms of the epitope(s) or portion(s) of a polypeptide of the present invention which they recognize or specifically bind. The epitope(s) or polypeptide portion(s) may be specified as described herein, e.g., by N-terminal and C-terminal positions, or by size in contiguous amino acid residues, or listed in the Tables and Figures. Preferred epitopes of the invention include the predicted epitopes shown in column 6 of Table 1B.1, as well as polynucleotides that encode these epitopes. Antibodies which specifically bind any epitope or polypeptide of the present invention may also be excluded. Therefore, the present invention includes antibodies that specifically bind polypeptides of the present invention, and allows for the exclusion of the same.

[0341] Antibodies of the present invention may also be described or specified in terms of their cross-reactivity. Antibodies that do not bind any other analog, ortholog, or homolog of a polypeptide of the present invention are included. Antibodies that bind polypeptides with at least 95%, at least 90%, at least 85%, at least 80%, at least 75%, at least 70%, at least 65%, at least 60%, at least 55%, and at least 50% identity (as calculated using methods known in the art and described herein) to a polypeptide of the present invention are also included in the present invention. In specific embodiments, antibodies of the present invention cross-react with murine, rat and/or rabbit homologs of human proteins and the corresponding epitopes thereof. Antibodies that do not bind polypeptides with less than 95%, less than 90%, less than 85%, less than 80%, less than 75%, less than 70%, less than 65%, less than 60%, less than 55%, and less than 50% identity (as calculated using methods known in the art and described herein) to a polypeptide of the present invention are also included in the present invention. In a specific embodiment, the above-described cross-reactivity is with respect to any single specific antigenic or immunogenic polypeptide, or combination(s) of 2, 3, 4, 5, or more of the specific antigenic and/or immunogenic polypeptides disclosed herein. Further included in the present invention are antibodies which bind polypeptides encoded by polynucleotides which hybridize to a polynucleotide of the present invention under stringent hybridization conditions (as described herein). Antibodies of the present invention may also be described or specified in terms of their binding affinity to a polypeptide of the invention. Preferred binding affinities include those with a dissociation constant or Kd less than 5×10⁻² M, 10⁻² M, 5×10⁻³ M, 10⁻³ M, 5×10⁻⁴ M, 10⁻⁴ M, 5×10⁻⁵ M, 10⁻⁵ M, 5×10⁻⁶ M, 10⁻⁶ M, 5×10⁻⁷ M, 10⁻⁷ M, 5×10⁻⁸ M, 10⁻⁸ M, 5×10⁻⁹ M, 10⁻⁹ M, 5×10⁻¹⁰ M, 10⁻¹⁰ M, 5×10⁻¹¹ M, 10⁻¹¹ M, 5×10⁻¹² M, 10⁻¹² M, 5×10⁻¹³ M, 10⁻¹³ M, 5×10⁻¹⁴ M, 10⁻¹⁴ M, 5×10⁻¹⁵ M, or 10⁻¹⁵ M.

[0342] The invention also provides antibodies that competitively inhibit binding of an antibody to an epitope of the invention as determined by any method known in the art for determining competitive binding, for example, the immunoassays described herein. In preferred embodiments, the antibody competitively inhibits binding to the epitope by at least 95%, at least 90%, at least 85%, at least 80%, at least 75%, at least 70%, at least 60%, or at least 50%.

[0343] Antibodies of the present invention may act as agonists or antagonists of the polypeptides of the present invention. For example, the present invention includes antibodies which disrupt the receptor/ligand interactions with the polypeptides of the invention either partially or fully. Preferably, antibodies of the present invention bind an antigenic epitope disclosed herein, or a portion thereof. The invention features both receptor-specific antibodies and ligand-specific antibodies. The invention also features receptor-specific antibodies which do not prevent ligand binding but prevent receptor activation. Receptor activation (i.e., signaling) may be determined by techniques described herein or otherwise known in the art. For example, receptor activation can be determined by detecting the phosphorylation (e.g., tyrosine or serine/threonine) of the receptor or its substrate by immunoprecipitation followed by western blot analysis (for example, as described supra). In specific embodiments, antibodies are provided that inhibit ligand activity or receptor activity by at least 95%, at least 90%, at least 85%, at least 80%, at least 75%, at least 70%, at least 60%, or at least 50% of the activity in absence of the antibody.

[0344] The invention also features receptor-specific antibodies which both prevent ligand binding and receptor activation as well as antibodies that recognize the receptor-ligand complex, and, preferably, do not specifically recognize the unbound receptor or the unbound ligand. Likewise, included in the invention are neutralizing antibodies which bind the ligand and prevent binding of the ligand to the receptor, as well as antibodies which bind the ligand, thereby preventing receptor activation, but do not prevent the ligand from binding the receptor. Further included in the invention are antibodies which activate the receptor. These antibodies may act as receptor agonists, i.e., potentiate or activate either all or a subset of the biological activities of the ligand-mediated receptor activation, for example, by inducing dimerization of the receptor. The antibodies may be specified as agonists, antagonists or inverse agonists for biological activities comprising the specific biological activities of the peptides of the invention disclosed herein. The above antibody agonists can be made using methods known in the art. See, e.g., PCT publication WO 96/40281; U.S. Pat. No. 5,811,097; Deng et al., Blood 92(6):1981-1988 (1998); Chen et al., Cancer Res. 58(16):3668-3678 (1998); Harrop et al., J. Immunol. 161(4):1786-1794 (1998); Zhu et al., Cancer Res. 58(15):3209-3214 (1998); Yoon et al., J. Immunol. 160(7):3170-3179 (1998); Prat et al., J. Cell. Sci. 111(Pt2):237-247 (1998); Pitard et al., J. Immunol. Methods 205(2):177-190 (1997); Liautard et al., Cytokine 9(4):233-241 (1997); Carlson et al., J. Biol. Chem. 272(17):11295-11301 (1997); Taryman et al., Neuron 14(4):755-762 (1995); Muller et al., Structure 6(9):1153-1167 (1998); Bartunek et al., Cytokine 8(1):14-20 (1996) (which are all incorporated by reference herein in their entireties).

[0345] Antibodies of the present invention may be used, for example, to purify, detect, and target the polypeptides of the present invention, including both in vitro and in vivo diagnostic and therapeutic methods. For example, the antibodies have utility in immunoassays for qualitatively and quantitatively measuring levels of the polypeptides of the present invention in biological samples. See, e.g., Harlow et al., Antibodies: A Laboratory Manual, (Cold Spring Harbor Laboratory Press, 2nd ed. 1988); incorporated by reference herein in its entirety.

[0346] As discussed in more detail below, the antibodies of the present invention may be used either alone or in combination with other compositions. The antibodies may further be recombinantly fused to a heterologous polypeptide at the N- or C-terminus or chemically conjugated (including covalent and non-covalent conjugations) to polypeptides or other compositions. For example, antibodies of the present invention may be recombinantly fused or conjugated to molecules useful as labels in detection assays and effector molecules such as heterologous polypeptides, drugs, radionuclides, or toxins. See, e.g., PCT publications WO 92/08495; WO 91/14438; WO 89/12624; U.S. Pat. No. 5,314,995; and EP 396,387; the disclosures of which are incorporated herein by reference in their entireties.

[0347] The antibodies of the invention include derivatives that are modified, i.e, by the covalent attachment of any type of molecule to the antibody such that covalent attachment does not prevent the antibody from generating an anti-idiotypic response. For example, but not by way of limitation, the antibody derivatives include antibodies that have been modified, e.g., by glycosylation, acetylation, pegylation, phosphylation, amidation, derivatization by known protecting/blocking groups, proteolytic cleavage, linkage to a cellular ligand or other protein, etc. Any of numerous chemical modifications may be carried out by known techniques, including, but not limited to specific chemical cleavage, acetylation, formylation, metabolic synthesis of tunicamycin, etc. Additionally, the derivative may contain one or more non-classical amino acids.

[0348] The antibodies of the present invention may be generated by any suitable method known in the art. Polyclonal antibodies to an antigen-of-interest can be produced by various procedures well known in the art. For example, a polypeptide of the invention can be administered to various host animals including, but not limited to, rabbits, mice, rats, etc. to induce the production of sera containing polyclonal antibodies specific for the antigen. Various adjuvants may be used to increase the immunological response, depending on the host species, and include but are not limited to, Freund's (complete and incomplete), mineral gels such as aluminum hydroxide, surface active substances such as lysolecithin, pluronic polyols, polyanions, peptides, oil emulsions, keyhole limpet hemocyanins, dinitrophenol, and potentially useful human adjuvants such as BCG (bacille Calmette-Guerin) and corynebacterium parvum. Such adjuvants are also well known in the art.

[0349] Monoclonal antibodies can be prepared using a wide variety of techniques known in the art including the use of hybridoma, recombinant, and phage display technologies, or a combination thereof. For example, monoclonal antibodies can be produced using hybridoma techniques including those known in the art and taught, for example, in Harlow et al., Antibodies: A Laboratory Manual, (Cold Spring Harbor Laboratory Press, 2nd ed. 1988); Hammerling, et al., in: Monoclonal Antibodies and T-Cell Hybridomas 563-681 (Elsevier, N.Y., 1981) (said references incorporated by reference in their entireties). The term “monoclonal antibody” as used herein is not limited to antibodies produced through hybridoma technology. The term “monoclonal antibody” refers to an antibody that is derived from a single clone, including any eukaryotic, prokaryotic, or phage clone, and not the method by which it is produced.

[0350] Methods for producing and screening for specific antibodies using hybridoma technology are routine and well known in the art and are discussed in detail in the Examples. In a non-limiting example, mice can be immunized with a polypeptide of the invention or a cell expressing such peptide. Once an immune response is detected, e.g., antibodies specific for the antigen are detected in the mouse serum, the mouse spleen is harvested and splenocytes isolated. The splenocytes are then fused by well known techniques to any suitable myeloma cells, for example cells from cell line SP20 available from the ATCC. Hybridomas are selected and cloned by limited dilution. The hybridoma clones are then assayed by methods known in the art for cells that secrete antibodies capable of binding a polypeptide of the invention. Ascites fluid, which generally contains high levels of antibodies, can be generated by immunizing mice with positive hybridoma clones.

[0351] Accordingly, the present invention provides methods of generating monoclonal antibodies as well as antibodies produced by the method comprising culturing a hybridoma cell secreting an antibody of the invention wherein, preferably, the hybridoma is generated by fusing splenocytes isolated from a mouse immunized with an antigen of the invention with myeloma cells and then screening the hybridomas resulting from the fusion for hybridoma clones that secrete an antibody able to bind a polypeptide of the invention.

[0352] Another well known method for producing both polyclonal and monoclonal human B cell lines is transformation using Epstein Barr Virus (EBV). Protocols for generating EBV-transformed B cell lines are commonly known in the art, such as, for example, the protocol outlined in Chapter 7.22 of Current Protocols in Immunology, Coligan et al., Eds., 1994, John Wiley & Sons, NY, which is hereby incorporated in its entirety by reference. The source of B cells for transformation is commonly human peripheral blood, but B cells for transformation may also be derived from other sources including, but not limited to, lymph nodes, tonsil, spleen, tumor tissue, and infected tissues. Tissues are generally made into single cell suspensions prior to EBV transformation. Additionally, steps may be taken to either physically remove or inactivate T cells (e.g., by treatment with cyclosporin A) in B cell-containing samples, because T cells from individuals seropositive for anti-EBV antibodies can suppress B cell immortalization by EBV.

[0353] In general, the sample containing human B cells is innoculated with EBV, and cultured for 3-4 weeks. A typical source of EBV is the culture supernatant of the B95-8 cell line (ATCC #VR-1492). Physical signs of EBV transformation can generally be seen towards the end of the 3-4 week culture period. By phase-contrast microscopy, transformed cells may appear large, clear, hairy and tend to aggregate in tight clusters of cells. Initially, EBV lines are generally polyclonal. However, over prolonged periods of cell cultures, EBV lines may become monoclonal or polyclonal as a result of the selective outgrowth of particular B cell clones. Alternatively, polyclonal EBV transformed lines may be subcloned (e.g., by limiting dilution culture) or fused with a suitable fusion partner and plated at limiting dilution to obtain monoclonal B cell lines. Suitable fusion partners for EBV transformed cell lines include mouse myeloma cell lines (e.g., SP2/0, X63-Ag8.653), heteromyeloma cell lines (human×mouse; e.g, SPAM-8, SBC-H20, and CB-F7), and human cell lines (e.g., GM 1500, SKO-007, RPMI 8226, and KR-4). Thus, the present invention also provides a method of generating polyclonal or monoclonal human antibodies against polypeptides of the invention or fragments thereof, comprising EBV-transformation of human B cells.

[0354] Antibody fragments which recognize specific epitopes may be generated by known techniques. For example, Fab and F(ab′)2 fragments of the invention may be produced by proteolytic cleavage of immunoglobulin molecules, using enzymes such as papain (to produce Fab fragments) or pepsin (to produce F(ab′)2 fragments). F(ab′)2 fragments contain the variable region, the light chain constant region and the CH1 domain of the heavy chain.

[0355] For example, the antibodies of the present invention can also be generated using various phage display methods known in the art. In phage display methods, functional antibody domains are displayed on the surface of phage particles which carry the polynucleotide sequences encoding them. In a particular embodiment, such phage can be utilized to display antigen binding domains expressed from a repertoire or combinatorial antibody library (e.g., human or murine). Phage expressing an antigen binding domain that binds the antigen of interest can be selected or identified with antigen, e.g., using labeled antigen or antigen bound or captured to a solid surface or bead. Phage used in these methods are typically filamentous phage including fd and M13 binding domains expressed from phage with Fab, Fv or disulfide stabilized Fv antibody domains recombinantly fused to either the phage gene III or gene VIII protein. Examples of phage display methods that can be used to make the antibodies of the present invention include those disclosed in Brinkman et al., J. Immunol. Methods 182:41-50 (1995); Ames et al., J. Immunol. Methods 184:177-186 (1995); Kettleborough et al., Eur. J. Immunol. 24:952-958 (1994); Persic et al., Gene 187 9-18 (1997); Burton et al., Advances in Immunology 57:191-280 (1994); PCT application No. PCT/GB91/01134; PCT publications WO 90/02809; WO 91/10737; WO 92/01047; WO 92/18619; WO 93/11236; WO 95/15982; WO 95/20401; and U.S. Pat. Nos. 5,698,426; 5,223,409; 5,403,484; 5,580,717; 5,427,908; 5,750,753; 5,821,047; 5,571,698; 5,427,908; 5,516,637; 5,780,225; 5,658,727; 5,733,743 and 5,969,108; each of which is incorporated herein by reference in its entirety.

[0356] As described in the above references, after phage selection, the antibody coding regions from the phage can be isolated and used to generate whole antibodies, including human antibodies, or any other desired antigen binding fragment, and expressed in any desired host, including mammalian cells, insect cells, plant cells, yeast, and bacteria, e.g., as described in detail below. For example, techniques to recombinantly produce Fab, Fab′ and F(ab′)2 fragments can also be employed using methods known in the art such as those disclosed in PCT publication WO 92/22324; Mullinax et al., BioTechniques 12(6):864-869 (1992); and Sawai et al., AJRI 34:26-34 (1995); and Better et al., Science 240:1041-1043 (1988) (said references incorporated by reference in their entireties).

[0357] Examples of techniques which can be used to produce single-chain Fvs and antibodies include those described in U.S. Pat. Nos. 4,946,778 and 5,258,498; Huston et al., Methods in Enzymology 203:46-88 (1991); Shu et al., PNAS 90:7995-7999 (1993); and Skerra et al., Science 240:1038-1040 (1988). For some uses, including in vivo use of antibodies in humans and in vitro detection assays, it may be preferable to use chimeric, humanized, or human antibodies. A chimeric antibody is a molecule in which different portions of the antibody are derived from different animal species, such as antibodies having a variable region derived from a murine monoclonal antibody and a human immunoglobulin constant region. Methods for producing chimeric antibodies are known in the art. See e.g., Morrison, Science 229:1202 (1985); Oi et al., BioTechniques 4:214 (1986); Gillies et al., (1989) J. Immunol. Methods 125:191-202; U.S. Pat. Nos. 5,807,715; 4,816,567; and 4,816,397, which are incorporated herein by reference in their entirety. Humanized antibodies are antibody molecules from non-human species antibody that binds the desired antigen having one or more complementarity determining regions (CDRs) from the non-human species and a framework regions from a human immunoglobulin molecule. Often, framework residues in the human framework regions will be substituted with the corresponding residue from the CDR donor antibody to alter, preferably improve, antigen binding. These framework substitutions are identified by methods well known in the art, e.g., by modeling of the interactions of the CDR and framework residues to identify framework residues important for antigen binding and sequence comparison to identify unusual framework residues at particular positions. (See, e.g., Queen et al., U.S. Pat. No. 5,585,089; Riechmann et al., Nature 332:323 (1988), which are incorporated herein by reference in their entireties.) Antibodies can be humanized using a variety of techniques known in the art including, for example, CDR-grafting (EP 239,400; PCT publication WO 91/09967; U.S. Pat. Nos. 5,225,539; 5,530,101; and 5,585,089), veneering or resurfacing (EP 592,106; EP 519,596; Padlan, Molecular Immunology 28(4/5):489-498 (1991); Studnicka et al., Protein Engineering 7(6):805-814 (1994); Roguska. et al., PNAS 91:969-973 (1994)), and chain shuffling (U.S. Pat. No. 5,565,332).

[0358] Completely human antibodies are particularly desirable for therapeutic treatment of human patients. Human antibodies can be made by a variety of methods known in the art including phage display methods described above using antibody libraries derived from human immunoglobulin sequences. See also, U.S. Pat. Nos. 4,444,887 and 4,716,111; and PCT publications WO 98/46645, WO 98/50433, WO 98/24893, WO 98/16654, WO 96/34096, WO 96/33735, and WO 91/10741; each of which is incorporated herein by reference in its entirety.

[0359] Human antibodies can also be produced using transgenic mice which are incapable of expressing functional endogenous immunoglobulins, but which can express human immunoglobulin genes. For example, the human heavy and light chain immunoglobulin gene complexes may be introduced randomly or by homologous recombination into mouse embryonic stem cells. Alternatively, the human variable region, constant region, and diversity region may be introduced into mouse embryonic stem cells in addition to the human heavy and light chain genes. The mouse heavy and light chain immunoglobulin genes may be rendered non-functional separately or simultaneously with the introduction of human immunoglobulin loci by homologous recombination. In particular, homozygous deletion of the JH region prevents endogenous antibody production. The modified embryonic stem cells are expanded and microinjected into blastocysts to produce chimeric mice. The chimeric mice are then bred to produce homozygous offspring which express human antibodies. The transgenic mice are immunized in the normal fashion with a selected antigen, e.g., all or a portion of a polypeptide of the invention. Monoclonal antibodies directed against the antigen can be obtained from the immunized, transgenic mice using conventional hybridoma technology. The human immunoglobulin transgenes harbored by the transgenic mice rearrange during B cell differentiation, and subsequently undergo class switching and somatic mutation. Thus, using such a technique, it is possible to produce therapeutically useful IgG, IgA, IgM and IgE antibodies. For an overview of this technology for producing human antibodies, see Lonberg and Huszar, Int. Rev. Immunol. 13:65-93 (1995). For a detailed discussion of this technology for producing human antibodies and human monoclonal antibodies and protocols for producing such antibodies, see, e.g., PCT publications WO 98/24893; WO 92/01047; WO 96/34096; WO 96/33735; European Patent No. 0 598 877; U.S. Pat. Nos. 5,413,923; 5,625,126; 5,633,425; 5,569,825; 5,661,016; 5,545,806; 5,814,318; 5,885,793; 5,916,771; 5,939,598; 6,075,181; and 6,114,598, which are incorporated by reference herein in their entirety. In addition, companies such as Abgenix, Inc. (Freemont, Calif.) and Genpharm (San Jose, Calif.) can be engaged to provide human antibodies directed against a selected antigen using technology similar to that described above.

[0360] Completely human antibodies which recognize a selected epitope can be generated using a technique referred to as “guided selection.” In this approach a selected non-human monoclonal antibody, e.g., a mouse antibody, is used to guide the selection of a completely human antibody recognizing the same epitope. (Jespers et al., Bio/technology 12:899-903 (1988)).

[0361] Further, antibodies to the polypeptides of the invention can, in turn, be utilized to generate anti-idiotype antibodies that “mimic” polypeptides of the invention using techniques well known to those skilled in the art. (See, e.g., Greenspan & Bona, FASEB J. 7(5):437-444; (1989) and Nissinoff, J. Immunol. 147(8):2429-2438 (1991)). For example, antibodies which bind to and competitively inhibit polypeptide multimerization and/or binding of a polypeptide of the invention to a ligand can be used to generate anti-idiotypes that “mimic” the polypeptide multimerization and/or binding domain and, as a consequence, bind to and neutralize polypeptide and/or its ligand. Such neutralizing anti-idiotypes or Fab fragments of such anti-idiotypes can be used in therapeutic regimens to neutralize polypeptide ligand(s)/receptor(s). For example, such anti-idiotypic antibodies can be used to bind a polypeptide of the invention and/or to bind its ligand(s)/receptor(s), and thereby block its biological activity. Alternatively, antibodies which bind to and enhance polypeptide multimerization and/or binding, and/or receptor/ligand multimerization, binding and/or signaling can be used to generate anti-idiotypes that function as agonists of a polypeptide of the invention and/or its ligand/receptor. Such agonistic anti-idiotypes or Fab fragments of such anti-idiotypes can be used in therapeutic regimens as agonists of the polypeptides of the invention or its ligand(s)/receptor(s). For example, such anti-idiotypic antibodies can be used to bind a polypeptide of the invention and/or to bind its ligand(s)/receptor(s), and thereby promote or enhance its biological activity.

[0362] Intrabodies of the invention can be produced using methods known in the art, such as those disclosed and reviewed in Chen et al., Hum. Gene Ther. 5:595-601 (1994); Marasco, W. A., Gene Ther. 4:11-15 (1997); Rondon and Marasco, Annu. Rev. Microbiol. 51:257-283 (1997); Proba et al., J. Mol. Biol. 275:245-253 (1998); Cohen et al., Oncogene 17:2445-2456 (1998); Ohage and Steipe, J. Mol. Biol. 291:1119-1128 (1999); Ohage et al., J. Mol. Biol. 291:1129-1134 (1999); Wirtz and Steipe, Protein Sci. 8:2245-2250 (1999); Zhu et al., J. Immunol. Methods 231:207-222 (1999); and references cited therein.

Polynucleotides Encoding Antibodies

[0363] The invention further provides polynucleotides comprising a nucleotide sequence encoding an antibody of the invention and fragments thereof. The invention also encompasses polynucleotides that hybridize under stringent or alternatively, under lower stringency hybridization conditions, e.g., as defined supra, to polynucleotides that encode an antibody, preferably, that specifically binds to a polypeptide of the invention, preferably, an antibody that binds to a polypeptide having the amino acid sequence of SEQ ID NO:Y, to a polypeptide encoded by a portion of SEQ ID NO:X as defined in columns 8 and 9 of Table 2, and/or to a polypeptide encoded by the cDNA contained in ATCC Deposit No:Z.

[0364] The polynucleotides may be obtained, and the nucleotide sequence of the polynucleotides determined, by any method known in the art. For example, if the nucleotide sequence of the antibody is known, a polynucleotide encoding the antibody may be assembled from chemically synthesized oligonucleotides (e.g., as described in Kutmeier et al., BioTechniques 17:242 (1994)), which, briefly, involves the synthesis of overlapping oligonucleotides containing portions of the sequence encoding the antibody, annealing and ligating of those oligonucleotides, and then amplification of the ligated oligonucleotides by PCR.

[0365] Alternatively, a polynucleotide encoding an antibody may be generated from nucleic acid from a suitable source. If a clone containing a nucleic acid encoding a particular antibody is not available, but the sequence of the antibody molecule is known, a nucleic acid encoding the immunoglobulin may be chemically synthesized or obtained from a suitable source (e.g., an antibody cDNA library, or a cDNA library generated from, or nucleic acid, preferably poly A+ RNA, isolated from, any tissue or cells expressing the antibody, such as hybridoma cells selected to express an antibody of the invention) by PCR amplification using synthetic primers hybridizable to the 3′ and 5′ ends of the sequence or by cloning using an oligonucleotide probe specific for the particular gene sequence to identify, e.g., a cDNA clone from a cDNA library that encodes the antibody. Amplified nucleic acids generated by PCR may then be cloned into replicable cloning vectors using any method well known in the art.

[0366] Once the nucleotide sequence and corresponding amino acid sequence of the antibody is determined, the nucleotide sequence of the antibody may be manipulated using methods well known in the art for the manipulation of nucleotide sequences, e.g., recombinant DNA techniques, site directed mutagenesis, PCR, etc. (see, for example, the techniques described in Sambrook et al., 1990, Molecular Cloning, A Laboratory Manual, 2d Ed., Cold Spring Harbor Laboratory, Cold Spring Harbor, N.Y. and Ausubel et al., eds., 1998, Current Protocols in Molecular Biology, John Wiley & Sons, NY, which are both incorporated by reference herein in their entireties), to generate antibodies having a different amino acid sequence, for example to create amino acid substitutions, deletions, and/or insertions.

[0367] In a specific embodiment, the amino acid sequence of the heavy and/or light chain variable domains may be inspected to identify the sequences of the complementarity determining regions (CDRs) by methods that are well know in the art, e.g., by comparison to known amino acid sequences of other heavy and light chain variable regions to determine the regions of sequence hypervariability. Using routine recombinant DNA techniques, one or more of the CDRs may be inserted within framework regions, e.g., into human framework regions to humanize a non-human antibody, as described supra. The framework regions may be naturally occurring or consensus framework regions, and preferably human framework regions (see, e.g., Chothia et al., J. Mol. Biol. 278: 457-479 (1998) for a listing of human framework regions). Preferably, the polynucleotide generated by the combination of the framework regions and CDRs encodes an antibody that specifically binds a polypeptide of the invention. Preferably, as discussed supra, one or more amino acid substitutions may be made within the framework regions, and, preferably, the amino acid substitutions improve binding of the antibody to its antigen. Additionally, such methods may be used to make amino acid substitutions or deletions of one or more variable region cysteine residues participating in an intrachain disulfide bond to generate antibody molecules lacking one or more intrachain disulfide bonds. Other alterations to the polynucleotide are encompassed by the present invention and within the skill of the art.

[0368] In addition, techniques developed for the production of “chimeric antibodies” (Morrison et al., Proc. Natl. Acad. Sci. 81:851-855 (1984); Neuberger et al., Nature 312:604-608 (1984); Takeda et al., Nature 314:452-454 (1985)) by splicing genes from a mouse antibody molecule of appropriate antigen specificity together with genes from a human antibody molecule of appropriate biological activity can be used. As described supra, a chimeric antibody is a molecule in which different portions are derived from different animal species, such as those having a variable region derived from a murine mAb and a human immunoglobulin constant region, e.g., humanized antibodies.

[0369] Alternatively, techniques described for the production of single chain antibodies (U.S. Pat. No. 4,946,778; Bird, Science 242:423-42 (1988); Huston et al., Proc. Natl. Acad. Sci. USA 85:5879-5883 (1988); and Ward et al., Nature 334:544-54 (1989)) can be adapted to produce single chain antibodies. Single chain antibodies are formed by linking the heavy and light chain fragments of the Fv region via an amino acid bridge, resulting in a single chain polypeptide. Techniques for the assembly of functional Fv fragments in E. coli may also be used (Skerra et al., Science 242:1038-1041 (1988)).

Methods of Producing Antibodies

[0370] The antibodies of the invention can be produced by any method known in the art for the synthesis of antibodies, in particular, by chemical synthesis or preferably, by recombinant expression techniques. Methods of producing antibodies include, but are not limited to, hybridoma technology, EBV transformation, and other methods discussed herein as well as through the use recombinant DNA technology, as discussed below.

[0371] Recombinant expression of an antibody of the invention, or fragment, derivative or analog thereof, (e.g., a heavy or light chain of an antibody of the invention or a single chain antibody of the invention), requires construction of an expression vector containing a polynucleotide that encodes the antibody. Once a polynucleotide encoding an antibody molecule or a heavy or light chain of an antibody, or portion thereof (preferably containing the heavy or light chain variable domain), of the invention has been obtained, the vector for the production of the antibody molecule may be produced by recombinant DNA technology using techniques well known in the art. Thus, methods for preparing a protein by expressing a polynucleotide containing an antibody encoding nucleotide sequence are described herein. Methods which are well known to those skilled in the art can be used to construct expression vectors containing antibody coding sequences and appropriate transcriptional and translational control signals. These methods include, for example, in vitro recombinant DNA techniques, synthetic techniques, and in vivo genetic recombination. The invention, thus, provides replicable vectors comprising a nucleotide sequence encoding an antibody molecule of the invention, or a heavy or light chain thereof, or a heavy or light chain variable domain, operably linked to a promoter. Such vectors may include the nucleotide sequence encoding the constant region of the antibody molecule (see, e.g., PCT Publication WO 86/05807; PCT Publication WO 89/01036; and U.S. Pat. No. 5,122,464) and the variable domain of the antibody may be cloned into such a vector for expression of the entire heavy or light chain.

[0372] The expression vector is transferred to a host cell by conventional techniques and the transfected cells are then cultured by conventional techniques to produce an antibody of the invention. Thus, the invention includes host cells containing a polynucleotide encoding an antibody of the invention, or a heavy or light chain thereof, or a single chain antibody of the invention, operably linked to a heterologous promoter. In preferred embodiments for the expression of double-chained antibodies, vectors encoding both the heavy and light chains may be co-expressed in the host cell for expression of the entire immunoglobulin molecule, as detailed below.

[0373] A variety of host-expression vector systems may be utilized to express the antibody molecules of the invention. Such host-expression systems represent vehicles by which the coding sequences of interest may be produced and subsequently purified, but also represent cells which may, when transformed or transfected with the appropriate nucleotide coding sequences, express an antibody molecule of the invention in situ. These include but are not limited to microorganisms such as bacteria (e.g., E. coli, B. subtilis) transformed with recombinant bacteriophage DNA, plasmid DNA or cosmid DNA expression vectors containing antibody coding sequences; yeast (e.g., Saccharomyces, Pichia) transformed with recombinant yeast expression vectors containing antibody coding sequences; insect cell systems infected with recombinant virus expression vectors (e.g., baculovirus) containing antibody coding sequences; plant cell systems infected with recombinant virus expression vectors (e.g., cauliflower mosaic virus, CaMV; tobacco mosaic virus, TMV) or transformed with recombinant plasmid expression vectors (e.g., Ti plasmid) containing antibody coding sequences; or mammalian cell systems (e.g., COS, CHO, BHK, 293, 3T3 cells) harboring recombinant expression constructs containing promoters derived from the genome of mammalian cells (e.g., metallothionein promoter) or from mammalian viruses (e.g., the adenovirus late promoter; the vaccinia virus 7.5K promoter). Preferably, bacterial cells such as Escherichia coli, and more preferably, eukaryotic cells, especially for the expression of whole recombinant antibody molecule, are used for the expression of a recombinant antibody molecule. For example, mammalian cells such as Chinese hamster ovary cells (CHO), in conjunction with a vector such as the major intermediate early gene promoter element from human cytomegalovirus is an effective expression system for antibodies (Foecking et al., Gene 45:101 (1986); Cockett et al., Bio/Technology 8:2 (1990)).

[0374] In bacterial systems, a number of expression vectors may be advantageously selected depending upon the use intended for the antibody molecule being expressed. For example, when a large quantity of such a protein is to be produced, for the generation of pharmaceutical compositions of an antibody molecule, vectors which direct the expression of high levels of fusion protein products that are readily purified may be desirable. Such vectors include, but are not limited, to the E. coli expression vector pUR278 (Ruther et al., EMBO J. 2:1791 (1983)), in which the antibody coding sequence may be ligated individually into the vector in frame with the lac Z coding region so that a fusion protein is produced; pIN vectors (Inouye & Inouye, Nucleic Acids Res. 13:3101-3109 (1985); Van Heeke & Schuster, J. Biol. Chem. 24:5503-5509 (1989)); and the like. pGEX vectors may also be used to express foreign polypeptides as fusion proteins with glutathione S-transferase (GST). In general, such fusion proteins are soluble and can easily be purified from lysed cells by adsorption and binding to matrix glutathione-agarose beads followed by elution in the presence of free glutathione. The pGEX vectors are designed to include thrombin or factor Xa protease cleavage sites so that the cloned target gene product can be released from the GST moiety.

[0375] In an insect system, Autographa californica nuclear polyhedrosis virus (AcNPV) is used as a vector to express foreign genes. The virus grows in Spodoptera frugiperda cells. The antibody coding sequence may be cloned individually into non-essential regions (for example the polyhedrin gene) of the virus and placed under control of an AcNPV promoter (for example the polyhedrin promoter).

[0376] In mammalian host cells, a number of viral-based expression systems may be utilized. In cases where an adenovirus is used as an expression vector, the antibody coding sequence of interest may be ligated to an adenovirus transcription/translation control complex, e.g., the late promoter and tripartite leader sequence. This chimeric gene may then be inserted in the adenovirus genome by in vitro or in vivo recombination. Insertion in a non-essential region of the viral genome (e.g., region E1 or E3) will result in a recombinant virus that is viable and capable of expressing the antibody molecule in infected hosts. (e.g., see Logan & Shenk, Proc. Natl. Acad. Sci. USA 81:355-359 (1984)). Specific initiation signals may also be required for efficient translation of inserted antibody coding sequences. These signals include the ATG initiation codon and adjacent sequences. Furthermore, the initiation codon must be in phase with the reading frame of the desired coding sequence to ensure translation of the entire insert. These exogenous translational control signals and initiation codons can be of a variety of origins, both natural and synthetic. The efficiency of expression may be enhanced by the inclusion of appropriate transcription enhancer elements, transcription terminators, etc., (see Bittner et al., Methods in Enzymol. 153:51-544 (1987)).

[0377] In addition, a host cell strain may be chosen which modulates the expression of the inserted sequences, or modifies and processes the gene product in the specific fashion desired. Such modifications (e.g., glycosylation) and processing (e.g., cleavage) of protein products may be important for the function of the protein. Different host cells have characteristic and specific mechanisms for the post-translational processing and modification of proteins and gene products. Appropriate cell lines or host systems can be chosen to ensure the correct modification and processing of the foreign protein expressed. To this end, eukaryotic host cells which possess the cellular machinery for proper processing of the primary transcript, glycosylation, and phosphorylation of the gene product may be used. Such mammalian host cells include but are not limited to CHO, VERY, BHK, Hela, COS, MDCK, 293, 3T3, WI38, and in particular, breast cancer cell lines such as, for example, BT483, Hs578T, HTB2, BT20 and T47D, and normal mammary gland cell line such as, for example, CRL7030 and Hs578Bst.

[0378] For long-term, high-yield production of recombinant proteins, stable expression is preferred. For example, cell lines which stably express the antibody molecule may be engineered. Rather than using expression vectors which contain viral origins of replication, host cells can be transformed with DNA controlled by appropriate expression control elements (e.g., promoter, enhancer, sequences, transcription terminators, polyadenylation sites, etc.), and a selectable marker. Following the introduction of the foreign DNA, engineered cells may be allowed to grow for 1-2 days in an enriched media, and then are switched to a selective media. The selectable marker in the recombinant plasmid confers resistance to the selection and allows cells to stably integrate the plasmid into their chromosomes and grow to form foci which in turn can be cloned and expanded into cell lines. This method may advantageously be used to engineer cell lines which express the antibody molecule. Such engineered cell lines may be particularly useful in screening and evaluation of compounds that interact directly or indirectly with the antibody molecule.

[0379] A number of selection systems may be used, including but not limited to the herpes simplex virus thymidine kinase (Wigler et al., Cell 11:223 (1977)), hypoxanthine-guanine phosphoribosyltransferase (Szybalska & Szybalski, Proc. Natl. Acad. Sci. USA 48:202 (1992)), and adenine phosphoribosyltransferase (Lowy et al., Cell 22:817 (1980)) genes can be employed in tk−, hgprt− or aprt− cells, respectively. Also, antimetabolite resistance can be used as the basis of selection for the following genes: dhfr, which confers resistance to methotrexate (Wigler et al., Natl. Acad. Sci. USA 77:357 (1980); O'Hare et al., Proc. Natl. Acad. Sci. USA 78:1527 (1981)); gpt, which confers resistance to mycophenolic acid (Mulligan & Berg, Proc. Natl. Acad. Sci. USA 78:2072 (1981)); neo, which confers resistance to the aminoglycoside G-418 Clinical Pharmacy 12:488-505; Wu and Wu, Biotherapy 3:87-95 (1991); Tolstoshev, Ann. Rev. Pharmacol. Toxicol. 32:573-596 (1993); Mulligan, Science 260:926-932 (1993); and Morgan and Anderson, Ann. Rev. Biochem. 62:191-217 (1993); May, 1993, TIB TECH 11(5):155-215 (1993)); and hygro, which confers resistance to hygromycin (Santerre et al., Gene 30:147 (1984)). Methods commonly known in the art of recombinant DNA technology may be routinely applied to select the desired recombinant clone, and such methods are described, for example, in Ausubel et al. (eds.), Current Protocols in Molecular Biology, John Wiley & Sons, NY (1993); Kriegler, Gene Transfer and Expression, A Laboratory Manual, Stockton Press, NY (1990); and in Chapters 12 and 13, Dracopoli et al. (eds), Current Protocols in Human Genetics, John Wiley & Sons, NY (1994); Colberre-Garapin et al., J. Mol. Biol. 150:1 (1981), which are incorporated by reference herein in their entireties.

[0380] The expression levels of an antibody molecule can be increased by vector amplification (for a review, see Bebbington and Hentschel, The use of vectors based on gene amplification for the expression of cloned genes in mammalian cells in DNA cloning, Vol. 3. (Academic Press, New York, 1987)). When a marker in the vector system expressing antibody is amplifiable, increase in the level of inhibitor present in culture of host cell will increase the number of copies of the marker gene. Since the amplified region is associated with the antibody gene, production of the antibody will also increase (Crouse et al., Mol. Cell. Biol. 3:257 (1983)).

[0381] Vectors which use glutamine synthase (GS) or DHFR as the selectable markers can be amplified in the presence of the drugs methionine sulphoximine or methotrexate, respectively. An advantage of glutamine synthase based vectors are the availabilty of cell lines (e.g., the murine myeloma cell line, NS0) which are glutamine synthase negative. Glutamine synthase expression systems can also function in glutamine synthase expressing cells (e.g. Chinese Hamster Ovary (CHO) cells) by providing additional inhibitor to prevent the functioning of the endogenous gene. A glutamine synthase expression system and components thereof are detailed in PCT publications: WO87/04462; WO86/05807; WO89/01036; WO89/10404; and WO91/06657 which are incorporated in their entireties by reference herein. Additionally, glutamine synthase expression vectors that may be used according to the present invention are commercially available from suplliers, including, for example Lonza Biologics, Inc. (Portsmouth, N.H.). Expression and production of monoclonal antibodies using a GS expression system in murine myeloma cells is described in Bebbington et al., Bio/technology 10:169(1992) and in Biblia and Robinson Biotechnol. Prog. 11:1 (1995) which are incorporated in their entirities by reference herein.

[0382] The host cell may be co-transfected with two expression vectors of the invention, the first vector encoding a heavy chain derived polypeptide and the second vector encoding a light chain derived polypeptide. The two vectors may contain identical selectable markers which enable equal expression of heavy and light chain polypeptides. Alternatively, a single vector may be used which encodes, and is capable of expressing, both heavy and light chain polypeptides. In such situations, the light chain should be placed before the heavy chain to avoid an excess of toxic free heavy chain (Proudfoot, Nature 322:52 (1986); Kohler, Proc. Natl. Acad. Sci. USA 77:2197 (1980)). The coding sequences for the heavy and light chains may comprise cDNA or genomic DNA.

[0383] Once an antibody molecule of the invention has been produced by an animal, chemically synthesized, or recombinantly expressed, it may be purified by any method known in the art for purification of an immunoglobulin molecule, for example, by chromatography (e.g., ion exchange, affinity, particularly by affinity for the specific antigen after Protein A, and sizing column chromatography), centrifugation, differential solubility, or by any other standard technique for the purification of proteins. In addition, the antibodies of the present invention or fragments thereof can be fused to heterologous polypeptide sequences described herein or otherwise known in the art, to facilitate purification.

[0384] The present invention encompasses antibodies recombinantly fused or chemically conjugated (including both covalently and non-covalently conjugations) to a polypeptide (or portion thereof, preferably at least 10, 20, 30, 40, 50, 60, 70, 80, 90 or 100 amino acids of the polypeptide) of the present invention to generate fusion proteins. The fusion does not necessarily need to be direct, but may occur through linker sequences. The antibodies may be specific for antigens other than polypeptides (or portion thereof, preferably at least 10, 20, 30, 40, 50, 60, 70, 80, 90 or 100 amino acids of the polypeptide) of the present invention. For example, antibodies may be used to target the polypeptides of the present invention to particular cell types, either in vitro or in vivo, by fusing or conjugating the polypeptides of the present invention to antibodies specific for particular cell surface receptors. Antibodies fused or conjugated to the polypeptides of the present invention may also be used in in vitro immunoassays and purification methods using methods known in the art. See e.g., Harbor et al., supra, and PCT publication WO 93/21232; EP 439,095; Naramura et al., Immunol. Lett. 39:91-99 (1994); U.S. Pat. No. 5,474,981; Gillies et al., PNAS 89:1428-1432 (1992); Fell et al., J. Immunol. 146:2446-2452 (1991), which are incorporated by reference in their entireties.

[0385] The present invention further includes compositions comprising the polypeptides of the present invention fused or conjugated to antibody domains other than the variable regions. For example, the polypeptides of the present invention may be fused or conjugated to an antibody Fc region, or portion thereof. The antibody portion fused to a polypeptide of the present invention may comprise the constant region, hinge region, CH1 domain, CH2 domain, and CH3 domain or any combination of whole domains or portions thereof. The polypeptides may also be fused or conjugated to the above antibody portions to form multimers. For example, Fc portions fused to the polypeptides of the present invention can form dimers through disulfide bonding between the Fc portions. Higher multimeric forms can be made by fusing the polypeptides to portions of IgA and IgM. Methods for fusing or conjugating the polypeptides of the present invention to antibody portions are known in the art. See, e.g., U.S. Pat. Nos. 5,336,603; 5,622,929; 5,359,046; 5,349,053; 5,447,851; 5,112,946; EP 307,434; EP 367,166; PCT publications WO 96/04388; WO 91/06570; Ashkenazi et al., Proc. Natl. Acad. Sci. USA 88:10535-10539 (1991); Zheng et al., J. Immunol. 154:5590-5600 (1995); and Vil et al., Proc. Natl. Acad. Sci. USA 89:11337-11341 (1992) (said references incorporated by reference in their entireties).

[0386] As discussed, supra, the polypeptides corresponding to a polypeptide, polypeptide fragment, or a variant of SEQ ID NO:Y may be fused or conjugated to the above antibody portions to increase the in vivo half life of the polypeptides or for use in immunoassays using methods known in the art. Further, the polypeptides corresponding to SEQ ID NO:Y may be fused or conjugated to the above antibody portions to facilitate purification. One reported example describes chimeric proteins consisting of the first two domains of the human CD4-polypeptide and various domains of the constant regions of the heavy or light chains of mammalian immunoglobulins. See EP 394,827; and Traunecker et al., Nature 331:84-86 (1988). The polypeptides of the present invention fused or conjugated to an antibody having disulfide-linked dimeric structures (due to the IgG) may also be more efficient in binding and neutralizing other molecules, than the monomeric secreted protein or protein fragment alone. See, for example, Fountoulakis et al., J. Biochem. 270:3958-3964 (1995). In many cases, the Fc part in a fusion protein is beneficial in therapy and diagnosis, and thus can result in, for example, improved pharmacokinetic properties. See, for example, EP A 232,262. Alternatively, deleting the Fc part after the fusion protein has been expressed, detected, and purified, would be desired. For example, the Fc portion may hinder therapy and diagnosis if the fusion protein is used as an antigen for immunizations. In drug discovery, for example, human proteins, such as hIL-5, have been fused with Fc portions for the purpose of high-throughput screening assays to identify antagonists of hIL-5. (See, Bennett et al., J. Molecular Recognition 8:52-58 (1995); Johanson et al., J. Biol. Chem. 270:9459-9471 (1995)).

[0387] Moreover, the antibodies or fragments thereof of the present invention can be fused to marker sequences, such as a peptide to facilitate purification. In preferred embodiments, the marker amino acid sequence is a hexa-histidine peptide, such as the tag provided in a pQE vector (QIAGEN, Inc., 9259 Eton Avenue, Chatsworth, Calif., 91311), among others, many of which are commercially available. As described in Gentz et al., Proc. Natl. Acad. Sci. USA 86:821-824 (1989), for instance, hexa-histidine provides for convenient purification of the fusion protein. Other peptide tags useful for purification include, but are not limited to, the “HA” tag, which corresponds to an epitope derived from the influenza hemagglutinin protein (Wilson et al., Cell 37:767 (1984)) and the “flag” tag.

[0388] The present invention further encompasses antibodies or fragments thereof conjugated to a diagnostic or therapeutic agent. The antibodies can be used diagnostically to, for example, monitor the development or progression of a tumor as part of a clinical testing procedure to, e.g., determine the efficacy of a given treatment regimen. Detection can be facilitated by coupling the antibody to a detectable substance. Examples of detectable substances include various enzymes, prosthetic groups, fluorescent materials, luminescent materials, bioluminescent materials, radioactive materials, positron emitting metals using various positron emission tomographies, and nonradioactive paramagnetic metal ions. The detectable substance may be coupled or conjugated either directly to the antibody (or fragment thereof) or indirectly, through an intermediate (such as, for example, a linker known in the art) using techniques known in the art. See, for example, U.S. Pat. No. 4,741,900 for metal ions which can be conjugated to antibodies for use as diagnostics according to the present invention. Examples of suitable enzymes include horseradish peroxidase, alkaline phosphatase, beta-galactosidase, or acetylcholinesterase; examples of suitable prosthetic group complexes include streptavidin/biotin and avidin/biotin; examples of suitable fluorescent materials include umbelliferone, fluorescein, fluorescein isothiocyanate, rhodamine, dichlorotriazinylamine fluorescein, dansyl chloride or phycoerythrin; an example of a luminescent material includes luminol; examples of bioluminescent materials include luciferase, luciferin, and aequorin; and examples of suitable radioactive material include 125I, 131I, 111In or 99Tc.

[0389] Further, an antibody or fragment thereof may be conjugated to a therapeutic moiety such as a cytotoxin, e.g., a cytostatic or cytocidal agent, a therapeutic agent or a radioactive metal ion, e.g., alpha-emitters such as, for example, 213Bi. A cytotoxin or cytotoxic agent includes any agent that is detrimental to cells. Examples include paclitaxol, cytochalasin B, gramicidin D, ethidium bromide, emetine, mitomycin, etoposide, tenoposide, vincristine, vinblastine, colchicin, doxorubicin, daunorubicin, dihydroxy anthracin dione, mitoxantrone, mithramycin, actinomycin D, 1-dehydrotestosterone, glucocorticoids, procaine, tetracaine, lidocaine, propranolol, and puromycin and analogs or homologs thereof. Therapeutic agents include, but are not limited to, antimetabolites (e.g., methotrexate, 6-mercaptopurine, 6-thioguanine, cytarabine, 5-fluorouracil decarbazine), alkylating agents (e.g., mechlorethamine, thioepa chlorambucil, melphalan, carmustine (BSNU) and lomustine (CCNU), cyclothosphamide, busulfan, dibromomannitol, streptozotocin, mitomycin C, and cis-dichlorodiamine platinum (II) (DDP) cisplatin), anthracyclines (e.g., daunorubicin (formerly daunomycin) and doxorubicin), antibiotics (e.g., dactinomycin (formerly actinomycin), bleomycin, mithramycin, and anthramycin (AMC)), and anti-mitotic agents (e.g., vincristine and vinblastine).

[0390] The conjugates of the invention can be used for modifying a given biological response, the therapeutic agent or drug moiety is not to be construed as limited to classical chemical therapeutic agents. For example, the drug moiety may be a protein or polypeptide possessing a desired biological activity. Such proteins may include, for example, a toxin such as abrin, ricin A, pseudomonas exotoxin, or diphtheria toxin; a protein such as tumor necrosis factor, a-interferon, β-interferon, nerve growth factor, platelet derived growth factor, tissue plasminogen activator, an apoptotic agent, e.g., TNF-alpha, TNF-beta, AIM I (See, International Publication No. WO 97/33899), AIM II (See, International Publication No. WO 97/34911), Fas Ligand (Takahashi et al., Int. Immunol., 6:1567-1574 (1994)), VEGI (See, International Publication No. WO 99/23105), a thrombotic agent or an anti-angiogenic agent, e.g., angiostatin or endostatin; or, biological response modifiers such as, for example, lymphokines, interleukin-1 (“IL-1”), interleukin-2 (“IL-2”), interleukin-6 (“IL-6”), granulocyte macrophage colony stimulating factor (“GM-CSF”), granulocyte colony stimulating factor (“G-CSF”), or other growth factors.

[0391] Antibodies may also be attached to solid supports, which are particularly useful for immunoassays or purification of the target antigen. Such solid supports include, but are not limited to, glass, cellulose, polyacrylamide, nylon, polystyrene, polyvinyl chloride or polypropylene.

[0392] Techniques for conjugating such therapeutic moiety to antibodies are well known. See, for example, Arnon et al., “Monoclonal Antibodies For Immunotargeting Of Drugs In Cancer Therapy”, in Monoclonal Antibodies And Cancer Therapy, Reisfeld et al. (eds.), pp. 243-56 (Alan R. Liss, Inc. 1985); Hellstrom et al., “Antibodies For Drug Delivery”, in Controlled Drug Delivery (2nd Ed.), Robinson et al. (eds.), pp. 623-53 (Marcel Dekker, Inc. 1987); Thorpe, “Antibody Carriers Of Cytotoxic Agents In Cancer Therapy: A Review”, in Monoclonal Antibodies '84: Biological And Clinical Applications, Pinchera et al. (eds.), pp. 475-506 (1985); “Analysis, Results, And Future Prospective Of The Therapeutic Use Of Radiolabeled Antibody In Cancer Therapy”, in Monoclonal Antibodies For Cancer Detection And Therapy, Baldwin et al. (eds.), pp. 303-16 (Academic Press 1985), and Thorpe et al., “The Preparation And Cytotoxic Properties Of Antibody-Toxin Conjugates”, Immunol. Rev. 62:119-58 (1982).

[0393] Alternatively, an antibody can be conjugated to a second antibody to form an antibody heteroconjugate as described by Segal in U.S. Pat. No. 4,676,980, which is incorporated herein by reference in its entirety.

[0394] An antibody, with or without a therapeutic moiety conjugated to it, administered alone or in combination with cytotoxic factor(s) and/or cytokine(s) can be used as a therapeutic.

Immunophenotyping

[0395] The antibodies of the invention may be utilized for immunophenotyping of cell lines and biological samples. Translation products of the gene of the present invention may be useful as cell-specific markers, or more specifically as cellular markers that are differentially expressed at various stages of differentiation and/or maturation of particular cell types. Monoclonal antibodies directed against a specific epitope, or combination of epitopes, will allow for the screening of cellular populations expressing the marker. Various techniques can be utilized using monoclonal antibodies to screen for cellular populations expressing the marker(s), and include magnetic separation using antibody-coated magnetic beads, “panning” with antibody attached to a solid matrix (i.e., plate), and flow cytometry (See, e.g., U.S. Pat. No. 5,985,660; and Morrison et al., Cell, 96:737-49 (1999)).

[0396] These techniques allow for the screening of particular populations of cells, such as might be found with hematological malignancies (i.e. minimal residual disease (MRD) in acute leukemic patients) and “non-self” cells in transplantations to prevent Graft-versus-Host Disease (GVHD). Alternatively, these techniques allow for the screening of hematopoietic stem and progenitor cells capable of undergoing proliferation and/or differentiation, as might be found in human umbilical cord blood.

Assays for Antibody Binding

[0397] The antibodies of the invention may be assayed for immunospecific binding by any method known in the art. The immunoassays which can be used include but are not limited to competitive and non-competitive assay systems using techniques such as western blots, radioimmunoassays, ELISA (enzyme linked immunosorbent assay), “sandwich” immunoassays, immunoprecipitation assays, precipitin reactions, gel diffusion precipitin reactions, immunodiffusion assays, agglutination assays, complement-fixation assays, immunoradiometric assays, fluorescent immunoassays, and protein A immunoassays, to name but a few. Such assays are routine and well known in the art (see, e.g., Ausubel et al, eds, 1994, Current Protocols in Molecular Biology, Vol. 1, John Wiley & Sons, Inc., New York, which is incorporated by reference herein in its entirety). Exemplary immunoassays are described briefly below (but are not intended by way of limitation).

[0398] Immunoprecipitation protocols generally comprise lysing a population of cells in a lysis buffer such as RIPA buffer (1% NP-40 or Triton X-100, 1% sodium deoxycholate, 0.1% SDS, 0.15 M NaCl, 0.01 M sodium phosphate at pH 7.2, 1% Trasylol) supplemented with protein phosphatase and/or protease inhibitors (e.g., EDTA, PMSF, aprotinin, sodium vanadate), adding the antibody of interest to the cell lysate, incubating for a period of time (e.g., 1-4 hours) at 4° C., adding protein A and/or protein G sepharose beads to the cell lysate, incubating for about an hour or more at 4° C., washing the beads in lysis buffer and resuspending the beads in SDS/sample buffer. The ability of the antibody of interest to immunoprecipitate a particular antigen can be assessed by, e.g., western blot analysis. One of skill in the art would be knowledgeable as to the parameters that can be modified to increase the binding of the antibody to an antigen and decrease the background (e.g., pre-clearing the cell lysate with sepharose beads). For further discussion regarding immunoprecipitation protocols see, e.g., Ausubel et al., eds., (1994), Current Protocols in Molecular Biology, Vol. 1, John Wiley & Sons, Inc., New York, section 10.16.1.

[0399] Western blot analysis generally comprises preparing protein samples, electrophoresis of the protein samples in a polyacrylamide gel (e.g., 8%-20% SDS-PAGE depending on the molecular weight of the antigen), transferring the protein sample from the polyacrylamide gel to a membrane such as nitrocellulose, PVDF or nylon, blocking the membrane in blocking solution (e.g., PBS with 3% BSA or non-fat milk), washing the membrane in washing buffer (e.g., PBS-Tween 20), blocking the membrane with primary antibody (the antibody of interest) diluted in blocking buffer, washing the membrane in washing buffer, blocking the membrane with a secondary antibody (which recognizes the primary antibody, e.g., an anti-human antibody) conjugated to an enzymatic substrate (e.g., horseradish peroxidase or alkaline phosphatase) or radioactive molecule (e.g., 32P or 125I) diluted in blocking buffer, washing the membrane in wash buffer, and detecting the presence of the antigen. One of skill in the art would be knowledgeable as to the parameters that can be modified to increase the signal detected and to reduce the background noise. For further discussion regarding western blot protocols see, e.g., Ausubel et al, eds, (1994), Current Protocols in Molecular Biology, Vol. 1, John Wiley & Sons, Inc., New York, section 10.8.1.

[0400] ELISAs comprise preparing antigen, coating the well of a 96 well microtiter plate with the antigen, adding the antibody of interest conjugated to a detectable compound such as an enzymatic substrate (e.g., horseradish peroxidase or alkaline phosphatase) to the well and incubating for a period of time, and detecting the presence of the antigen. In ELISAs the antibody of interest does not have to be conjugated to a detectable compound; instead, a second antibody (which recognizes the antibody of interest) conjugated to a detectable compound may be added to the well. Further, instead of coating the well with the antigen, the antibody may be coated to the well. In this case, a second antibody conjugated to a detectable compound may be added following the addition of the antigen of interest to the coated well. One of skill in the art would be knowledgeable as to the parameters that can be modified to increase the signal detected as well as other variations of ELISAs known in the art. For further discussion regarding ELISAs see, e.g., Ausubel et al, eds, (1994), Current Protocols in Molecular Biology, Vol. 1, John Wiley & Sons, Inc., New York, section 11.2.1.

[0401] The binding affinity of an antibody to an antigen and the off-rate of an antibody-antigen interaction can be determined by competitive binding assays. One example of a competitive binding assay is a radioimmunoassay comprising the incubation of labeled antigen (e.g., 3H or 125I) with the antibody of interest in the presence of increasing amounts of unlabeled antigen, and the detection of the antibody bound to the labeled antigen. The affinity of the antibody of interest for a particular antigen and the binding off-rates can be determined from the data by scatchard plot analysis. Competition with a second antibody can also be determined using radioimmunoassays. In this case, the antigen is incubated with antibody of interest conjugated to a labeled compound (e.g., 3H or 125I) in the presence of increasing amounts of an unlabeled second antibody.

[0402] Antibodies of the invention may be characterized using immunocytochemisty methods on cells (e.g., mammalian cells, such as CHO cells) transfected with a vector enabling the expression of an antigen or with vector alone using techniques commonly known in the art. Antibodies that bind antigen transfected cells, but not vector-only transfected cells, are antigen specific.

Therapeutic Uses

[0403] Table 1D: In preferred embodiments, the present invention encompasses a method of treating a disease or disorder listed in the “Preferred Indications” column of Table 1D; comprising administering to a patient in which such treatment, prevention, or amelioration is desired a protein, nucleic acid, or antibody of the invention (or fragment or variant thereof) represented by Table 1A and Table 1D (in the same row as the disease or disorder to be treated is listed in the “Preferred Indications” column of Table 1D) in an amount effective to treat, prevent, or ameliorate the disease or disorder.

[0404] As indicated in Table 1D, the polynucleotides, polypeptides, agonists, or antagonists of the present invention (including antibodies) can be used in assays to test for one or more biological activities. If these polynucleotides and polypeptides do exhibit activity in a particular assay, it is likely that these molecules may be involved in the diseases associated with the biological activity. Thus, the polynucleotides or polypeptides, or agonists or antagonists thereof (including antibodies) could be used to treat the associated disease.

[0405] The present invention encompasses methods of preventing, treating, diagnosing, or ameliorating a disease or disorder. In preferred embodiments, the present invention encompasses a method of treating a disease or disorder listed in the “Preferred Indications” column of Table 1D; comprising administering to a patient in which such treatment, prevention, or amelioration is desired a protein, nucleic acid, or antibody of the invention (or fragment or variant thereof) in an amount effective to treat, prevent, diagnose, or ameliorate the disease or disorder. The first and seccond columns of Table 1D show the “Gene No.” and “cDNA Clone ID No.”, respectively, indicating certain nucleic acids and proteins (or antibodies against the same) of the invention (including polynucleotide, polypeptide, and antibody fragments or variants thereof) that may be used in preventing, treating, diagnosing, or ameliorating the disease(s) or disorder(s) indicated in the corresponding row in Column 3 of Table 1D.

[0406] In another embodiment, the present invention also encompasses methods of preventing, treating, diagnosing, or ameliorating a disease or disorder listed in the “Preferred Indications” column of Table 1D; comprising administering to a patient combinations of the proteins, nucleic acids, or antibodies of the invention (or fragments or variants thereof), sharing similar indications as shown in the corresponding rows in Column 3 of Table 1D.

[0407] The “Preferred Indication” column describes diseases, disorders, and/or conditions that may be treated, prevented, diagnosed, or ameliorated by a protein, nucleic acid, or antibody of the invention (or fragment or variant thereof).

[0408] The recitation of “Cancer” in the “Preferred Indication” column indicates that the corresponding nucleic acid and protein, or antibody against the same, of the invention (or fragment or variant thereof) may be used for example, to diagnose, treat, prevent, and/or ameliorate diseases and/or disorders relating to neoplastic diseases (e.g., leukemias, cancers, and/or as described below under “Hyperproliferative Disorders”).

[0409] In specific embodiments, a protein, nucleic acid, or antibody of the invention (or fragment or variant thereof) having a “Cancer” recitation in the “Preferred Indication” column of Table 1D may be used for example, to diagnose, treat, prevent, and/or ameliorate a neoplasm located in a tissue selected from the group consisting of: colon, abdomen, bone, breast, digestive system, liver, pancreas, prostate, peritoneum, lung, blood (e.g., leukemia), endocrine glands (adrenal, parathyroid, pituitary, testicles, ovary, thymus, thyroid), uterus, eye, head and neck, nervous (central and peripheral), lymphatic system, pelvic, skin, soft tissue, spleen, thoracic, and urogenital.

[0410] In specific embodiments, a protein, nucleic acid, or antibody of the invention (or fragment or variant thereof) having a “Cancer” recitation in the “Preferred Indication” column of Table 1D, may be used for example, to diagnose, treat, prevent, and/or ameliorate a pre-neoplastic condition, selected from the group consisting of: hyperplasia (e.g., endometrial hyperplasia and/or as described in the section entitled “Hyperproliferative Disorders”), metaplasia (e.g., connective tissue metaplasia, atypical metaplasia, and/or as described in the section entitled “Hyperproliferative Disorders”), and/or dysplasia (e.g., cervical dysplasia, and bronchopulmonary dysplasia).

[0411] In another specific embodiment, a protein, nucleic acid, or antibody of the invention (or fragment or variant thereof) having a “Cancer” recitation in the “Preferred Indication” column of Table 1D, may be used for example, to diagnose, treat, prevent, and/or ameliorate a benign dysproliferative disorder selected from the group consisting of: benign tumors, fibrocystic conditions, tissue hypertrophy, and/or as described in the section entitled “Hyperproliferative Disorders”.

[0412] The recitation of “Immune/Hematopoietic” in the “Preferred Indication” column indicates that the corresponding nucleic acid and protein, or antibody against the same, of the invention (or fragment or variant thereof), may be used for example, to diagnose, treat, prevent, and/or ameliorate diseases and/or disorders relating to neoplastic diseases (e.g., as described below under “Hyperproliferative Disorders”), blood disorders (e.g., as described below under “Immune Activity” “Cardiovascular Disorders” and/or “Blood-Related Disorders”), and infections (e.g., as described below under “Infectious Disease”).

[0413] In specific embodiments, a protein, nucleic acid, or antibody of the invention (or fragment or variant thereof) having the “Immune/Hematopoietic” recitation in the “Preferred Indication” column of Table 1D, may be used for example, to diagnose, treat, prevent, and/or ameliorate a disease or disorder selected from the group consisting of: anemia, pancytopenia, leukopenia, thrombocytopenia, leukemias, Hodgkin's disease, non-Hodgkin's lymphoma, acute lymphocytic anemia (ALL), plasmacytomas, multiple myeloma, Burkitt's lymphoma, arthritis, asthma, AIDS, autoimmune disease, rheumatoid arthritis, granulomatous disease, immune deficiency, inflammatory bowel disease, sepsis, neutropenia, neutrophilia, psoriasis, immune reactions to transplanted organs and tissues, systemic lupus erythematosis, hemophilia, hypercoagulation, diabetes mellitus, endocarditis, meningitis, Lyme Disease, and allergies.

[0414] The recitation of “Reproductive” in the “Preferred Indication” column indicates that the corresponding nucleic acid and protein, or antibody against the same, of the invention (or fragment or variant thereof), may be used for example, to diagnose, treat, prevent, and/or ameliorate diseases and/or disorders relating to neoplastic diseases (e.g., as described below under “Hyperproliferative Disorders”), and disorders of the reproductive system (e.g., as described below under “Reproductive System Disorders”).

[0415] In specific embodiments, a protein, nucleic acid, or antibody of the invention (or fragment or variant thereof) having a “Reproductive” recitation in the “Preferred Indication” column of Table 1D, may be used for example, to diagnose, treat, prevent, and/or ameliorate a disease or disorder selected from the group consisting of: cryptorchism, prostatitis, inguinal hernia, varicocele, leydig cell tumors, verrucous carcinoma, prostatitis, malacoplakia, Peyronie's disease, penile carcinoma, squamous cell hyperplasia, dysmenorrhea, ovarian adenocarcinoma, Turner's syndrome, mucopurulent cervicitis, Sertoli-leydig tumors, ovarian cancer, uterine cancer, pelvic inflammatory disease, testicular cancer, prostate cancer, Klinefelter's syndrome, Young's syndrome, premature ejaculation, diabetes mellitus, cystic fibrosis, Kartagener's syndrome, testicular atrophy, testicular feminization, anorchia, ectopic testis, epididymitis, orchitis, gonorrhea, syphilis, testicular torsion, vasitis nodosa, germ cell tumors, stromal tumors, dysmenorrhea, retroverted uterus, endometriosis, fibroids, adenomyosis, anovulatory bleeding, amenorrhea, Cushing's syndrome, hydatidiform moles, Asherman's syndrome, premature menopause, precocious puberty, uterine polyps, dysfunctional uterine bleeding, cervicitis, chronic cervicitis, mucopurulent cervicitis, cervical dysplasia, cervical polyps, Nabothian cysts, cervical erosion, cervical incompetence, cervical neoplasms, pseudohermaphroditism, and premenstrual syndrome.

[0416] The recitation of “Musculoskeletal” in the “Preferred Indication” column indicates that the corresponding nucleic acid and protein, or antibody against the same, of the invention (or fragment or variant thereof), may be used for example, to diagnose, treat, prevent, and/or ameliorate diseases and/or disorders relating to neoplastic diseases (e.g., as described below under “Hyperproliferative Disorders”), and disorders of the immune system (e.g., as described below under “Immune Activity”).

[0417] In specific embodiments, a protein, nucleic acid, or antibody of the invention (or fragment or variant thereof) having a “Musculoskeletal” recitation in the “Preferred Indication” column of Table 1D, may be used for example, to diagnose, treat, prevent, and/or ameliorate a disease or disorder selected from the group consisting of: bone cancers (e.g., osteochondromas, benign chondromas, chondroblastoma, chondromyxoid fibromas, osteoid osteomas, giant cell tumors, multiple myeloma, osteosarcomas), Paget's Disease, rheumatoid arthritis, systemic lupus erythematosus, osteomyelitis, Lyme Disease, gout, bursitis, tendonitis, osteoporosis, osteoarthritis, muscular dystrophy, mitochondrial myopathy, cachexia, and multiple sclerosis.

[0418] The recitation of “Cardiovascular” in the “Preferred Indication” column indicates that the corresponding nucleic acid and protein, or antibody against the same, of the invention (or fragment or variant thereof), may be used for example, to diagnose, treat, prevent, and/or ameliorate diseases and/or disorders relating to neoplastic diseases (e.g., as described below under “Hyperproliferative Disorders”), and disorders of the cardiovascular system (e.g., as described below under “Cardiovascular Disorders”).

[0419] In specific embodiments, a protein, nucleic acid, or antibody of the invention (or fragment or variant thereof) having a “Cardiovascular” recitation in the “Preferred Indication” column of Table 1D, may be used for example, to diagnose, treat, prevent, and/or ameliorate a disease or disorder selected from the group consisting of: myxomas, fibromas, rhabdomyomas, cardiovascular abnormalities (e.g., congenital heart defects, cerebral artenovenous malformations, septal defects), heart disease (e.g., heart failure, congestive heart disease, arrhythmia, tachycardia, fibrillation, pericardial Disease, endocarditis), cardiac arrest, heart valve disease (e.g., stenosis, regurgitation, prolapse), vascular disease (e.g., hypertension, coronary artery disease, angina, aneurysm, arteriosclerosis, peripheral vascular disease), hyponatremia, hypernatremia, hypokalemia, and hyperkalemia.

[0420] The recitation of “Mixed Fetal” in the “Preferred Indication” column indicates that the corresponding nucleic acid and protein, or antibody against the same, of the invention (or fragment or variant thereof), may be used for example, to diagnose, treat, prevent, and/or ameliorate diseases and/or disorders relating to neoplastic diseases (e.g., as described below under “Hyperproliferative Disorders”).

[0421] In specific embodiments, a protein, nucleic acid, or antibody of the invention (or fragment or variant thereof) having a “Mixed Fetal” recitation in the “Preferred Indication” column of Table 1D, may be used for example, to diagnose, treat, prevent, and/or ameliorate a disease or disorder selected from the group consisting of: spina bifida, hydranencephaly, neurofibromatosis, fetal alcohol syndrome, diabetes mellitus, PKU, Down's syndrome, Patau syndrome, Edwards syndrome, Turner syndrome, Apert syndrome, Carpenter syndrome, Conradi syndrome, Crouzon syndrome, cutis laxa, Cornelia de Lange syndrome, Ellis-van Creveld syndrome, Holt-Oram syndrome, Kartagener syndrome, Meckel-Gruber syndrome, Noonan syndrome, Pallister-Hall syndrome, Rubinstein-Taybi syndrome, Scimitar syndrome, Smith-Lemli-Opitz syndrome, thromocytopenia-absent radius (TAR) syndrome, Treacher Collins syndrome, Williams syndrome, Hirschsprung's disease, Meckel's diverticulum, polycystic kidney disease, Turner's syndrome, and gonadal dysgenesis, Klippel-Feil syndrome, Ostogenesis imperfecta, muscular dystrophy, Tay-Sachs disease, Wilm's tumor, neuroblastoma, and retinoblastoma.

[0422] The recitation of “Excretory” in the “Preferred Indication” column indicates that the corresponding nucleic acid and protein, or antibody against the same, of the invention (or fragment or variant thereof), may be used for example, to diagnose, treat, prevent, and/or ameliorate diseases and/or disorders relating to neoplastic diseases (e.g., as described below under “Hyperproliferative Disorders”) and renal disorders (e.g., as described below under “Renal Disorders”).

[0423] In specific embodiments, a protein, nucleic acid, or antibody of the invention (or fragment or variant thereof) having a “Excretory” recitation in the “Preferred Indication” column of Table 1D, may be used for example, to diagnose, treat, prevent, and/or ameliorate a disease or disorder selected from the group consisting of: bladder cancer, prostate cancer, benign prostatic hyperplasia, bladder disorders (e.g., urinary incontinence, urinary retention, urinary obstruction, urinary tract Infections, interstitial cystitis, prostatitis, neurogenic bladder, hematuria), renal disorders (e.g., hydronephrosis, proteinuria, renal failure, pyelonephritis, urolithiasis, reflux nephropathy, and unilateral obstructive uropathy).

[0424] The recitation of “Neural/Sensory” in the “Preferred Indication” column indicates that the corresponding nucleic acid and protein, or antibody against the same, of the invention (or fragment or variant thereof), may be used for example, to diagnose, treat, prevent, and/or ameliorate diseases and/or disorders relating to neoplastic diseases (e.g., as described below under “Hyperproliferative Disorders”) and diseases or disorders of the nervous system (e.g., as described below under “Neural Activity and Neurological Diseases”).

[0425] In specific embodiments, a protein, nucleic acid, or antibody of the invention (or fragment or variant thereof) having a “Neural/Sensory” recitation in the “Preferred Indication” column of Table 1D, may be used for example, to diagnose, treat, prevent, and/or ameliorate a disease or disorder selected from the group consisting of: brain cancer (e.g., brain stem glioma, brain tumors, central nervous system (Primary) lymphoma, central nervous system lymphoma, cerebellar astrocytoma, and cerebral astrocytoma, neurodegenerative disorders (e.g., Alzheimer's Disease, Creutzfeldt-Jakob Disease, Parkinson's Disease, and Idiopathic Presenile Dementia), encephalomyelitis, cerebral malaria, meningitis, metabolic brain diseases (e.g., phenylketonuria and pyruvate carboxylase deficiency), cerebellar ataxia, ataxia telangiectasia, and AIDS Dementia Complex, schizophrenia, attention deficit disorder, hyperactive attention deficit disorder, autism, and obsessive compulsive disorders.

[0426] The recitation of “Respiratory” in the “Preferred Indication” column indicates that the corresponding nucleic acid and protein, or antibody against the same, of the invention (or fragment or variant thereof), may be used for example, to diagnose, treat, prevent, and/or ameliorate diseases and/or disorders relating to neoplastic diseases (e.g., as described below under “Hyperproliferative Disorders”) and diseases or disorders of the respiratory system (e.g., as described below under “Respiratory Disorders”).

[0427] In specific embodiments, a protein, nucleic acid, or antibody of the invention (or fragment or variant thereof) having a “Respiratory” recitation in the “Preferred Indication” column of Table 1D, may be used for example, to diagnose, treat, prevent, and/or ameliorate a disease or disorder selected from the group consisting of: cancers of the respiratory system such as larynx cancer, pharynx cancer, trachea cancer, epiglottis cancer, lung cancer, squamous cell carcinomas, small cell (oat cell) carcinomas, large cell carcinomas, and adenocarcinomas. Allergic reactions, cystic fibrosis, sarcoidosis, histiocytosis X, infiltrative lung diseases (e.g., pulmonary fibrosis and lymphoid interstitial pneumonia), obstructive airway diseases (e.g., asthma, emphysema, chronic or acute bronchitis), occupational lung diseases (e.g., silicosis and asbestosis), pneumonia, and pleurisy.

[0428] The recitation of “Endocrine” in the “Preferred Indication” column indicates that the corresponding nucleic acid and protein, or antibody against the same, of the invention (or fragment or variant thereof), may be used for example, to diagnose, treat, prevent, and/or ameliorate diseases and/or disorders relating to neoplastic diseases (e.g., as described below under “Hyperproliferative Disorders”) and diseases or disorders of the respiratory system (e.g., as described below under “Respiratory Disorders”), renal disorders (e.g., as described below under “Renal Disorders”), and disorders of the endocrine system (e.g., as described below under “Endocrine Disorders”.

[0429] In specific embodiments, a protein, nucleic acid, or antibody of the invention (or fragment or variant thereof) having an “Endocrine” recitation in the “Preferred Indication” column of Table 1D, may be used for example, to diagnose, treat, prevent, and/or ameliorate a disease or disorder selected from the group consisting of: cancers of endocrine tissues and organs (e.g., cancers of the hypothalamus, pituitary gland, thyroid gland, parathyroid glands, pancreas, adrenal glands, ovaries, and testes), diabetes (e.g., diabetes insipidus, type I and type II diabetes mellitus), obesity, disorders related to pituitary glands (e.g., hyperpituitarism, hypopituitarism, and pituitary dwarfism), hypothyroidism, hyperthyroidism, goiter, reproductive disorders (e.g. male and female infertility), disorders related to adrenal glands (e.g., Addison's Disease, corticosteroid deficiency, and Cushing's Syndrome), kidney cancer (e.g., hypernephroma, transitional cell cancer, and Wilm's tumor), diabetic nephropathy, interstitial nephritis, polycystic kidney disease, glomerulonephritis (e.g., IgM mesangial proliferative glomerulonephritis and glomerulonephritis caused by autoimmune disorders; such as Goodpasture's syndrome), and nephrocalcinosis.

[0430] The recitation of “Digestive” in the “Preferred Indication” column indicates that the corresponding nucleic acid and protein, or antibody against the same, of the invention (or fragment or variant thereof), may be used for example, to diagnose, treat, prevent, and/or ameliorate diseases and/or disorders relating to neoplastic diseases (e.g., as described below under “Hyperproliferative Disorders”) and diseases or disorders of the gastrointestinal system (e.g., as described below under “Gastrointestinal Disorders”.

[0431] In specific embodiments, a protein, nucleic acid, or antibody of the invention (or fragment or variant thereof) having a “Digestive” recitation in the “Preferred Indication” column of Table 1D, may be used for example, to diagnose, treat, prevent, and/or ameliorate a disease or disorder selected from the group consisting of: ulcerative colitis, appendicitis, Crohn's disease, hepatitis, hepatic encephalopathy, portal hypertension, cholelithiasis, cancer of the digestive system (e.g., biliary tract cancer, stomach cancer, colon cancer, gastric cancer, pancreatic cancer, cancer of the bile duct, tumors of the colon (e.g., polyps or cancers), and cirrhosis), pancreatitis, ulcerative disease, pyloric stenosis, gastroenteritis, gastritis, gastric atropy, benign tumors of the duodenum, distension, irritable bowel syndrome, malabsorption, congenital disorders of the small intestine, bacterial and parasitic infection, megacolon, Hirschsprung's disease, aganglionic megacolon, acquired megacolon, colitis, anorectal disorders (e.g., anal fistulas, hemorrhoids), congenital disorders of the liver (e.g., Wilson's disease, hemochromatosis, cystic fibrosis, biliary atresia, and alpha1-antitrypsin deficiency), portal hypertension, cholelithiasis, and jaundice.

[0432] The recitation of “Connective/Epithelial” in the “Preferred Indication” column indicates that the corresponding nucleic acid and protein, or antibody against the same, of the invention (or fragment or variant thereof), may be used for example, to diagnose, treat, prevent, and/or ameliorate diseases and/or disorders relating to neoplastic diseases (e.g., as described below under “Hyperproliferative Disorders”), cellular and genetic abnormalities (e.g., as described below under “Diseases at the Cellular Level”), angiogenesis (e.g., as described below under “Anti-Angiogenesis Activity”), and or to promote or inhibit regeneration (e.g., as described below under “Regeneration”), and wound healing (e.g., as described below under “Wound Healing and Epithelial Cell Proliferation”).

[0433] In specific embodiments, a protein, nucleic acid, or antibody of the invention (or fragment or variant thereof) having a “Connective/Epithelial” recitation in the “Preferred Indication” column of Table 1D, may be used for example, to diagnose, treat, prevent, and/or ameliorate a disease or disorder selected from the group consisting of: connective tissue metaplasia, mixed connective tissue disease, focal epithelial hyperplasia, epithelial metaplasia, mucoepithelial dysplasia, graft v. host disease, polymyositis, cystic hyperplasia, cerebral dysplasia, tissue hypertrophy, Alzheimer's disease, lymphoproliferative disorder, Waldenstron's macroglobulinemia, Crohn's disease, pernicious anemia, idiopathic Addison's disease, glomerulonephritis, bullous pemphigoid, Sjogren's syndrome, diabetes mellitus, cystic fibrosis, osteoblastoma, osteoclastoma, osteosarcoma, chondrosarcoma, osteoporosis, osteocarthritis, periodontal disease, wound healing, relapsing polychondritis, vasculitis, polyarteritis nodosa, Wegener's granulomatosis, cellulitis, rheumatoid arthritis, psoriatic arthritis, discoid lupus erythematosus, systemic lupus erythematosus, scleroderma, CREST syndrome, Sjogren's syndrome, polymyositis, dermatomyositis, mixed connective tissue disease, relapsing polychondritis, vasculitis, Henoch-Schonlein syndrome, erythema nodosum, polyarteritis nodosa, temporal (giant cell) arteritis, Takayasu's arteritis, Wegener's granulomatosis, Reiter's syndrome, Behcet's syndrome, ankylosing spondylitis, cellulitis, keloids, Ehler Danlos syndrome, Marfan syndrome, pseudoxantoma elasticum, osteogenese imperfecta, chondrodysplasias, epidermolysis bullosa, Alport syndrome, and cutis laxa.

[0434] Table 1E also provides information regarding biological activities and preferred therapeutic uses (i.e. see, “Preferred Indications” column) for polynucleotides and polypeptides of the invention (including antibodies, agonists, and/or antagonists thereof). Table 1E also provides information regarding assays which may be used to test polynucleotides and polypeptides of the invention (including antibodies, agonists, and/or antagonists thereof) for the corresponding biological activities. The first column (“Gene No.”) provides the gene number in the application for each clone identifier. The second column (“cDNA ATCC Deposit No:Z”) provides the unique clone identifier for each clone as previously described and indicated in Tables 1A, 1B, 1C, and 1D. The third column (“AA SEQ ID NO:Y”) indicates the Sequence Listing SEQ ID Number for polypeptide sequences encoded by the corresponding cDNA clones (also as indicated in Tables 1A, 1B, and 2). The fourth column (“Biological Activity”) indicates a biological activity corresponding to the indicated polypeptides (or polynucleotides encoding said polypeptides). The fifth column (“Exemplary Activity Assay”) further describes the corresponding biological activity and also provides information pertaining to the various types of assays which may be performed to test, demonstrate, or quantify the corresponding biological activity. The sixth column (“Preferred Indications”) describes particular embodiments of the invention as well as indications (e.g. pathologies, diseases, disorders, abnormalities, etc.) for which polynucleotides and polypeptides of the invention (including antibodies, agonists, and/or antagonists thereof) may be used in detecting, diagnosing, preventing, and/or treating.

[0435] The present invention is further directed to antibody-based therapies which involve administering antibodies of the invention to an animal, preferably a mammal, and most preferably a human, patient for treating one or more of the disclosed diseases, disorders, or conditions. Therapeutic compounds of the invention include, but are not limited to, antibodies of the invention (including fragments, analogs and derivatives thereof as described herein) and nucleic acids encoding antibodies of the invention (including fragments, analogs and derivatives thereof and anti-idiotypic antibodies as described herein). The antibodies of the invention can be used to treat, inhibit or prevent diseases, disorders or conditions associated with aberrant expression and/or activity of a polypeptide of the invention, including, but not limited to, any one or more of the diseases, disorders, or conditions described herein. The treatment and/or prevention of diseases, disorders, or conditions associated with aberrant expression and/or activity of a polypeptide of the invention includes, but is not limited to, alleviating symptoms associated with those diseases, disorders or conditions. Antibodies of the invention may be provided in pharmaceutically acceptable compositions as known in the art or as described herein.

[0436] In a specific and preferred embodiment, the present invention is directed to antibody-based therapies which involve administering antibodies of the invention to an animal, preferably a mammal, and most preferably a human, patient for treating one or more diseases, disorders, or conditions, including but not limited to: neural disorders, immune system disorders, muscular disorders, reproductive disorders, gastrointestinal disorders, pulmonary disorders, cardiovascular disorders, renal disorders, proliferative disorders, and/or cancerous diseases and conditions, and/or as described elsewhere herein. Therapeutic compounds of the invention include, but are not limited to, antibodies of the invention (e.g., antibodies directed to the full length protein expressed on the cell surface of a mammalian cell; antibodies directed to an epitope of a polypeptide of the invention (such as, for example, a predicted linear epitope shown in column 7 of Table 1B.1; or a conformational epitope, including fragments, analogs and derivatives thereof as described herein) and nucleic acids encoding antibodies of the invention (including fragments, analogs and derivatives thereof and anti-idiotypic antibodies as described herein). The antibodies of the invention can be used to treat, inhibit or prevent diseases, disorders or conditions associated with aberrant expression and/or activity of a polypeptide of the invention, including, but not limited to, any one or more of the diseases, disorders, or conditions described herein. The treatment and/or prevention of diseases, disorders, or conditions associated with aberrant expression and/or activity of a polypeptide of the invention includes, but is not limited to, alleviating symptoms associated with those diseases, disorders or conditions. Antibodies of the invention may be provided in pharmaceutically acceptable compositions as known in the art or as described herein.

[0437] A summary of the ways in which the antibodies of the present invention may be used therapeutically includes binding polynucleotides or polypeptides of the present invention locally or systemically in the body or by direct cytotoxicity of the antibody, e.g. as mediated by complement (CDC) or by effector cells (ADCC). Some of these approaches are described in more detail below. Armed with the teachings provided herein, one of ordinary skill in the art will know how to use the antibodies of the present invention for diagnostic, monitoring or therapeutic purposes without undue experimentation.

[0438] The antibodies of this invention may be advantageously utilized in combination with other monoclonal or chimeric antibodies, or with lymphokines or hematopoietic growth factors (such as, e.g., IL-2, IL-3 and IL-7), for example, which serve to increase the number or activity of effector cells which interact with the antibodies.

[0439] The antibodies of the invention may be administered alone or in combination with other types of treatments (e.g., radiation therapy, chemotherapy, hormonal therapy, immunotherapy and anti-tumor agents). Generally, administration of products of a species origin or species reactivity (in the case of antibodies) that is the same species as that of the patient is preferred. Thus, in a preferred embodiment, human antibodies, fragments derivatives, analogs, or nucleic acids, are administered to a human patient for therapy or prophylaxis.

[0440] It is preferred to use high affinity and/or potent in vivo inhibiting and/or neutralizing antibodies against polypeptides or polynucleotides of the present invention, fragments or regions thereof, for both immunoassays directed to and therapy of disorders related to polynucleotides or polypeptides, including fragments thereof, of the present invention. Such antibodies, fragments, or regions, will preferably have an affinity for polynucleotides or polypeptides of the invention, including fragments thereof. Preferred binding affinities include those with a dissociation constant or Kd less than 5×10⁻² M, 10⁻² M, 5×10⁻³ M, 10⁻³ M, 5×10⁻⁴ M, 10⁻⁴ M, 5×10⁻⁵ M, 10⁻⁵ M, 5×10⁻⁶ M, 10⁻⁶ M, 5×10⁻⁷ M, 10⁻⁷ M, 5×10⁻⁸ M, 10⁻⁸ M, 5×10⁻⁹ M, 10⁻⁹ M, 5×10⁻¹⁰ M, 10⁻¹⁰ M, 5×10⁻¹¹ M, 10⁻¹¹ M, 5×10⁻¹² M, 10⁻¹² M, 5×10⁻¹³ M, 10⁻¹³ M, 5×10⁻¹⁴ M, 10⁻¹⁴ M, 5×10⁻¹⁵ M, and 10⁻¹⁵ M.

Gene Therapy

[0441] In a specific embodiment, nucleic acids comprising sequences encoding antibodies or functional derivatives thereof, are administered to treat, inhibit or prevent a disease or disorder associated with aberrant expression and/or activity of a polypeptide of the invention, by way of gene therapy. Gene therapy refers to therapy performed by the administration to a subject of an expressed or expressible nucleic acid. In this embodiment of the invention, the nucleic acids produce their encoded protein that mediates a therapeutic effect.

[0442] Any of the methods for gene therapy available in the art can be used according to the present invention. Exemplary methods are described below.

[0443] For general reviews of the methods of gene therapy, see Goldspiel et al., Clinical Pharmacy 12:488-505 (1993); Wu and Wu, Biotherapy 3:87-95 (1991); Tolstoshev, Ann. Rev. Pharmacol. Toxicol. 32:573-596 (1993); Mulligan, Science 260:926-932 (1993); and Morgan and Anderson, Ann. Rev. Biochem. 62:191-217 (1993); May, TIBTECH 11(5):155-215 (1993). Methods commonly known in the art of recombinant DNA technology which can be used are described in Ausubel et al. (eds.), Current Protocols in Molecular Biology, John Wiley & Sons, NY (1993); and Kriegler, Gene Transfer and Expression, A Laboratory Manual, Stockton Press, NY (1990).

[0444] In a preferred embodiment, the compound comprises nucleic acid sequences encoding an antibody, said nucleic acid sequences being part of expression vectors that express the antibody or fragments or chimeric proteins or heavy or light chains thereof in a suitable host. In particular, such nucleic acid sequences have promoters operably linked to the antibody coding region, said promoter being inducible or constitutive, and, optionally, tissue-specific. In another particular embodiment, nucleic acid molecules are used in which the antibody coding sequences and any other desired sequences are flanked by regions that promote homologous recombination at a desired site in the genome, thus providing for intrachromosomal expression of the antibody encoding nucleic acids (Koller and Smithies, Proc. Natl. Acad. Sci. USA 86:8932-8935 (1989); Zijlstra et al., Nature 342:435-438 (1989). In specific embodiments, the expressed antibody molecule is a single chain antibody; alternatively, the nucleic acid sequences include sequences encoding both the heavy and light chains, or fragments thereof, of the antibody.

[0445] Delivery of the nucleic acids into a patient may be either direct, in which case the patient is directly exposed to the nucleic acid or nucleic acid-carrying vectors, or indirect, in which case, cells are first transformed with the nucleic acids in vitro, then transplanted into the patient. These two approaches are known, respectively, as in vivo or ex vivo gene therapy.

[0446] In a specific embodiment, the nucleic acid sequences are directly administered in vivo, where it is expressed to produce the encoded product. This can be accomplished by any of numerous methods known in the art, e.g., by constructing them as part of an appropriate nucleic acid expression vector and administering it so that they become intracellular, e.g., by infection using defective or attenuated retrovirals or other viral vectors (see U.S. Pat. No. 4,980,286), or by direct injection of naked DNA, or by use of microparticle bombardment (e.g., a gene gun; Biolistic, Dupont), or coating with lipids or cell-surface receptors or transfecting agents, encapsulation in liposomes, microparticles, or microcapsules, or by administering them in linkage to a peptide which is known to enter the nucleus, by administering it in linkage to a ligand subject to receptor-mediated endocytosis (see, e.g., Wu and Wu, J. Biol. Chem. 262:4429-4432 (1987)) (which can be used to target cell types specifically expressing the receptors), etc. In another embodiment, nucleic acid-ligand complexes can be formed in which the ligand comprises a fusogenic viral peptide to disrupt endosomes, allowing the nucleic acid to avoid lysosomal degradation. In yet another embodiment, the nucleic acid can be targeted in vivo for cell specific uptake and expression, by targeting a specific receptor (see, e.g., PCT Publications WO 92/06180; WO 92/22635; WO92/20316; WO93/14188, WO 93/20221). Alternatively, the nucleic acid can be introduced intracellularly and incorporated within host cell DNA for expression, by homologous recombination (Koller and Smithies, Proc. Natl. Acad. Sci. USA 86:8932-8935 (1989); Zijlstra et al., Nature 342:435-438 (1989)).

[0447] In a specific embodiment, viral vectors that contains nucleic acid sequences encoding an antibody of the invention are used. For example, a retroviral vector can be used (see Miller et al., Meth. Enzymol. 217:581-599 (1993)). These retroviral vectors contain the components necessary for the correct packaging of the viral genome and integration into the host cell DNA. The nucleic acid sequences encoding the antibody to be used in gene therapy are cloned into one or more vectors, which facilitates delivery of the gene into a patient. More detail about retroviral vectors can be found in Boesen et al., Biotherapy 6:291-302 (1994), which describes the use of a retroviral vector to deliver the mdr1 gene to hematopoietic stem cells in order to make the stem cells more resistant to chemotherapy. Other references illustrating the use of retroviral vectors in gene therapy are: Clowes et al., J. Clin. Invest. 93:644-651 (1994); Kiem et al., Blood 83:1467-1473 (1994); Salmons and Gunzberg, Human Gene Therapy 4:129-141 (1993); and Grossman and Wilson, Curr. Opin. in Genetics and Devel. 3:110-114 (1993).

[0448] Adenoviruses are other viral vectors that can be used in gene therapy. Adenoviruses are especially attractive vehicles for delivering genes to respiratory epithelia. Adenoviruses naturally infect respiratory epithelia where they cause a mild disease. Other targets for adenovirus-based delivery systems are liver, the central nervous system, endothelial cells, and muscle. Adenoviruses have the advantage of being capable of infecting non-dividing cells. Kozarsky and Wilson, Current Opinion in Genetics and Development 3:499-503 (1993) present a review of adenovirus-based gene therapy. Bout et al., Human Gene Therapy 5:3-10 (1994) demonstrated the use of adenovirus vectors to transfer genes to the respiratory epithelia of rhesus monkeys. Other instances of the use of adenoviruses in gene therapy can be found in Rosenfeld et al., Science 252:431-434 (1991); Rosenfeld et al., Cell 68:143-155 (1992); Mastrangeli et al., J. Clin. Invest. 91:225-234 (1993); PCT Publication WO94/12649; and Wang, et al., Gene Therapy 2:775-783 (1995). In a preferred embodiment, adenovirus vectors are used.

[0449] Adeno-associated virus (AAV) has also been proposed for use in gene therapy (Walsh et al., Proc. Soc. Exp. Biol. Med. 204:289-300 (1993); U.S. Pat. No. 5,436,146).

[0450] Another approach to gene therapy involves transferring a gene to cells in tissue culture by such methods as electroporation, lipofection, calcium phosphate mediated transfection, or viral infection. Usually, the method of transfer includes the transfer of a selectable marker to the cells. The cells are then placed under selection to isolate those cells that have taken up and are expressing the transferred gene. Those cells are then delivered to a patient.

[0451] In this embodiment, the nucleic acid is introduced into a cell prior to administration in vivo of the resulting recombinant cell. Such introduction can be carried out by any method known in the art, including but not limited to transfection, electroporation, microinjection, infection with a viral or bacteriophage vector containing the nucleic acid sequences, cell fusion, chromosome-mediated gene transfer, microcell-mediated gene transfer, spheroplast fusion, etc. Numerous techniques are known in the art for the introduction of foreign genes into cells (see, e.g., Loeffler and Behr, Meth. Enzymol. 217:599-618 (1993); Cohen et al., Meth. Enzymol. 217:618-644 (1993); Cline, Pharmac. Ther. 29:69-92m (1985) and may be used in accordance with the present invention, provided that the necessary developmental and physiological functions of the recipient cells are not disrupted. The technique should provide for the stable transfer of the nucleic acid to the cell, so that the nucleic acid is expressible by the cell and preferably heritable and expressible by its cell progeny.

[0452] The resulting recombinant cells can be delivered to a patient by various methods known in the art. Recombinant blood cells (e.g., hematopoietic stem or progenitor cells) are preferably administered intravenously. The amount of cells envisioned for use depends on the desired effect, patient state, etc., and can be determined by one skilled in the art.

[0453] Cells into which a nucleic acid can be introduced for purposes of gene therapy encompass any desired, available cell type, and include but are not limited to epithelial cells, endothelial cells, keratinocytes, fibroblasts, muscle cells, hepatocytes; blood cells such as T lymphocytes, B lymphocytes, monocytes, macrophages, neutrophils, eosinophils, megakaryocytes, granulocytes; various stem or progenitor cells, in particular hematopoietic stem or progenitor cells, e.g., as obtained from bone marrow, umbilical cord blood, peripheral blood, fetal liver, etc.

[0454] In a preferred embodiment, the cell used for gene therapy is autologous to the patient.

[0455] In an embodiment in which recombinant cells are used in gene therapy, nucleic acid sequences encoding an antibody are introduced into the cells such that they are expressible by the cells or their progeny, and the recombinant cells are then administered in vivo for therapeutic effect. In a specific embodiment, stem or progenitor cells are used. Any stem and/or progenitor cells which can be isolated and maintained in vitro can potentially be used in accordance with this embodiment of the present invention (see e.g. PCT Publication WO 94/08598; Stemple and Anderson, Cell 71:973-985 (1992); Rheinwald, Meth. Cell Bio. 21A:229 (1980); and Pittelkow and Scott, Mayo Clinic Proc. 61:771 (1986)).

[0456] In a specific embodiment, the nucleic acid to be introduced for purposes of gene therapy comprises an inducible promoter operably linked to the coding region, such that expression of the nucleic acid is controllable by the presence or absence of an appropriate inducer of transcription.

Demonstration of Therapeutic or Prophylactic Activity

[0457] The compounds or pharmaceutical compositions of the invention are preferably tested in vitro, and then in vivo for the desired therapeutic or prophylactic activity, prior to use in humans. For example, in vitro assays to demonstrate the therapeutic or prophylactic utility of a compound or pharmaceutical composition include, the effect of a compound on a cell line or a patient tissue sample. The effect of the compound or composition on the cell line and/or tissue sample can be determined utilizing techniques known to those of skill in the art including, but not limited to, rosette formation assays and cell lysis assays. In accordance with the invention, in vitro assays which can be used to determine whether administration of a specific compound is indicated, include in vitro cell culture assays in which a patient tissue sample is grown in culture, and exposed to or otherwise administered a compound, and the effect of such compound upon the tissue sample is observed.

Therapeutic/Prophylactic Administration and Composition

[0458] The invention provides methods of treatment, inhibition and prophylaxis by administration to a subject of an effective amount of a compound or pharmaceutical composition of the invention, preferably a polypeptide or antibody of the invention. In a preferred embodiment, the compound is substantially purified (e.g., substantially free from substances that limit its effect or produce undesired side-effects). The subject is preferably an animal, including but not limited to animals such as cows, pigs, horses, chickens, cats, dogs, etc., and is preferably a mammal, and most preferably human.

[0459] Formulations and methods of administration that can be employed when the compound comprises a nucleic acid or an immunoglobulin are described above; additional appropriate formulations and routes of administration can be selected from among those described herein below.

[0460] Various delivery systems are known and can be used to administer a compound of the invention, e.g., encapsulation in liposomes, microparticles, microcapsules, recombinant cells capable of expressing the compound, receptor-mediated endocytosis (see, e.g., Wu and Wu, J. Biol. Chem. 262:4429-4432 (1987)), construction of a nucleic acid as part of a retroviral or other vector, etc. Methods of introduction include but are not limited to intradermal, intramuscular, intraperitoneal, intravenous, subcutaneous, intranasal, epidural, and oral routes. The compounds or compositions may be administered by any convenient route, for example by infusion or bolus injection, by absorption through epithelial or mucocutaneous linings (e.g., oral mucosa, rectal and intestinal mucosa, etc.) and may be administered together with other biologically active agents. Administration can be systemic or local. In addition, it may be desirable to introduce the pharmaceutical compounds or compositions of the invention into the central nervous system by any suitable route, including intraventricular and intrathecal injection; intraventricular injection may be facilitated by an intraventricular catheter, for example, attached to a reservoir, such as an Ommaya reservoir. Pulmonary administration can also be employed, e.g., by use of an inhaler or nebulizer, and formulation with an aerosolizing agent.

[0461] In a specific embodiment, it may be desirable to administer the pharmaceutical compounds or compositions of the invention locally to the area in need of treatment; this may be achieved by, for example, and not by way of limitation, local infusion during surgery, topical application, e.g., in conjunction with a wound dressing after surgery, by injection, by means of a catheter, by means of a suppository, or by means of an implant, said implant being of a porous, non-porous, or gelatinous material, including membranes, such as sialastic membranes, or fibers. Preferably, when administering a protein, including an antibody, of the invention, care must be taken to use materials to which the protein does not absorb.

[0462] In another embodiment, the compound or composition can be delivered in a vesicle, in particular a liposome (see Langer, Science 249:1527-1533 (1990); Treat et al., in Liposomes in the Therapy of Infectious Disease and Cancer, Lopez-Berestein and Fidler (eds.), Liss, New York, pp. 353-365 (1989); Lopez-Berestein, ibid., pp. 317-327; see generally ibid.)

[0463] In yet another embodiment, the compound or composition can be delivered in a controlled release system. In one embodiment, a pump may be used (see Langer, supra; Sefton, CRC Crit. Ref. Biomed. Eng. 14:201 (1987); Buchwald et al., Surgery 88:507 (1980); Saudek et al., N. Engl. J. Med. 321:574 (1989)). In another embodiment, polymeric materials can be used (see Medical Applications of Controlled Release, Langer and Wise (eds.), CRC Pres., Boca Raton, Fla. (1974); Controlled Drug Bioavailability, Drug Product Design and Performance, Smolen and Ball (eds.), Wiley, New York (1984); Ranger and Peppas, J., Macromol. Sci. Rev. Macromol. Chem. 23:61 (1983); see also Levy et al., Science 228:190 (1985); During et al., Ann. Neurol. 25:351 (1989); Howard et al., J. Neurosurg. 71:105 (1989)). In yet another embodiment, a controlled release system can be placed in proximity of the therapeutic target, e.g., the brain, thus requiring only a fraction of the systemic dose (see, e.g., Goodson, in Medical Applications of Controlled Release, supra, vol. 2, pp. 115-138 (1984)).

[0464] Other controlled release systems are discussed in the review by Langer (Science 249:1527-1533 (1990)).

[0465] In a specific embodiment where the compound of the invention is a nucleic acid encoding a protein, the nucleic acid can be administered in vivo to promote expression of its encoded protein, by constructing it as part of an appropriate nucleic acid expression vector and administering it so that it becomes intracellular, e.g., by use of a retroviral vector (see U.S. Pat. No. 4,980,286), or by direct injection, or by use of microparticle bombardment (e.g., a gene gun; Biolistic, Dupont), or coating with lipids or cell-surface receptors or transfecting agents, or by administering it in linkage to a homeobox-like peptide which is known to enter the nucleus (see e.g., Joliot et al., Proc. Natl. Acad. Sci. USA 88:1864-1868 (1991)), etc. Alternatively, a nucleic acid can be introduced intracellularly and incorporated within host cell DNA for expression, by homologous recombination.

[0466] The present invention also provides pharmaceutical compositions. Such compositions comprise a therapeutically effective amount of a compound, and a pharmaceutically acceptable carrier. In a specific embodiment, the term “pharmaceutically acceptable” means approved by a regulatory agency of the Federal or a state government or listed in the U.S. Pharmacopeia or other generally recognized pharmacopeia for use in animals, and more particularly in humans. The term “carrier” refers to a diluent, adjuvant, excipient, or vehicle with which the therapeutic is administered. Such pharmaceutical carriers can be sterile liquids, such as water and oils, including those of petroleum, animal, vegetable or synthetic origin, such as peanut oil, soybean oil, mineral oil, sesame oil and the like. Water is a preferred carrier when the pharmaceutical composition is administered intravenously. Saline solutions and aqueous dextrose and glycerol solutions can also be employed as liquid carriers, particularly for injectable solutions. Suitable pharmaceutical excipients include starch, glucose, lactose, sucrose, gelatin, malt, rice, flour, chalk, silica gel, sodium stearate, glycerol monostearate, talc, sodium chloride, dried skim milk, glycerol, propylene, glycol, water, ethanol and the like. The composition, if desired, can also contain minor amounts of wetting or emulsifying agents, or pH buffering agents. These compositions can take the form of solutions, suspensions, emulsion, tablets, pills, capsules, powders, sustained-release formulations and the like. The composition can be formulated as a suppository, with traditional binders and carriers such as triglycerides. Oral formulation can include standard carriers such as pharmaceutical grades of mannitol, lactose, starch, magnesium stearate, sodium saccharine, cellulose, magnesium carbonate, etc. Examples, of suitable pharmaceutical carriers are described in “Remington's Pharmaceutical Sciences” by E. W. Martin. Such compositions will contain a therapeutically effective amount of the compound, preferably in purified form, together with a suitable amount of carrier so as to provide the form for proper administration to the patient. The formulation should suit the mode of administration.

[0467] In a preferred embodiment, the composition is formulated in accordance with routine procedures as a pharmaceutical composition adapted for intravenous administration to human beings. Typically, compositions for intravenous administration are solutions in sterile isotonic aqueous buffer. Where necessary, the composition may also include a solubilizing agent and a local anesthetic such as lignocaine to ease pain at the site of the injection. Generally, the ingredients are supplied either separately or mixed together in unit dosage form, for example, as a dry lyophilized powder or water free concentrate in a hermetically sealed container such as an ampoule or sachette indicating the quantity of active agent. Where the composition is to be administered by infusion, it can be dispensed with an infusion bottle containing sterile pharmaceutical grade water or saline. Where the composition is administered by injection, an ampoule of sterile water for injection or saline can be provided so that the ingredients may be mixed prior to administration.

[0468] The compounds of the invention can be formulated as neutral or salt forms. Pharmaceutically acceptable salts include those formed with anions such as those derived from hydrochloric, phosphoric, acetic, oxalic, tartaric acids, etc., and those formed with cations such as those derived from sodium, potassium, ammonium, calcium, ferric hydroxides, isopropylamine, triethylamine, 2-ethylamino ethanol, histidine, procaine, etc.

[0469] The amount of the compound of the invention which will be effective in the treatment, inhibition and prevention of a disease or disorder associated with aberrant expression and/or activity of a polypeptide of the invention can be determined by standard clinical techniques. In addition, in vitro assays may optionally be employed to help identify optimal dosage ranges. The precise dose to be employed in the formulation will also depend on the route of administration, and the seriousness of the disease or disorder, and should be decided according to the judgment of the practitioner and each patient's circumstances. Effective doses may be extrapolated from dose-response curves derived from in vitro or animal model test systems.

[0470] For antibodies, the dosage administered to a patient is typically 0.1 mg/kg to 100 mg/kg of the patient's body weight. Preferably, the dosage administered to a patient is between 0.1 mg/kg and 20 mg/kg of the patient's body weight, more preferably 1 mg/kg to 10 mg/kg of the patient's body weight. Generally, human antibodies have a longer half-life within the human body than antibodies from other species due to the immune response to the foreign polypeptides. Thus, lower dosages of human antibodies and less frequent administration is often possible. Further, the dosage and frequency of administration of antibodies of the invention may be reduced by enhancing uptake and tissue penetration (e.g., into the brain) of the antibodies by modifications such as, for example, lipidation.

[0471] The invention also provides a pharmaceutical pack or kit comprising one or more containers filled with one or more of the ingredients of the pharmaceutical compositions of the invention. Optionally associated with such container(s) can be a notice in the form prescribed by a governmental agency regulating the manufacture, use or sale of pharmaceuticals or biological products, which notice reflects approval by the agency of manufacture, use or sale for human administration.

Diagnosis and Imaging

[0472] Labeled antibodies, and derivatives and analogs thereof, which specifically bind to a polypeptide of interest can be used for diagnostic purposes to detect, diagnose, or monitor diseases, disorders, and/or conditions associated with the aberrant expression and/or activity of a polypeptide of the invention. The invention provides for the detection of aberrant expression of a polypeptide of interest, comprising (a) assaying the expression of the polypeptide of interest in cells or body fluid of an individual using one or more antibodies specific to the polypeptide interest and (b) comparing the level of gene expression with a standard gene expression level, whereby an increase or decrease in the assayed polypeptide gene expression level compared to the standard expression level is indicative of aberrant expression.

[0473] The invention provides a diagnostic assay for diagnosing a disorder, comprising (a) assaying the expression of the polypeptide of interest in cells or body fluid of an individual using one or more antibodies specific to the polypeptide interest and (b) comparing the level of gene expression with a standard gene expression level, whereby an increase or decrease in the assayed polypeptide gene expression level compared to the standard expression level is indicative of a particular disorder. With respect to cancer, the presence of a relatively high amount of transcript in biopsied tissue from an individual may indicate a predisposition for the development of the disease, or may provide a means for detecting the disease prior to the appearance of actual clinical symptoms. A more definitive diagnosis of this type may allow health professionals to employ preventative measures or aggressive treatment earlier thereby preventing the development or further progression of the cancer.

[0474] Antibodies of the invention can be used to assay protein levels in a biological sample using classical immunohistological methods known to those of skill in the art (e.g., see Jalkanen et al., J. Cell. Biol. 101:976-985 (1985); Jalkanen et al., J. Cell. Biol. 105:3087-3096 (1987)). Other antibody-based methods useful for detecting protein gene expression include immunoassays, such as the enzyme linked immunosorbent assay (ELISA) and the radioimmunoassay (RIA). Suitable antibody assay labels are known in the art and include enzyme labels, such as, glucose oxidase; radioisotopes, such as iodine (125I, 121I), carbon (14C), sulfur (35S), tritium (3H), indium (112In), and technetium (99Tc); luminescent labels, such as luminol; and fluorescent labels, such as fluorescein and rhodamine, and biotin.

[0475] One facet of the invention is the detection and diagnosis of a disease or disorder associated with aberrant expression of a polypeptide of interest in an animal, preferably a mammal and most preferably a human. In one embodiment, diagnosis comprises: a) administering (for example, parenterally, subcutaneously, or intraperitoneally) to a subject an effective amount of a labeled molecule which specifically binds to the polypeptide of interest; b) waiting for a time interval following the administering for permitting the labeled molecule to preferentially concentrate at sites in the subject where the polypeptide is expressed (and for unbound labeled molecule to be cleared to background level); c) determining background level; and d) detecting the labeled molecule in the subject, such that detection of labeled molecule above the background level indicates that the subject has a particular disease or disorder associated with aberrant expression of the polypeptide of interest. Background level can be determined by various methods including, comparing the amount of labeled molecule detected to a standard value previously determined for a particular system.

[0476] It will be understood in the art that the size of the subject and the imaging system used will determine the quantity of imaging moiety needed to produce diagnostic images. In the case of a radioisotope moiety, for a human subject, the quantity of radioactivity injected will normally range from about 5 to 20 millicuries of 99 mTc. The labeled antibody or antibody fragment will then preferentially accumulate at the location of cells which contain the specific protein. In vivo tumor imaging is described in S. W. Burchiel et al., “Immunopharmacokinetics of Radiolabeled Antibodies and Their Fragments.” (Chapter 13 in Tumor Imaging: The Radiochemical Detection of Cancer, S. W. Burchiel and B. A. Rhodes, eds., Masson Publishing Inc. (1982)).

[0477] Depending on several variables, including the type of label used and the mode of administration, the time interval following the administration for permitting the labeled molecule to preferentially concentrate at sites in the subject and for unbound labeled molecule to be cleared to background level is 6 to 48 hours or 6 to 24 hours or 6 to 12 hours. In another embodiment the time interval following administration is 5 to 20 days or 5 to 10 days.

[0478] In an embodiment, monitoring of the disease or disorder is carried out by repeating the method for diagnosing the disease or disease, for example, one month after initial diagnosis, six months after initial diagnosis, one year after initial diagnosis, etc.

[0479] Presence of the labeled molecule can be detected in the patient using methods known in the art for in vivo scanning. These methods depend upon the type of label used. Skilled artisans will be able to determine the appropriate method for detecting a particular label. Methods and devices that may be used in the diagnostic methods of the invention include, but are not limited to, computed tomography (CT), whole body scan such as position emission tomography (PET), magnetic resonance imaging (MRI), and sonography.

[0480] In a specific embodiment, the molecule is labeled with a radioisotope and is detected in the patient using a radiation responsive surgical instrument (Thurston et al., U.S. Pat. No. 5,441,050). In another embodiment, the molecule is labeled with a fluorescent compound and is detected in the patient using a fluorescence responsive scanning instrument. In another embodiment, the molecule is labeled with a positron emitting metal and is detected in the patent using positron emission-tomography. In yet another embodiment, the molecule is labeled with a paramagnetic label and is detected in a patient using magnetic resonance imaging (MRI).

Kits

[0481] The present invention provides kits that can be used in the above methods. In one embodiment, a kit comprises an antibody of the invention, preferably a purified antibody, in one or more containers. In a specific embodiment, the kits of the present invention contain a substantially isolated polypeptide comprising an epitope which is specifically immunoreactive with an antibody included in the kit. Preferably, the kits of the present invention further comprise a control antibody which does not react with the polypeptide of interest. In another specific embodiment, the kits of the present invention contain a means for detecting the binding of an antibody to a polypeptide of interest (e.g., the antibody may be conjugated to a detectable substrate such as a fluorescent compound, an enzymatic substrate, a radioactive compound or a luminescent compound, or a second antibody which recognizes the first antibody may be conjugated to a detectable substrate).

[0482] In another specific embodiment of the present invention, the kit is a diagnostic kit for use in screening serum containing antibodies specific against proliferative and/or cancerous polynucleotides and polypeptides. Such a kit may include a control antibody that does not react with the polypeptide of interest. Such a kit may include a substantially isolated polypeptide antigen comprising an epitope which is specifically immunoreactive with at least one anti-polypeptide antigen antibody: Further, such a kit includes means for detecting the binding of said antibody to the antigen (e.g., the antibody may be conjugated to a fluorescent compound such as fluorescein or rhodamine which can be detected by flow cytometry). In specific embodiments, the kit may include a recombinantly produced or chemically synthesized polypeptide antigen. The polypeptide antigen of the kit may also be attached to a solid support.

[0483] In a more specific embodiment the detecting means of the above-described kit includes a solid support to which said polypeptide antigen is attached. Such a kit may also include a non-attached reporter-labeled anti-human antibody. In this embodiment, binding of the antibody to the polypeptide antigen can be detected by binding of the said reporter-labeled antibody.

[0484] In an additional embodiment, the invention includes a diagnostic kit for use in screening serum containing antigens of the polypeptide of the invention. The diagnostic kit includes a substantially isolated antibody specifically immunoreactive with polypeptide or polynucleotide antigens, and means for detecting the binding of the polynucleotide or polypeptide antigen to the antibody. In one embodiment, the antibody is attached to a solid support. In a specific embodiment, the antibody may be a monoclonal antibody. The detecting means of the kit may include a second, labeled monoclonal antibody. Alternatively, or in addition, the detecting means may include a labeled, competing antigen.

[0485] In one diagnostic configuration, test serum is reacted with a solid phase reagent having a surface-bound antigen obtained by the methods of the present invention. After binding with specific antigen antibody to the reagent and removing unbound serum components by washing, the reagent is reacted with reporter-labeled anti-human antibody to bind reporter to the reagent in proportion to the amount of bound anti-antigen antibody on the solid support. The reagent is again washed to remove unbound labeled antibody, and the amount of reporter associated with the reagent is determined. Typically, the reporter is an enzyme which is detected by incubating the solid phase in the presence of a suitable fluorometric, luminescent or colorimetric substrate (Sigma, St. Louis, Mo.).

[0486] The solid surface reagent in the above assay is prepared by known techniques for attaching protein material to solid support material, such as polymeric beads, dip sticks, 96-well plate or filter material. These attachment methods generally include non-specific adsorption of the protein to the support or covalent attachment of the protein, typically through a free amine group, to a chemically reactive group on the solid support, such as an activated carboxyl, hydroxyl, or aldehyde group. Alternatively, streptavidin coated plates can be used in conjunction with biotinylated antigen(s).

[0487] Thus, the invention provides an assay system or kit for carrying out this diagnostic method. The kit generally includes a support with surface-bound recombinant antigens, and a reporter-labeled anti-human antibody for detecting surface-bound anti-antigen antibody.

Uses of the Polynucleotides

[0488] Each of the polynucleotides identified herein can be used in numerous ways as reagents. The following description should be considered exemplary and utilizes known techniques.

[0489] The polynucleotides of the present invention are useful for chromosome identification. There exists an ongoing need to identify new chromosome markers, since few chromosome marking reagents, based on actual sequence data (repeat polymorphisms), are presently available. Each sequence is specifically targeted to and can hybridize with a particular location on an individual human chromosome, thus each polynucleotide of the present invention can routinely be used as a chromosome marker using techniques known in the art. Table 1B.1, column 8 provides the chromosome location of some of the polynucleotides of the invention.

[0490] Briefly, sequences can be mapped to chromosomes by preparing PCR primers (preferably at least 15 bp (e.g., 15-25 bp) from the sequences shown in SEQ ID NO:X. Primers can optionally be selected using computer analysis so that primers do not span more than one predicted exon in the genomic DNA. These primers are then used for PCR screening of somatic cell hybrids containing individual human chromosomes. Only those hybrids containing the human gene corresponding to SEQ ID NO:X will yield an amplified fragment.

[0491] Similarly, somatic hybrids provide a rapid method of PCR mapping the polynucleotides to particular chromosomes. Three or more clones can be assigned per day using a single thermal cycler. Moreover, sublocalization of the polynucleotides can be achieved with panels of specific chromosome fragments. Other gene mapping strategies that can be used include in situ hybridization, prescreening with labeled flow-sorted chromosomes, preselection by hybridization to construct chromosome specific-cDNA libraries, and computer mapping techniques (See, e.g., Shuler, Trends Biotechnol 16:456-459 (1998) which is hereby incorporated by reference in its entirety).

[0492] Precise chromosomal location of the polynucleotides can also be achieved using fluorescence in situ hybridization (FISH) of a metaphase chromosomal spread. This technique uses polynucleotides as short as 500 or 600 bases; however, polynucleotides 2,000 bp are preferred. For a review of this technique, see Verma et al., “Human Chromosomes: a Manual of Basic Techniques,” Pergamon Press, New York (1988).

[0493] For chromosome mapping, the polynucleotides can be used individually (to mark a single chromosome or a single site on that chromosome) or in panels (for marking multiple sites and/or multiple chromosomes).

[0494] Thus, the present invention also provides a method for chromosomal localization which involves (a) preparing PCR primers from the polynucleotide sequences in Table 1B and/or Table 2 and SEQ ID NO:X and (b) screening somatic cell hybrids containing individual chromosomes.

[0495] The polynucleotides of the present invention would likewise be useful for radiation hybrid mapping, HAPPY mapping, and long range restriction mapping. For a review of these techniques and others known in the art, see, e.g. Dear, “Genome Mapping: A Practical Approach,” IRL Press at Oxford University Press, London (1997); Aydin, J. Mol. Med. 77:691-694 (1999); Hacia et al., Mol. Psychiatry 3:483-492 (1998); Herrick et al., Chromosome Res. 7:409-423 (1999); Hamilton et al., Methods Cell Biol. 62:265-280 (2000); and/or Ott, J. Hered. 90:68-70 (1999) each of which is hereby incorporated by reference in its entirety.

[0496] Once a polynucleotide has been mapped to a precise chromosomal location, the physical position of the polynucleotide can be used in linkage analysis. Linkage analysis establishes coinheritance between a chromosomal location and presentation of a particular disease. (Disease mapping data are found, for example, in V. McKusick, Mendelian Inheritance in Man (available on line through Johns Hopkins University Welch Medical Library)). Column 9 of Table 1B.1 provides an OMIM reference identification number of diseases associated with the cytologic band disclosed in column 8 of Table 1B.1, as determined using techniques described herein and by reference to Table 5. Assuming 1 megabase mapping resolution and one gene per 20 kb, a cDNA precisely localized to a chromosomal region associated with the disease could be one of 50-500 potential causative genes.

[0497] Thus, once coinheritance is established, differences in a polynucleotide of the invention and the corresponding gene between affected and unaffected individuals can be examined. First, visible structural alterations in the chromosomes, such as deletions or translocations, are examined in chromosome spreads or by PCR. If no structural alterations exist, the presence of point mutations are ascertained. Mutations observed in some or all affected individuals, but not in normal individuals, indicates that the mutation may cause the disease. However, complete sequencing of the polypeptide and the corresponding gene from several normal individuals is required to distinguish the mutation from a polymorphism. If a new polymorphism is identified, this polymorphic polypeptide can be used for further linkage analysis.

[0498] Furthermore, increased or decreased expression of the gene in affected individuals as compared to unaffected individuals can be assessed using the polynucleotides of the invention. Any of these alterations (altered expression, chromosomal rearrangement, or mutation) can be used as a diagnostic or prognostic marker. Diagnostic and prognostic methods, kits and reagents encompassed by the present invention are briefly described below and more thoroughly elsewhere herein (see e.g., the sections labeled “Antibodies”, “Diagnostic Assays”, and “Methods for Detecting Diseases”).

[0499] Thus, the invention also provides a diagnostic method useful during diagnosis of a disorder, involving measuring the expression level of polynucleotides of the present invention in cells or body fluid from an individual and comparing the measured gene expression level with a standard level of polynucleotide expression level, whereby an increase or decrease in the gene expression level compared to the standard is indicative of a disorder. Additional non-limiting examples of diagnostic methods encompassed by the present invention are more thoroughly described elsewhere herein (see, e.g., Example 12).

[0500] In still another embodiment, the invention includes a kit for analyzing samples for the presence of proliferative and/or cancerous polynucleotides derived from a test subject. In a general embodiment, the kit includes at least one polynucleotide probe containing a nucleotide sequence that will specifically hybridize with a polynucleotide of the invention and a suitable container. In a specific embodiment, the kit includes two polynucleotide probes defining an internal region of the polynucleotide of the invention, where each probe has one strand containing a 31′mer-end internal to the region. In a further embodiment, the probes may be useful as primers for polymerase chain reaction amplification.

[0501] Where a diagnosis of a related disorder, including, for example, diagnosis of a tumor, has already been made according to conventional methods, the present invention is useful as a prognostic indicator, whereby patients exhibiting enhanced or depressed polynucleotide of the invention expression will experience a worse clinical outcome relative to patients expressing the gene at a level nearer the standard level.

[0502] By “measuring the expression level of polynucleotides of the invention” is intended qualitatively or quantitatively measuring or estimating the level of the polypeptide of the invention or the level of the mRNA encoding the polypeptide of the invention in a first biological sample either directly (e.g., by determining or estimating absolute protein level or mRNA level) or relatively (e.g., by comparing to the polypeptide level or mRNA level in a second biological sample). Preferably, the polypeptide level or mRNA level in the first biological sample is measured or estimated and compared to a standard polypeptide level or mRNA level, the standard being taken from a second biological sample obtained from an individual not having the related disorder or being determined by averaging levels from a population of individuals not having a related disorder. As will be appreciated in the art, once a standard polypeptide level or mRNA level is known, it can be used repeatedly as a standard for comparison.

[0503] By “biological sample” is intended any biological sample obtained from an individual, body fluid, cell line, tissue culture, or other source which contains polypeptide of the present invention or the corresponding mRNA. As indicated, biological samples include body fluids (such as semen, lymph, vaginal pool, sera, plasma, urine, synovial fluid and spinal fluid) which contain the polypeptide of the present invention, and tissue sources found to express the polypeptide of the present invention. Methods for obtaining tissue biopsies and body fluids from mammals are well known in the art. Where the biological sample is to include mRNA, a tissue biopsy is the preferred source.

[0504] The method(s) provided above may preferably be applied in a diagnostic method and/or kits in which polynucleotides and/or polypeptides of the invention are attached to a solid support. In one exemplary method, the support may be a “gene chip” or a “biological chip” as described in U.S. Pat. Nos. 5,837,832, 5,874,219, and 5,856,174. Further, such a gene chip with polynucleotides of the invention attached may be used to identify polymorphisms between the isolated polynucleotide sequences of the invention, with polynucleotides isolated from a test subject. The knowledge of such polymorphisms (i.e. their location, as well as, their existence) would be beneficial in identifying disease loci for many disorders, such as for example, in neural disorders, immune system disorders, muscular disorders, reproductive disorders, gastrointestinal disorders, pulmonary disorders, digestive disorders, metabolic disorders, cardiovascular disorders, renal disorders, proliferative disorders, and/or cancerous diseases and conditions. Such a method is described in U.S. Pat. Nos. 5,858,659 and 5,856,104. The US patents referenced supra are hereby incorporated by reference in their entirety herein.

[0505] The present invention encompasses polynucleotides of the present invention that are chemically synthesized, or reproduced as peptide nucleic acids (PNA), or according to other methods known in the art. The use of PNAs would serve as the preferred form if the polynucleotides of the invention are incorporated onto a solid support, or gene chip. For the purposes of the present invention, a peptide nucleic acid (PNA) is a polyamide type of DNA analog and the monomeric units for adenine, guanine, thymine and cytosine are available commercially (Perceptive Biosystems). Certain components of DNA, such as phosphorus, phosphorus oxides, or deoxyribose derivatives, are not present in PNAs. As disclosed by Nielsen et al., Science 254, 1497 (1991); and Egholm et al., Nature 365, 666 (1993), PNAs bind specifically and tightly to complementary DNA strands and are not degraded by nucleases. In fact, PNA binds more strongly to DNA than DNA itself does. This is probably because there is no electrostatic repulsion between the two strands, and also the polyamide backbone is more flexible. Because of this, PNA/DNA duplexes bind under a wider range of stringency conditions than DNA/DNA duplexes, making it easier to perform multiplex hybridization. Smaller probes can be used than with DNA due to the strong binding. In addition, it is more likely that single base mismatches can be determined with PNA/DNA hybridization because a single mismatch in a PNA/DNA 15-mer lowers the melting point (T.sub.m) by 8°-20° C., vs. 4°-16° C. for the DNA/DNA 15-mer duplex. Also, the absence of charge groups in PNA means that hybridization can be done at low ionic strengths and reduce possible interference by salt during the analysis.

[0506] The compounds of the present invention have uses which include, but are not limited to, detecting cancer in mammals. In particular the invention is useful during diagnosis of pathological cell proliferative neoplasias which include, but are not limited to: acute myelogenous leukemias including acute monocytic leukemia, acute myeloblastic leukemia, acute promyelocytic leukemia, acute myelomonocytic leukemia, acute erythroleukemia, acute megakaryocytic leukemia, and acute undifferentiated leukemia, etc.; and chronic myelogenous leukemias including chronic myelomonocytic leukemia, chronic granulocytic leukemia, etc. Preferred mammals include monkeys, apes, cats, dogs, cows, pigs, horses, rabbits and humans. Particularly preferred are humans.

[0507] Pathological cell proliferative disorders are often associated with inappropriate activation of proto-oncogenes. (Gelmann, E. P. et al., “The Etiology of Acute Leukemia: Molecular Genetics and Viral Oncology,” in Neoplastic Diseases of the Blood, Vol 1., Wiernik, P. H. et al. eds., 161-182 (1985)). Neoplasias are now believed to result from the qualitative alteration of a normal cellular gene product, or from the quantitative modification of gene expression by insertion into the chromosome of a viral sequence, by chromosomal translocation of a gene to a more actively transcribed region, or by some other mechanism. (Gelmann et al., supra) It is likely that mutated or altered expression of specific genes is involved in the pathogenesis of some leukemias, among other tissues and cell types. (Gelmann et al., supra) Indeed, the human counterparts of the oncogenes involved in some animal neoplasias have been amplified or translocated in some cases of human leukemia and carcinoma. (Gelmann et al., supra)

[0508] For example, c-myc expression is highly amplified in the non-lymphocytic leukemia cell line HL-60. When HL-60 cells are chemically induced to stop proliferation, the level of c-myc is found to be downregulated. (International Publication Number WO 91/15580). However, it has been shown that exposure of HL-60 cells to a DNA construct that is complementary to the 5′ end of c-myc or c-myb blocks translation of the corresponding mRNAs which downregulates expression of the c-myc or c-myb proteins and causes arrest of cell proliferation and differentiation of the treated cells. (International Publication Number WO 91/15580; Wickstrom et al., Proc. Natl. Acad. Sci. 85:1028 (1988); Anfossi et al., Proc. Natl. Acad. Sci. 86:3379 (1989)). However, the skilled artisan would appreciate the present invention's usefulness is not be limited to treatment, prevention, and/or prognosis of proliferative disorders of cells and tissues of hematopoietic origin, in light of the numerous cells and cell types of varying origins which are known to exhibit proliferative phenotypes.

[0509] In addition to the foregoing, a polynucleotide of the present invention can be used to control gene expression through triple helix formation or through antisense DNA or RNA. Antisense techniques are discussed, for example, in Okano, J. Neurochem. 56: 560 (1991); “Oligodeoxynucleotides as Antisense Inhibitors of Gene Expression, CRC Press, Boca Raton, Fla. (1988). Triple helix formation is discussed in, for instance Lee et al., Nucleic Acids Research 6: 3073 (1979); Cooney et al., Science 241: 456 (1988); and Dervan et al., Science 251: 1360 (1991). Both methods rely on binding of the polynucleotide to a complementary DNA or RNA. For these techniques, preferred polynucleotides are usually oligonucleotides 20 to 40 bases in length and complementary to either the region of the gene involved in transcription (triple helix—see Lee et al., Nucl. Acids Res. 6:3073 (1979); Cooney et al., Science 241:456 (1988); and Dervan et al., Science 251:1360 (1991)) or to the mRNA itself (antisense—Okano, J. Neurochem. 56:560 (1991); Oligodeoxy-nucleotides as Antisense Inhibitors of Gene Expression, CRC Press, Boca Raton, Fla. (1988)). Triple helix formation optimally results in a shut-off of RNA transcription from DNA, while antisense RNA hybridization blocks translation of an mRNA molecule into polypeptide. The oligonucleotide described above can also be delivered to cells such that the antisense RNA or DNA may be expressed in vivo to inhibit production of polypeptide of the present invention antigens. Both techniques are effective in model systems, and the information disclosed herein can be used to design antisense or triple helix polynucleotides in an effort to treat disease, and in particular, for the treatment of proliferative diseases and/or conditions. Non-limiting antisense and triple helix methods encompassed by the present invention are more thoroughly described elsewhere herein (see, e.g., the section labeled “Antisense and Ribozyme (Antagonists)”).

[0510] Polynucleotides of the present invention are also useful in gene therapy. One goal of gene therapy is to insert a normal gene into an organism having a defective gene, in an effort to correct the genetic defect. The polynucleotides disclosed in the present invention offer a means of targeting such genetic defects in a highly accurate manner. Another goal is to insert a new gene that was not present in the host genome, thereby producing a new trait in the host cell. Additional non-limiting examples of gene therapy methods encompassed by the present invention are more thoroughly described elsewhere herein (see, e.g., the sections labeled “Gene Therapy Methods”, and Examples 16, 17 and 18).

[0511] The polynucleotides are also useful for identifying individuals from minute biological samples. The United States military, for example, is considering the use of restriction fragment length polymorphism (RFLP) for identification of its personnel. In this technique, an individual's genomic DNA is digested with one or more restriction enzymes, and probed on a Southern blot to yield unique bands for identifying personnel. This method does not suffer from the current limitations of “Dog Tags” which can be lost, switched, or stolen, making positive identification difficult. The polynucleotides of the present invention can be used as additional DNA markers for RFLP.

[0512] The polynucleotides of the present invention can also be used as an alternative to RFLP, by determining the actual base-by-base DNA sequence of selected portions of an individual's genome. These sequences can be used to prepare PCR primers for amplifying and isolating such selected DNA, which can then be sequenced. Using this technique, individuals can be identified because each individual will have a unique set of DNA sequences. Once an unique ID database is established for an individual, positive identification of that individual, living or dead, can be made from extremely small tissue samples.

[0513] Forensic biology also benefits from using DNA-based identification techniques as disclosed herein. DNA sequences taken from very small biological samples such as tissues, e.g., hair or skin, or body fluids, e.g., blood, saliva, semen, synovial fluid, amniotic fluid, breast milk, lymph, pulmonary sputum or surfactant, urine, fecal matter, etc., can be amplified using PCR. In one prior art technique, gene sequences amplified from polymorphic loci, such as DQa class II HLA gene, are used in forensic biology to identify individuals. (Erlich, H., PCR Technology, Freeman and Co. (1992)). Once these specific polymorphic loci are amplified, they are digested with one or more restriction enzymes, yielding an identifying set of bands on a Southern blot probed with DNA corresponding to the DQa class II HLA gene. Similarly, polynucleotides of the present invention can be used as polymorphic markers for forensic purposes.

[0514] There is also a need for reagents capable of identifying the source of a particular tissue. Such need arises, for example, in forensics when presented with tissue of unknown origin. Appropriate reagents can comprise, for example, DNA probes or primers prepared from the sequences of the present invention, specific to tissues, including but not limited to those shown in Table 1B. Panels of such reagents can identify tissue by species and/or by organ type. In a similar fashion, these reagents can be used to screen tissue cultures for contamination. Additional non-limiting examples of such uses are further described herein.

[0515] The polynucleotides of the present invention are also useful as hybridization probes for differential identification of the tissue(s) or cell type(s) present in a biological sample. Similarly, polypeptides and antibodies directed to polypeptides of the present invention are useful to provide immunological probes for differential identification of the tissue(s) (e.g., immunohistochemistry assays) or cell type(s) (e.g., immunocytochemistry assays). In addition, for a number of disorders of the above tissues or cells, significantly higher or lower levels of gene expression of the polynucleotides/polypeptides of the present invention may be detected in certain tissues (e.g., tissues expressing polypeptides and/or polynucleotides of the present invention, for example, those disclosed in column 5 of Table 1B.2, and/or cancerous and/or wounded tissues) or bodily fluids (e.g., semen, lymph, vaginal pool, serum, plasma, urine, synovial fluid or spinal fluid) taken from an individual having such a disorder, relative to a “standard” gene expression level, i.e., the expression level in healthy tissue from an individual not having the disorder.

[0516] Thus, the invention provides a diagnostic method of a disorder, which involves: (a) assaying gene expression level in cells or body fluid of an individual; (b) comparing the gene expression level with a standard gene expression level, whereby an increase or decrease in the assayed gene expression level compared to the standard expression level is indicative of a disorder.

[0517] In the very least, the polynucleotides of the present invention can be used as molecular weight markers on Southern gels, as diagnostic probes for the presence of a specific mRNA in a particular cell type, as a probe to “subtract-out” known sequences in the process of discovering novel polynucleotides, for selecting and making oligomers for attachment to a “gene chip” or other support, to raise anti-DNA antibodies using DNA immunization techniques, and as an antigen to elicit an immune response.

Uses of the Polypeptides

[0518] Each of the polypeptides identified herein can be used in numerous ways. The following description should be considered exemplary and utilizes known techniques.

[0519] Polypeptides and antibodies directed to polypeptides of the present invention are useful to provide immunological probes for differential identification of the tissue(s) (e.g., immunohistochemistry assays such as, for example, ABC immunoperoxidase (Hsu et al., J. Histochem. Cytochem. 29:577-580 (1981)) or cell type(s) (e.g., immunocytochemistry assays).

[0520] Antibodies can be used to assay levels of polypeptides encoded by polynucleotides of the invention in a biological sample using classical immunohistological methods known to those of skill in the art (e.g., see Jalkanen, et al., J. Cell. Biol. 101:976-985 (1985); Jalkanen, et al., J. Cell. Biol. 105:3087-3096 (1987)). Other antibody-based methods useful for detecting protein gene expression include immunoassays, such as the enzyme linked immunosorbent assay (ELISA) and the radioimmunoassay (RIA). Suitable antibody assay labels are known in the art and include enzyme labels, such as, glucose oxidase; radioisotopes, such as iodine (¹³¹I, ¹²⁵I, ¹²³I, ¹²¹I), carbon (¹⁴C), sulfur (³⁵S), tritium (³H), indium (^{115m}In, ^{113m}In, ¹¹²In, ¹¹¹In), and technetium (⁹⁹Tc, ^{99m}Tc), thallium (²⁰¹Ti), gallium (⁶⁸Ga, ⁶⁷Ga), palladium (¹⁰³Pd), molybdenum (⁹⁹Mo), xenon (¹³³Xe), fluorine (¹⁸F), ¹⁵³Sm, ¹⁷⁷Lu, ¹⁵⁹Gd, ¹⁴⁹Pm, ¹⁴⁰La, ¹⁷⁵Y, ¹⁶⁶Ho, ⁹⁰Y, ⁴⁷Sc, ¹⁸⁶Re, ¹⁸⁸Re, ¹⁴²Pr, ¹⁰⁵Rh, ⁹⁷Ru; luminescent labels, such as luminol; and fluorescent labels, such as fluorescein and rhodamine, and biotin.

[0521] In addition to assaying levels of polypeptide of the present invention in a biological sample, proteins can also be detected in vivo by imaging. Antibody labels or markers for in vivo imaging of protein include those detectable by X-radiography, NMR or ESR. For X-radiography, suitable labels include radioisotopes such as barium or cesium, which emit detectable radiation but are not overtly harmful to the subject. Suitable markers for NMR and ESR include those with a detectable characteristic spin, such as deuterium, which may be incorporated into the antibody by labeling of nutrients for the relevant hybridoma.

[0522] A protein-specific antibody or antibody fragment which has been labeled with an appropriate detectable imaging moiety, such as a radioisotope (for example, ¹³¹I, ¹¹²In, ^{99m}Tc, (¹³¹I, ¹²⁵I, ¹²³I, ¹²¹I), carbon (¹⁴C), sulfur (³⁵S), tritium (³H), indium (^{115m}In, ¹¹³In, ¹¹²In, ¹¹¹In), and technetium (⁹⁹Tc, ^{99m}Tc), thallium (²⁰¹Ti), gallium (⁶⁸Ga, ⁶⁷Ga), palladium (¹⁰³Pd), molybdenum (⁹⁹Mo), xenon (¹³³Xe), fluorine (¹⁸F, ¹⁵³Sm, ¹⁷⁷Lu, ¹⁵⁹Gd, ¹⁴⁹Pm, ¹⁴⁰La, ¹⁷⁵Yb, ¹⁶⁶Ho, ⁹⁰Y, ⁴⁷Sc, ¹⁸⁶Re, ¹⁸⁸Re, ¹⁴²Pr, ¹⁰⁵Rh, ⁹⁷Ru), a radio-opaque substance, or a material detectable by nuclear magnetic resonance, is introduced (for example, parenterally, subcutaneously or intraperitoneally) into the mammal to be examined for immune system disorder. It will be understood in the art that the size of the subject and the imaging system used will determine the quantity of imaging moiety needed to produce diagnostic images. In the case of a radioisotope moiety, for a human subject, the quantity of radioactivity injected will normally range from about 5 to 20 millicuries of ^{99m}Tc. The labeled antibody or antibody fragment will then preferentially accumulate at the location of cells which express the polypeptide encoded by a polynucleotide of the invention. In vivo tumor imaging is described in S. W. Burchiel et al., “Immunopharmacokinetics of Radiolabeled Antibodies and Their Fragments” (Chapter 13 in Tumor Imaging: The Radiochemical Detection of Cancer, S. W. Burchiel and B. A. Rhodes, eds., Masson Publishing Inc. (1982)).

[0523] In one embodiment, the invention provides a method for the specific delivery of compositions of the invention to cells by administering polypeptides of the invention (e.g., polypeptides encoded by polynucleotides of the invention and/or antibodies) that are associated with heterologous polypeptides or nucleic acids. In one example, the invention provides a method for delivering a therapeutic protein into the targeted cell. In another example, the invention provides a method for delivering a single stranded nucleic acid (e.g., antisense or ribozymes) or double stranded nucleic acid (e.g., DNA that can integrate into the cell's genome or replicate episomally and that can be transcribed) into the targeted cell.

[0524] In another embodiment, the invention provides a method for the specific destruction of cells (e.g., the destruction of tumor cells) by administering polypeptides of the invention in association with toxins or cytotoxic prodrugs.

[0525] By “toxin” is meant one or more compounds that bind and activate endogenous cytotoxic effector systems, radioisotopes, holotoxins, modified toxins, catalytic subunits of toxins, or any molecules or enzymes not normally present in or on the surface of a cell that under defined conditions cause the cell's death. Toxins that may be used according to the methods of the invention include, but are not limited to, radioisotopes known in the art, compounds such as, for example, antibodies (or complement fixing containing portions thereof) that bind an inherent or induced endogenous cytotoxic effector system, thymidine kinase, endonuclease, RNAse, alpha toxin, ricin, abrin, Pseudomonas exotoxin A, diphtheria toxin, saporin, momordin, gelonin, pokeweed antiviral protein, alpha-sarcin and cholera toxin. “Toxin” also includes a cytostatic or cytocidal agent, a therapeutic agent or a radioactive metal ion, e.g., alpha-emitters such as, for example, ²¹³Bi, or other radioisotopes such as, for example, ¹⁰³Pd, ¹³³Xe, ¹³¹I, ⁶⁸Ge, ⁵⁷Co, ⁶⁵Zn, ⁸⁵Sr, ³²P, ³⁵S, ⁹⁰Y, ¹⁵³Sm, ¹⁵³Gd, ¹⁶⁹Yb, ⁵¹Cr, ⁵⁴Mn, ⁷⁵Se, ¹¹³Sn, ⁹⁰Yttrium, ¹¹⁷Tin, ¹⁸⁶Rhenium, ¹⁶⁶Holmium, and ¹⁸⁸Rhenium; luminescent labels, such as luminol; and fluorescent labels, such as fluorescein and rhodamine, and biotin. In a specific embodiment, the invention provides a method for the specific destruction of cells (e.g., the destruction of tumor cells) by administering polypeptides of the invention or antibodies of the invention in association with the radioisotope ⁹⁰Y. In another specific embodiment, the invention provides a method for the specific destruction of cells (e.g., the destruction of tumor cells) by administering polypeptides of the invention or antibodies of the invention in association with the radioisotope ¹¹¹In. In a further specific embodiment, the invention provides a method for the specific destruction of cells (e.g., the destruction of tumor cells) by administering polypeptides of the invention or antibodies of the invention in association with the radioisotope ¹³¹I.

[0526] Techniques known in the art may be applied to label polypeptides of the invention (including antibodies). Such techniques include, but are not limited to, the use of bifunctional conjugating agents (see e.g., U.S. Pat. Nos. 5,756,065; 5,714,631; 5,696,239; 5,652,361; 5,505,931; 5,489,425; 5,435,990; 5,428,139; 5,342,604; 5,274,119; 4,994,560; and 5,808,003; the contents of each of which are hereby incorporated by reference in its entirety).

[0527] Thus, the invention provides a diagnostic method of a disorder, which involves (a) assaying the expression level of a polypeptide of the present invention in cells or body fluid of an individual; and (b) comparing the assayed polypeptide expression level with a standard polypeptide expression level, whereby an increase or decrease in the assayed polypeptide expression level compared to the standard expression level is indicative of a disorder. With respect to cancer, the presence of a relatively high amount of transcript in biopsied tissue from an individual may indicate a predisposition for the development of the disease, or may provide a means for detecting the disease prior to the appearance of actual clinical symptoms. A more definitive diagnosis of this type may allow health professionals to employ preventative measures or aggressive treatment earlier thereby preventing the development or further progression of the cancer.

[0528] Moreover, polypeptides of the present invention can be used to treat or prevent diseases or conditions such as, for example, neural disorders, immune system disorders, muscular disorders, reproductive disorders, gastrointestinal disorders, pulmonary disorders, cardiovascular disorders, renal disorders, proliferative disorders, and/or cancerous diseases and conditions. For example, patients can be administered a polypeptide of the present invention in an effort to replace absent or decreased levels of the polypeptide (e.g., insulin), to supplement absent or decreased levels of a different polypeptide (e.g., hemoglobin S for hemoglobin B, SOD, catalase, DNA repair proteins), to inhibit the activity of a polypeptide (e.g., an oncogene or tumor supressor), to activate the activity of a polypeptide (e.g., by binding to a receptor), to reduce the activity of a membrane bound receptor by competing with it for free ligand (e.g., soluble TNF receptors used in reducing inflammation), or to bring about a desired response (e.g., blood vessel growth inhibition, enhancement of the immune response to proliferative cells or tissues).

[0529] Similarly, antibodies directed to a polypeptide of the present invention can also be used to treat disease (as described supra, and elsewhere herein). For example, administration of an antibody directed to a polypeptide of the present invention can bind, and/or neutralize the polypeptide, and/or reduce overproduction of the polypeptide. Similarly, administration of an antibody can activate the polypeptide, such as by binding to a polypeptide bound to a membrane (receptor).

[0530] At the very least, the polypeptides of the present invention can be used as molecular weight markers on SDS-PAGE gels or on molecular sieve gel filtration columns using methods well known to those of skill in the art. Polypeptides can also be used to raise antibodies, which in turn are used to measure protein expression from a recombinant cell, as a way of assessing transformation of the host cell. Moreover, the polypeptides of the present invention can be used to test the biological activities described herein.

Diagnostic Assays

[0531] The compounds of the present invention are useful for diagnosis, treatment, prevention and/or prognosis of various disorders in mammals, preferably humans. Such disorders include, but are not limited to, those described in the legends for Tables 1D and 1E and as indicated in the “Preferred Indications” columns in Table 1D and Table 1E; and, also as described herein under the section heading “Biological Activities”.

[0532] For a number of disorders, substantially altered (increased or decreased) levels of gene expression can be detected in tissues, cells or bodily fluids (e.g., sera, plasma, urine, semen, synovial fluid or spinal fluid) taken from an individual having such a disorder, relative to a “standard” gene expression level, that is, the expression level in tissues or bodily fluids from an individual not having the disorder. Thus, the invention provides a diagnostic method useful during diagnosis of a disorder, which involves measuring the expression level of the gene encoding the polypeptide in tissues, cells or body fluid from an individual and comparing the measured gene expression level with a standard gene expression level, whereby an increase or decrease in the gene expression level(s) compared to the standard is indicative of a disorder. These diagnostic assays may be performed in vivo or in vitro, such as, for example, on blood samples, biopsy tissue or autopsy tissue.

[0533] The present invention is also useful as a prognostic indicator, whereby patients exhibiting enhanced or depressed gene expression will experience a worse clinical outcome relative to patients expressing the gene at a level nearer the standard level.

[0534] In certain embodiments, a polypeptide of the invention, or polynucleotides, antibodies, agonists, or antagonists corresponding to that polypeptide, may be used to diagnose and/or prognose diseases and/or disorders associated with the tissue(s) in which the polypeptide of the invention is expressed, including one, two, three, four, five, or more tissues disclosed in Table 1B.2, column 5 (Tissue Distribution Library Code).

[0535] By “assaying the expression level of the gene encoding the polypeptide” is intended qualitatively or quantitatively measuring or estimating the level of the polypeptide of the invention or the level of the mRNA encoding the polypeptide of the invention in a first biological sample either directly (e.g., by determining or estimating absolute protein level or mRNA level) or relatively (e.g., by comparing to the polypeptide level or mRNA level in a second biological sample). Preferably, the polypeptide expression level or mRNA level in the first biological sample is measured or estimated and compared to a standard polypeptide level or mRNA level, the standard being taken from a second biological sample obtained from an individual not having the disorder or being determined by averaging levels from a population of individuals not having the disorder. As will be appreciated in the art, once a standard polypeptide level or mRNA level is known, it can be used repeatedly as a standard for comparison.

[0536] By “biological sample” is intended any biological sample obtained from an individual, cell line, tissue culture, or other source containing polypeptides of the invention (including portions thereof) or mRNA. As indicated, biological samples include body fluids (such as sera, plasma, urine, synovial fluid and spinal fluid) and tissue sources found to express the full length or fragments thereof of a polypeptide or mRNA. Methods for obtaining tissue biopsies and body fluids from mammals are well known in the art. Where the biological sample is to include mRNA, a tissue biopsy is the preferred source.

[0537] Total cellular RNA can be isolated from a biological sample using any suitable technique such as the single-step guanidinium-thiocyanate-phenol-chloroform method described in Chomczynski and Sacchi, Anal. Biochem. 162:156-159 (1987). Levels of mRNA encoding the polypeptides of the invention are then assayed using any appropriate method. These include Northern blot analysis, S1 nuclease mapping, the polymerase chain reaction (PCR), reverse transcription in combination with the polymerase chain reaction (RT-PCR), and reverse transcription in combination with the ligase chain reaction (RT-LCR).

[0538] The present invention also relates to diagnostic assays such as quantitative and diagnostic assays for detecting levels of polypeptides of the invention, in a biological sample (e.g., cells and tissues), including determination of normal and abnormal levels of polypeptides. Thus, for instance, a diagnostic assay in accordance with the invention for detecting over-expression of polypeptides of the invention compared to normal control tissue samples may be used to detect the presence of tumors. Assay techniques that can be used to determine levels of a polypeptide, such as a polypeptide of the present invention in a sample derived from a host are well-known to those of skill in the art. Such assay methods include radioimmunoassays, competitive-binding assays, Western Blot analysis and ELISA assays. Assaying polypeptide levels in a biological sample can occur using any art-known method.

[0539] Assaying polypeptide levels in a biological sample can occur using antibody-based techniques. For example, polypeptide expression in tissues can be studied with classical immunohistological methods (Jalkanen et al., J. Cell. Biol. 101:976-985 (1985); Jalkanen, M., et al., J. Cell. Biol. 105:3087-3096 (1987)). Other antibody-based methods useful for detecting polypeptide gene expression include immunoassays, such as the enzyme linked immunosorbent assay (ELISA) and the radioimmunoassay (RIA). Suitable antibody assay labels are known in the art and include enzyme labels, such as, glucose oxidase, and radioisotopes, such as iodine (¹²⁵I, ¹²¹I), carbon (¹⁴C), sulfur (³⁵S), tritium (³H), indium (¹¹²In), and technetium (^{99m}Tc), and fluorescent labels, such as fluorescein and rhodamine, and biotin.

[0540] The tissue or cell type to be analyzed will generally include those which are known, or suspected, to express the gene of inteest (such as, for example, cancer). The protein isolation methods employed herein may, for example, be such as those described in Harlow and Lane (Harlow, E. and Lane, D., 1988, “Antibodies: A Laboratory Manual”, Cold Spring Harbor Laboratory Press, Cold Spring Harbor, N.Y.), which is incorporated herein by reference in its entirety. The isolated cells can be derived from cell culture or from a patient. The analysis of cells taken from culture may be a necessary step in the assessment of cells that could be used as part of a cell-based gene therapy technique or, alternatively, to test the effect of compounds on the expression of the gene.

[0541] For example, antibodies, or fragments of antibodies, such as those described herein, may be used to quantitatively or qualitatively detect the presence of gene products or conserved variants or peptide fragments thereof. This can be accomplished, for example, by immunofluorescence techniques employing a fluorescently labeled antibody coupled with light microscopic, flow cytometric, or fluorimetric detection.

[0542] In a preferred embodiment, antibodies, or fragments of antibodies directed to any one or all of the predicted epitope domains of the polypeptides of the invention (shown in column 7 of Table 1B.1) may be used to quantitatively or qualitatively detect the presence of gene products or conserved variants or peptide fragments thereof. This can be accomplished, for example, by immunofluorescence techniques employing a fluorescently labeled antibody coupled with light microscopic, flow cytometric, or fluorimetric detection.

[0543] In an additional preferred embodiment, antibodies, or fragments of antibodies directed to a conformational epitope of a polypeptide of the invention may be used to quantitatively or qualitatively detect the presence of gene products or conserved variants or peptide fragments thereof. This can be accomplished, for example, by immunofluorescence techniques employing a fluorescently labeled antibody coupled with light microscopic, flow cytometric, or fluorimetric detection.

[0544] The antibodies (or fragments thereof), and/or polypeptides of the present invention may, additionally, be employed histologically, as in immunofluorescence, immunoelectron microscopy or non-immunological assays, for in situ detection of gene products or conserved variants or peptide fragments thereof. In situ detection may be accomplished by removing a histological specimen from a patient, and applying thereto a labeled antibody or polypeptide of the present invention. The antibody (or fragment thereof) or polypeptide is preferably applied by overlaying the labeled antibody (or fragment) onto a biological sample. Through the use of such a procedure, it is possible to determine not only the presence of the gene product, or conserved variants or peptide fragments, or polypeptide binding, but also its distribution in the examined tissue. Using the present invention, those of ordinary skill will readily perceive that any of a wide variety of histological methods (such as staining procedures) can be modified in order to achieve such in situ detection.

[0545] Immunoassays and non-immunoassays for gene products or conserved variants or peptide fragments thereof will typically comprise incubating a sample, such as a biological fluid, a tissue extract, freshly harvested cells, or lysates of cells which have been incubated in cell culture, in the presence of a detectably labeled antibody capable of binding gene products or conserved variants or peptide fragments thereof, and detecting the bound antibody by any of a number of techniques well-known in the art.

[0546] The biological sample may be brought in contact with and immobilized onto a solid phase support or carrier such as nitrocellulose, or other solid support which is capable of immobilizing cells, cell particles or soluble proteins. The support may then be washed with suitable buffers followed by treatment with the detectably labeled antibody or detectable polypeptide of the invention. The solid phase support may then be washed with the buffer a second time to remove unbound antibody or polypeptide. Optionally the antibody is subsequently labeled. The amount of bound label on solid support may then be detected by conventional means.

[0547] By “solid phase support or carrier” is intended any support capable of binding an antigen or an antibody. Well-known supports or carriers include glass, polystyrene, polypropylene, polyethylene, dextran, nylon, amylases, natural and modified celluloses, polyacrylamides, gabbros, and magnetite. The nature of the carrier can be either soluble to some extent or insoluble for the purposes of the present invention. The support material may have virtually any possible structural configuration so long as the coupled molecule is capable of binding to an antigen or antibody. Thus, the support configuration may be spherical, as in a bead, or cylindrical, as in the inside surface of a test tube, or the external surface of a rod. Alternatively, the surface may be flat such as a sheet, test strip, etc. Preferred supports include polystyrene beads. Those skilled in the art will know many other suitable carriers for binding antibody or antigen, or will be able to ascertain the same by use of routine experimentation.

[0548] The binding activity of a given lot of antibody or antigen polypeptide may be determined according to well known methods. Those skilled in the art will be able to determine operative and optimal assay conditions for each determination by employing routine experimentation.

[0549] In addition to assaying polypeptide levels or polynucleotide levels in a biological sample obtained from an individual, polypeptide or polynucleotide can also be detected in vivo by imaging. For example, in one embodiment of the invention, polypeptides and/or antibodies of the invention are used to image diseased cells, such as neoplasms. In another embodiment, polynucleotides of the invention (e.g., polynucleotides complementary to all or a portion of an mRNA) and/or antibodies (e.g., antibodies directed to any one or a combination of the epitopes of a polypeptide of the invention, antibodies directed to a conformational epitope of a polypeptide of the invention, or antibodies directed to the full length polypeptide expressed on the cell surface of a mammalian cell) are used to image diseased or neoplastic cells.

[0550] Antibody labels or markers for in vivo imaging of polypeptides of the invention include those detectable by X-radiography, NMR, MRI, CAT-scans or ESR. For X-radiography, suitable labels include radioisotopes such as barium or cesium, which emit detectable radiation but are not overtly harmful to the subject. Suitable markers for NMR and ESR include those with a detectable characteristic spin, such as deuterium, which may be incorporated into the antibody by labeling of nutrients for the relevant hybridoma. Where in vivo imaging is used to detect enhanced levels of polypeptides for diagnosis in humans, it may be preferable to use human antibodies or “humanized” chimeric monoclonal antibodies. Such antibodies can be produced using techniques described herein or otherwise known in the art. For example methods for producing chimeric antibodies are known in the art. See, for review, Morrison, Science 229:1202 (1985); Oi et al., BioTechniques 4:214 (1986); Cabilly et al., U.S. Pat. No. 4,816,567; Taniguchi et al., EP 171496; Morrison et al., EP 173494; Neuberger et al., WO 8601533; Robinson et al., WO 8702671; Boulianne et al., Nature 312:643 (1984); Neuberger et al., Nature 314:268 (1985).

[0551] Additionally, any polypeptides of the invention whose presence can be detected, can be administered. For example, polypeptides of the invention labeled with a radio-opaque or other appropriate compound can be administered and visualized in vivo, as discussed, above for labeled antibodies. Further, such polypeptides can be utilized for in vitro diagnostic procedures.

[0552] A polypeptide-specific antibody or antibody fragment which has been labeled with an appropriate detectable imaging moiety, such as a radioisotope (for example, ¹³¹I, ¹¹²In, ^{99m}Tc), a radio-opaque substance, or a material detectable by nuclear magnetic resonance, is introduced (for example, parenterally, subcutaneously or intraperitoneally) into the mammal to be examined for a disorder. It will be understood in the art that the size of the subject and the imaging system used will determine the quantity of imaging moiety needed to produce diagnostic images. In the case of a radioisotope moiety, for a human subject, the quantity of radioactivity injected will normally range from about 5 to 20 millicuries of ^{99m}Tc. The labeled antibody or antibody fragment will then preferentially accumulate at the location of cells which contain the antigenic protein. In vivo tumor imaging is described in S. W. Burchiel et al., “Immunopharmacokinetics of Radiolabeled Antibodies and Their Fragments” (Chapter 13 in Tumor Imaging: The Radiochemical Detection of Cancer, S. W. Burchiel and B. A. Rhodes, eds., Masson Publishing Inc. (1982)).

[0553] With respect to antibodies, one of the ways in which an antibody of the present invention can be detectably labeled is by linking the same to a reporter enzyme and using the linked product in an enzyme immunoassay (EIA) (Voller, A., “The Enzyme Linked Immunosorbent Assay (ELISA)”, 1978, Diagnostic Horizons 2:1-7, Microbiological Associates Quarterly Publication, Walkersville, Md.); Voller et al., J. Clin. Pathol. 31:507-520 (1978); Butler, J. E., Meth. Enzymol. 73:482-523 (1981); Maggio, E. (ed.), 1980, Enzyme Immunoassay, CRC Press, Boca Raton, Fla.; Ishikawa, E. et al., (eds.), 1981, Enzyme Immunoassay, Kgaku Shoin, Tokyo). The reporter enzyme which is bound to the antibody will react with an appropriate substrate, preferably a chromogenic substrate, in such a manner as to produce a chemical moiety which can be detected, for example, by spectrophotometric, fluorimetric or by visual means. Reporter enzymes which can be used to detectably label the antibody include, but are not limited to, malate dehydrogenase, staphylococcal nuclease, delta-5-steroid isomerase, yeast alcohol dehydrogenase, alpha-glycerophosphate, dehydrogenase, triose phosphate isomerase, horseradish peroxidase, alkaline phosphatase, asparaginase, glucose oxidase, beta-galactosidase, ribonuclease, urease, catalase, glucose-6-phosphate dehydrogenase, glucoamylase and acetylcholinesterase. Additionally, the detection can be accomplished by colorimetric methods which employ a chromogenic substrate for the reporter enzyme. Detection may also be accomplished by visual comparison of the extent of enzymatic reaction of a substrate in comparison with similarly prepared standards.

[0554] Detection may also be accomplished using any of a variety of other immunoassays. For example, by radioactively labeling the antibodies or antibody fragments, it is possible to detect polypeptides through the use of a radioimmunoassay (RIA) (see, for example, Weintraub, B., Principles of Radioimmunoassays, Seventh Training Course on Radioligand Assay Techniques, The Endocrine Society, March, 1986, which is incorporated by reference herein). The radioactive isotope can be detected by means including, but not limited to, a gamma counter, a scintillation counter, or autoradiography.

[0555] It is also possible to label the antibody with a fluorescent compound. When the fluorescently labeled antibody is exposed to light of the proper wave length, its presence can then be detected due to fluorescence. Among the most commonly used fluorescent labeling compounds are fluorescein isothiocyanate, rhodamine, phycoerythrin, phycocyanin, allophycocyanin, ophthaldehyde and fluorescamine.

[0556] The antibody can also be detectably labeled using fluorescence emitting metals such as ¹⁵²Eu, or others of the lanthanide series. These metals can be attached to the antibody using such metal chelating groups as diethylenetriaminepentacetic acid (DTPA) or ethylenediaminetetraacetic acid (EDTA).

[0557] The antibody also can be detectably labeled by coupling it to a chemiluminescent compound. The presence of the chemiluminescent-tagged antibody is then determined by detecting the presence of luminescence that arises during the course of a chemical reaction. Examples of particularly useful chemiluminescent labeling compounds are luminol, isoluminol, theromatic acridinium ester, imidazole, acridinium salt and oxalate ester.

[0558] Likewise, a bioluminescent compound may be used to label the antibody of the present invention. Bioluminescence is a type of chemiluminescence found in biological systems in, which a catalytic protein increases the efficiency of the chemiluminescent reaction. The presence of a bioluminescent protein is determined by detecting the presence of luminescence. Important bioluminescent compounds for purposes of labeling are luciferin, luciferase and aequorin.

Methods for Detecting Diseases

[0559] In general, a disease may be detected in a patient based on the presence of one or more proteins of the invention and/or polynucleotides encoding such proteins in a biological sample (for example, blood, sera, urine, and/or tumor biopsies) obtained from the patient. In other words, such proteins may be used as markers to indicate the presence or absence of a disease or disorder, including cancer and/or as described elsewhere herein. In addition, such proteins may be useful for the detection of other diseases and cancers. The binding agents provided herein generally permit detection of the level of antigen that binds to the agent in the biological sample. Polynucleotide primers and probes may be used to detect the level of mRNA encoding polypeptides of the invention, which is also indicative of the presence or absence of a disease or disorder, including cancer. In general, polypeptides of the invention should be present at a level that is at least three fold higher in diseased tissue than in normal tissue.

[0560] There are a variety of assay formats known to those of ordinary skill in the art for using a binding agent to detect polypeptide markers in a sample. See, e.g., Harlow and Lane, supra. In general, the presence or absence of a disease in a patient may be determined by (a) contacting a biological sample obtained from a patient with a binding agent; (b) detecting in the sample a level of polypeptide that binds to the binding agent; and (c) comparing the level of polypeptide with a predetermined cut-off value.

[0561] In a preferred embodiment, the assay involves the use of a binding agent(s) immobilized on a solid support to bind to and remove the polypeptide of the invention from the remainder of the sample. The bound polypeptide may then be detected using a detection reagent that contains a reporter group and specifically binds to the binding agent/polypeptide complex. Such detection reagents may comprise, for example, a binding agent that specifically binds to the polypeptide or an antibody or other agent that specifically binds to the binding agent, such as an anti-immunoglobulin, protein G, protein A or a lectin. Alternatively, a competitive assay may be utilized, in which a polypeptide is labeled with a reporter group and allowed to bind to the immobilized binding agent after incubation of the binding agent with the sample. The extent to which components of the sample inhibit the binding of the labeled polypeptide to the binding agent is indicative of the reactivity of the sample with the immobilized binding agent. Suitable polypeptides for use within such assays include polypeptides of the invention and portions thereof, or antibodies, to which the binding agent binds, as described above.

[0562] The solid support may be any material known to those of skill in the art to which polypeptides of the invention may be attached. For example, the solid support may be a test well in a microtiter plate or a nitrocellulose or other suitable membrane. Alternatively, the support may be a bead or disc, such as glass fiberglass, latex or a plastic material such as polystyrene or polyvinylchloride. The support may also be a magnetic particle or a fiber optic sensor, such as those disclosed, for example, in U.S. Pat. No. 5,359,681. The binding agent may be immobilized on the solid support using a variety of techniques known to those of skill in the art, which are amply described in the patent and scientific literature. In the context of the present invention, the term “immobilization” refers to both noncovalent association, such as adsorption, and covalent attachment (which may be a direct linkage between the agent and functional groups on the support or may be a linkage by way of a cross-linking agent). Immobilization by adsorption to a well in a microtiter plate or to a membrane is preferred. In such cases, adsorption may be achieved by contacting the binding agent, in a suitable buffer, with the solid support for the suitable amount of time. The contact time varies with temperature, but is typically between about 1 hour and about 1 day. In general, contacting a well of plastic microtiter plate (such as polystyrene or polyvinylchloride) with an amount of binding agent ranging from about 10 ng to about 10 ug, and preferably about 100 ng to about 1 ug, is sufficient to immobilize an adequate amount of binding agent.

[0563] Covalent attachment of binding agent to a solid support may generally be achieved by first reacting the support with a bifunctional reagent that will react with both the support and a functional group, such as a hydroxyl or amino group, on the binding agent. For example, the binding agent may be covalently attached to supports having an appropriate polymer coating using benzoquinone or by condensation of an aldehyde group on the support with an amine and an active hydrogen on the binding partner (see, e.g., Pierce Immunotechnology Catalog and Handbook, 1991, at A12-A13).

Gene Therapy Methods

[0564] Also encompassed by the invention are gene therapy methods for treating or preventing disorders, diseases and conditions. The gene therapy methods relate to the introduction of nucleic acid (DNA, RNA and antisense DNA or RNA) sequences into an animal to achieve expression of the polypeptide of the present invention. This method requires a polynucleotide which codes for a polypeptide of the present invention operatively linked to a promoter and any other genetic elements necessary for the expression of the polypeptide by the target tissue. Such gene therapy and delivery techniques are known in the art, see, for example, WO90/11092, which is herein incorporated by reference.

[0565] Thus, for example, cells from a patient may be engineered with a polynucleotide (DNA or RNA) comprising a promoter operably linked to a polynucleotide of the present invention ex vivo, with the engineered cells then being provided to a patient to be treated with the polypeptide of the present invention. Such methods are well-known in the art. For example, see Belldegrun, A., et al., J. Natl. Cancer Inst. 85: 207-216 (1993); Ferrantini, M. et al., Cancer Research 53: 1107-1112 (1993); Ferrantini, M. et al., J. Immunology 153: 4604-4615 (1994); Kaido, T., et al., Int. J. Cancer 60: 221-229 (1995); Ogura, H., et al., Cancer Research 50: 5102-5106 (1990); Santodonato, L., et al., Human Gene Therapy 7:1-10 (1996); Santodonato, L., et al., Gene Therapy 4:1246-1255 (1997); and Zhang, J.-F. et al., Cancer Gene Therapy 3: 31-38 (1996)), which are herein incorporated by reference. In one embodiment, the cells which are engineered are arterial cells. The arterial cells may be reintroduced into the patient through direct injection to the artery, the tissues surrounding the artery, or through catheter injection.

[0566] As discussed in more detail below, the polynucleotide constructs can be delivered by any method that delivers injectable materials to the cells of an animal, such as, injection into the interstitial space of tissues (heart, muscle, skin, lung, liver, and the like). The polynucleotide constructs may be delivered in a pharmaceutically acceptable liquid or aqueous carrier.

[0567] In one embodiment, the polynucleotide of the present invention is delivered as a naked polynucleotide. The term “naked” polynucleotide, DNA or RNA refers to sequences that are free from any delivery vehicle that acts to assist, promote or facilitate entry into the cell, including viral sequences, viral particles, liposome formulations, lipofectin or precipitating agents and the like. However, the polynucleotide of the present invention can also be delivered in liposome formulations and lipofectin formulations and the like can be prepared by methods well known to those skilled in the art. Such methods are described, for example, in U.S. Pat. Nos. 5,593,972, 5,589,466, and 5,580,859, which are herein incorporated by reference.

[0568] The polynucleotide vector constructs used in the gene therapy method are preferably constructs that will not integrate into the host genome nor will they contain sequences that allow for replication. Appropriate vectors include pWLNEO, pSV2CAT, pOG44, pXT1 and pSG available from Stratagene; pSVK3, pBPV, pMSG and pSVL available from Pharmacia; and pEF1/V5, pcDNA3.1, and pRc/CMV2 available from Invitrogen. Other suitable vectors will be readily apparent to the skilled artisan.

[0569] Any strong promoter known to those skilled in the art can be used for driving the expression of the polynucleotide sequence. Suitable promoters include adenoviral promoters, such as the adenoviral major late promoter; or heterologous promoters, such as the cytomegalovirus (CMV) promoter; the respiratory syncytial virus (RSV) promoter; inducible promoters, such as the MMT promoter, the metallothionein promoter; heat shock promoters; the albumin promoter; the ApoAI promoter; human globin promoters; viral thymidine kinase promoters, such as the Herpes Simplex thymidine kinase promoter; retroviral LTRs; the b-actin promoter; and human growth hormone promoters. The promoter also may be the native promoter for the polynucleotide of the present invention.

[0570] Unlike other gene therapy techniques, one major advantage of introducing naked nucleic acid sequences into target cells is the transitory nature of the polynucleotide synthesis in the cells. Studies have shown that non-replicating DNA sequences can be introduced into cells to provide production of the desired polypeptide for periods of up to six months.

[0571] The polynucleotide construct can be delivered to the interstitial space of tissues within the an animal, including of muscle, skin, brain, lung, liver, spleen, bone marrow, thymus, heart, lymph, blood, bone, cartilage, pancreas, kidney, gall bladder, stomach, intestine, testis, ovary, uterus, rectum, nervous system, eye, gland, and connective tissue. Interstitial space of the tissues comprises the intercellular, fluid, mucopolysaccharide matrix among the reticular fibers of organ tissues, elastic fibers in the walls of vessels or chambers, collagen fibers of fibrous tissues, or that same matrix within connective tissue ensheathing muscle cells or in the lacunae of bone. It is similarly the space occupied by the plasma of the circulation and the lymph fluid of the lymphatic channels. Delivery to the interstitial space of muscle tissue is preferred for the reasons discussed below. They may be conveniently delivered by injection into the tissues comprising these cells. They are preferably delivered to and expressed in persistent, non-dividing cells which are differentiated, although delivery and expression may be achieved in non-differentiated or less completely differentiated cells, such as, for example, stem cells of blood or skin fibroblasts. In vivo muscle cells are particularly competent in their ability to take up and express polynucleotides.

[0572] For the naked nucleic acid sequence injection, an effective dosage amount of DNA or RNA will be in the range of from about 0.05 mg/kg body weight to about 50 mg/kg body weight. Preferably the dosage will be from about 0.005 mg/kg to about 20 mg/kg and more preferably from about 0.05 mg/kg to about 5 mg/kg. Of course, as the artisan of ordinary skill will appreciate, this dosage will vary according to the tissue site of injection. The appropriate and effective dosage of nucleic acid sequence can readily be determined by those of ordinary skill in the art and may depend on the condition being treated and the route of administration.

[0573] The preferred route of administration is by the parenteral route of injection into the interstitial space of tissues. However, other parenteral routes may also be used, such as, inhalation of an aerosol formulation particularly for delivery to lungs or bronchial tissues, throat or mucous membranes of the nose. In addition, naked DNA constructs can be delivered to arteries during angioplasty by the catheter used in the procedure.

[0574] The naked polynucleotides are delivered by any method known in the art, including, but not limited to, direct needle injection at the delivery site, intravenous injection, topical administration, catheter infusion, and so-called “gene guns”. These delivery methods are known in the art.

[0575] The constructs may also be delivered with delivery vehicles such as viral sequences, viral particles, liposome formulations, lipofectin, precipitating agents, etc. Such methods of delivery are known in the art.

[0576] In certain embodiments, the polynucleotide constructs are complexed in a liposome preparation. Liposomal preparations for use in the instant invention include cationic (positively charged), anionic (negatively charged) and neutral preparations. However, cationic liposomes are particularly preferred because a tight charge complex can be formed between the cationic liposome and the polyanionic nucleic acid. Cationic liposomes have been shown to mediate intracellular delivery of plasmid DNA (Felgner et al., Proc. Natl. Acad. Sci. USA (1987) 84:7413-7416, which is herein incorporated by reference); mRNA (Malone et al., Proc. Natl. Acad. Sci. USA (1989) 86:6077-6081, which is herein incorporated by reference); and purified transcription factors (Debs et al., J. Biol. Chem. (1990) 265:10189-10192, which is herein incorporated by reference), in functional form.

[0577] Cationic liposomes are readily available. For example, N[1-2,3-dioleyloxy)propyl]-N,N,N-triethylammonium (DOTMA) liposomes are particularly useful and are available under the trademark Lipofectin, from GIBCO BRL, Grand Island, N.Y. (See, also, Felgner et al., Proc. Natl Acad. Sci. USA (1987) 84:7413-7416, which is herein incorporated by reference). Other commercially available liposomes include transfectace (DDAB/DOPE) and DOTAP/DOPE (Boehringer).

[0578] Other cationic liposomes can be prepared from readily available materials using techniques well known in the art. See, e.g. PCT Publication No. WO 90/11092 (which is herein incorporated by reference) for a description of the synthesis of DOTAP (1,2-bis(oleoyloxy)-3-(trimethylammonio)propane) liposomes. Preparation of DOTMA liposomes is explained in the literature, see, e.g., P. Felgner et al., Proc. Natl. Acad. Sci. USA 84:7413-7417, which is herein incorporated by reference. Similar methods can be used to prepare liposomes from other cationic lipid materials.

[0579] Similarly, anionic and neutral liposomes are readily available, such as from Avanti Polar Lipids (Birmingham, Ala.), or can be easily prepared using readily available materials. Such materials include phosphatidyl, choline, cholesterol, phosphatidyl ethanolamine, dioleoylphosphatidyl choline (DOPC), dioleoylphosphatidyl glycerol (DOPG), dioleoylphoshatidyl ethanolamine (DOPE), among others. These materials can also be mixed with the DOTMA and DOTAP starting materials in appropriate ratios. Methods for making liposomes using these materials are well known in the art.

[0580] For example, commercially dioleoylphosphatidyl choline (DOPC), dioleoylphosphatidyl glycerol (DOPG), and dioleoylphosphatidyl ethanolamine (DOPE) can be used in various combinations to make conventional liposomes, with or without the addition of cholesterol. Thus, for example, DOPG/DOPC vesicles can be prepared by drying 50 mg each of DOPG and DOPC under a stream of nitrogen gas into a sonication vial. The sample is placed under a vacuum pump overnight and is hydrated the following day with deionized water. The sample is then sonicated for 2 hours in a capped vial, using a Heat Systems model 350 sonicator equipped with an inverted cup (bath type) probe at the maximum setting while the bath is circulated at 15 EC. Alternatively, negatively charged vesicles can be prepared without sonication to produce multilamellar vesicles or by extrusion through nucleopore membranes to produce unilamellar vesicles of discrete size. Other methods are known and available to those of skill in the art.

[0581] The liposomes can comprise multilamellar vesicles (MLVs), small unilamellar vesicles (SUVs), or large unilamellar vesicles (LUVs), with SUVs being preferred. The various liposome-nucleic acid complexes are prepared using methods well known in the art. See, e.g., Straubinger et al., Methods of Immunology (1983), 101:512-527, which is herein incorporated by reference. For example, MLVs containing nucleic acid can be prepared by depositing a thin film of phospholipid on the walls of a glass tube and subsequently hydrating with a solution of the material to be encapsulated. SUVs are prepared by extended sonication of MLVs to produce a homogeneous population of unilamellar liposomes. The material to be entrapped is added to a suspension of preformed MLVs and then sonicated. When using liposomes containing cationic lipids, the dried lipid film is resuspended in an appropriate solution such as sterile water or an isotonic buffer solution such as 10 mM Tris/NaCl, sonicated, and then the preformed liposomes are mixed directly with the DNA. The liposome and DNA form a very stable complex due to binding of the positively charged liposomes to the cationic DNA. SUVs find use with small nucleic acid fragments. LUVs are prepared by a number of methods, well known in the art. Commonly used methods include Ca²⁺-EDTA chelation (Papahadjopoulos et al., Biochim. Biophys. Acta (1975) 394:483; Wilson et al., Cell 17:77 (1979)); ether injection (Deamer, D. and Bangham, A., Biochim. Biophys. Acta 443:629 (1976); Ostro et al., Biochem. Biophys. Res. Commun. 76:836 (1977); Fraley et al., Proc. Natl. Acad. Sci. USA 76:3348 (1979)); detergent dialysis (Enoch, H. and Strittmatter, P., Proc. Natl. Acad. Sci. USA 76:145 (1979)); and reverse-phase evaporation (REV) (Fraley et al., J. Biol. Chem. 255:10431 (1980); Szoka, F. and Papahadjopoulos, D., Proc. Natl. Acad. Sci. USA 75:145 (1978); Schaefer-Ridder et al., Science 215:166 (1982)), which are herein incorporated by reference.

[0582] Generally, the ratio of DNA to liposomes will be from about 10:1 to about 1:10. Preferably, the ration will be from about 5:1 to about 1:5. More preferably, the ration will be about 3:1 to about 1:3. Still more preferably, the ratio will be about 1:1.

[0583] U.S. Pat. No. 5,676,954 (which is herein incorporated by reference) reports on the injection of genetic material, complexed with cationic liposomes carriers, into mice. U.S. Pat. Nos. 4,897,355, 4,946,787, 5,049,386, 5,459,127, 5,589,466, 5,693,622, 5,580,859, 5,703,055, and international publication no. WO 94/9469 (which are herein incorporated by reference) provide cationic lipids for use in transfecting DNA into cells and mammals. U.S. Pat. Nos. 5,589,466, 5,693,622, 5,580,859, 5,703,055, and international publication no. WO 94/9469 provide methods for delivering DNA-cationic lipid complexes to mammals.

[0584] In certain embodiments, cells are engineered, ex vivo or in vivo, using a retroviral particle containing RNA which comprises a sequence encoding a polypeptide of the present invention. Retroviruses from which the retroviral plasmid vectors may be derived include, but are not limited to, Moloney Murine Leukemia Virus, spleen necrosis virus, Rous sarcoma Virus, Harvey Sarcoma Virus, avian leukosis virus, gibbon ape leukemia virus, human immunodeficiency virus, Myeloproliferative Sarcoma Virus, and mammary tumor virus.

[0585] The retroviral plasmid vector is employed to transduce packaging cell lines to form producer cell lines. Examples of packaging cells which may be transfected include, but are not limited to, the PE501, PA317, R-2, R-AM, PA12, T19-14X, VT-19-17-H2, RCRE, RCRIP, GP+E-86, GP+envAm12, and DAN cell lines as described in Miller, Human Gene Therapy 1:5-14 (1990), which is incorporated herein by reference in its entirety. The vector may transduce the packaging cells through any means known in the art. Such means include, but are not limited to, electroporation, the use of liposomes, and CaPO₄ precipitation. In one alternative, the retroviral plasmid vector may be encapsulated into a liposome, or coupled to a lipid, and then administered to a host.

[0586] The producer cell line generates infectious retroviral vector particles which include polynucleotide encoding a polypeptide of the present invention. Such retroviral vector particles then may be employed, to transduce eukaryotic cells, either in vitro or in vivo. The transduced eukaryotic cells will express a polypeptide of the present invention.

[0587] In certain other embodiments, cells are engineered, ex vivo or in vivo, with polynucleotide contained in an adenovirus vector. Adenovirus can be manipulated such that it encodes and expresses a polypeptide of the present invention, and at the same time is inactivated in terms of its ability to replicate in a normal lytic viral life cycle. Adenovirus expression is achieved without integration of the viral DNA into the host cell chromosome, thereby alleviating concerns about insertional mutagenesis. Furthermore, adenoviruses have been used as live enteric vaccines for many years with an excellent safety profile (Schwartz et al. Am. Rev. Respir. Dis. 109:233-238 (1974)). Finally, adenovirus mediated gene transfer has been demonstrated in a number of instances including transfer of alpha-1-antitrypsin and CFTR to the lungs of cotton rats (Rosenfeld, M. A. et al. (1991) Science 252:431-434; Rosenfeld et al., (1992) Cell 68:143-155). Furthermore, extensive studies to attempt to establish adenovirus as a causative agent in human cancer were uniformly negative (Green, M. et al. (1979) Proc. Natl. Acad. Sci. USA 76:6606).

[0588] Suitable adenoviral vectors useful in the present invention are described, for example, in Kozarsky and Wilson, Curr. Opin. Genet. Devel. 3:499-503 (1993); Rosenfeld et al., Cell 68:143-155 (1992); Engelhardt et al., Human Genet. Ther. 4:759-769 (1993); Yang et al., Nature Genet. 7:362-369 (1994); Wilson et al., Nature 365:691-692 (1993); and U.S. Pat. No. 5,652,224, which are herein incorporated by reference. For example, the adenovirus vector Ad2 is useful and can be grown in human 293 cells. These cells contain the E1 region of adenovirus and constitutively express E1a and E1b, which complement the defective adenoviruses by providing the products of the genes deleted from the vector. In addition to Ad2, other varieties of adenovirus (e.g., Ad3, Ad5, and Ad7) are also useful in the present invention.

[0589] Preferably, the adenoviruses used in the present invention are replication deficient. Replication deficient adenoviruses require the aid of a helper virus and/or packaging cell line to form infectious particles. The resulting virus is capable of infecting cells and can express a polynucleotide of interest which is operably linked to a promoter, but cannot replicate in most cells. Replication deficient adenoviruses may be deleted in one or more of all or a portion of the following genes: E1a, E1b, E3, E4, E2a, or L1 through L5.

[0590] In certain other embodiments, the cells are engineered, ex vivo or in vivo, using an adeno-associated virus (AAV). AAVs are naturally occurring defective viruses that require helper viruses to produce infectious particles (Muzyczka, N., Curr. Topics in Microbiol. Immunol. 158:97 (1992)). It is also one of the few viruses that may integrate its DNA into non-dividing cells. Vectors containing as little as 300 base pairs of AAV can be packaged and can integrate, but space for exogenous DNA is limited to about 4.5 kb. Methods for producing and using such AAVs are known in the art. See, for example, U.S. Pat. Nos. 5,139,941, 5,173,414, 5,354,678, 5,436,146, 5,474,935, 5,478,745, and 5,589,377.

[0591] For example, an appropriate AAV vector for use in the present invention will include all the sequences necessary for DNA replication, encapsidation, and host-cell integration. The polynucleotide construct is inserted into the AAV vector using standard cloning methods, such as those found in Sambrook et al., Molecular Cloning: A Laboratory Manual, Cold Spring Harbor Press (1989). The recombinant AAV vector is then transfected into packaging cells which are infected with a helper virus, using any standard technique, including lipofection, electroporation, calcium phosphate precipitation, etc. Appropriate helper viruses include adenoviruses, cytomegaloviruses, vaccinia viruses, or herpes viruses. Once the packaging cells are transfected and infected, they will produce infectious AAV viral particles which contain the polynucleotide construct. These viral particles are then used to transduce eukaryotic cells, either ex vivo or in vivo. The transduced cells will contain the polynucleotide construct integrated into its genome, and will express a polypeptide of the invention.

[0592] Another method of gene therapy involves operably associating heterologous control regions and endogenous polynucleotide sequences (e.g. encoding a polypeptide of the present invention) via homologous recombination (see, e.g., U.S. Pat. No. 5,641,670, issued Jun. 24, 1997; International Publication No. WO 96/29411, published Sep. 26, 1996; International Publication No. WO 94/12650, published Aug. 4, 1994; Koller et al., Proc. Natl. Acad. Sci. USA 86:8932-8935 (1989); and Zijlstra et al., Nature 342:435-438 (1989), which are herein encorporated by reference. This method involves the activation of a gene which is present in the target cells, but which is not normally expressed in the cells, or is expressed at a lower level than desired.

[0593] Polynucleotide constructs are made, using standard techniques known in the art, which contain the promoter with targeting sequences flanking the promoter. Suitable promoters are described herein. The targeting sequence is sufficiently complementary to an endogenous sequence to permit homologous recombination of the promoter-targeting sequence with the endogenous sequence. The targeting sequence will be sufficiently near the 5′ end of the desired endogenous polynucleotide sequence so the promoter will be operably linked to the endogenous sequence upon homologous recombination.

[0594] The promoter and the targeting sequences can be amplified using PCR. Preferably, the amplified promoter contains distinct restriction enzyme sites on the 5′ and 3′ ends. Preferably, the 3′ end of the first targeting sequence contains the same restriction enzyme site as the 5′ end of the amplified promoter and the 5′ end of the second targeting sequence contains the same restriction site as the 3′ end of the amplified promoter. The amplified promoter and targeting sequences are digested and ligated together.

[0595] The promoter-targeting sequence construct is delivered to the cells, either as naked polynucleotide, or in conjunction with transfection-facilitating agents, such as liposomes, viral sequences, viral particles, whole viruses, lipofection, precipitating agents, etc., described in more detail above. The P promoter-targeting sequence can be delivered by any method, included direct needle injection, intravenous injection, topical administration, catheter infusion, particle accelerators, etc. The methods are described in more detail below.

[0596] The promoter-targeting sequence construct is taken up by cells. Homologous recombination between the construct and the endogenous sequence takes place, such that an endogenous sequence is placed under the control of the promoter. The promoter then drives the expression of the endogenous sequence.

[0597] The polynucleotide encoding a polypeptide of the present invention may contain a secretory signal sequence that facilitates secretion of the protein. Typically, the signal sequence is positioned in the coding region of the polynucleotide to be expressed towards or at the 5′ end of the coding region. The signal sequence may be homologous or heterologous to the polynucleotide of interest and may be homologous or heterologous to the cells to be transfected. Additionally, the signal sequence may be chemically synthesized using methods known in the art.

[0598] Any mode of administration of any of the above-described polynucleotides constructs can be used so long as the mode results in the expression of one or more molecules in an amount sufficient to provide a therapeutic effect. This includes direct needle injection, systemic injection, catheter infusion, biolistic injectors, particle accelerators (i.e., “gene guns”), gelfoam sponge depots, other commercially available depot materials, osmotic pumps (e.g., Alza minipumps), oral or suppositorial solid (tablet or pill) pharmaceutical formulations, and decanting or topical applications during surgery. For example, direct injection of naked calcium phosphate-precipitated plasmid into rat liver and rat spleen or a protein-coated plasmid into the portal vein has resulted in gene expression of the foreign gene in the rat livers (Kaneda et al., Science 243:375 (1989)).

[0599] A preferred method of local administration is by direct injection. Preferably, a recombinant molecule of the present invention complexed with a delivery vehicle is administered by direct injection into or locally within the area of arteries. Administration of a composition locally within the area of arteries refers to injecting the composition centimeters and preferably, millimeters within arteries.

[0600] Another method of local administration is to contact a polynucleotide construct of the present invention in or around a surgical wound. For example, a patient can undergo surgery and the polynucleotide construct can be coated on the surface of tissue inside the wound or the construct can be injected into areas of tissue inside the wound.

[0601] Therapeutic compositions useful in systemic administration, include recombinant molecules of the present invention complexed to a targeted delivery vehicle of the present invention. Suitable delivery vehicles for use with systemic administration comprise liposomes comprising ligands for targeting the vehicle to a particular site. In specific embodiments, suitable delivery vehicles for use with systemic administration comprise liposomes comprising polypeptides of the invention for targeting the vehicle to a particular site.

[0602] Preferred methods of systemic administration, include intravenous injection, aerosol, oral and percutaneous (topical) delivery. Intravenous injections can be performed using methods standard in the art. Aerosol delivery can also be performed using methods standard in the art (see, for example, Stribling et al., Proc. Natl. Acad. Sci. USA 189:11277-11281, 1992, which is incorporated herein by reference). Oral delivery can be performed by complexing a polynucleotide construct of the present invention to a carrier capable of withstanding degradation by digestive enzymes in the gut of an animal. Examples of such carriers, include plastic capsules or tablets, such as those known in the art. Topical delivery can be performed by mixing a polynucleotide construct of the present invention with a lipophilic reagent (e.g., DMSO) that is capable of passing into the skin.

[0603] Determining an effective amount of substance to be delivered can depend upon a number of factors including, for example, the chemical structure and biological activity of the substance, the age and weight of the animal, the precise condition requiring treatment and its severity, and the route of administration. The frequency of treatments depends upon a number of factors, such as the amount of polynucleotide constructs administered per dose, as well as the health and history of the subject. The precise amount, number of doses, and timing of doses will be determined by the attending physician or veterinarian.

[0604] Therapeutic compositions of the present invention can be administered to any animal, preferably to mammals and birds. Preferred mammals include humans, dogs, cats, mice, rats, rabbits sheep, cattle, horses and pigs, with humans being particularly preferred.

Biological Activities

[0605] Polynucleotides or polypeptides, or agonists or antagonists of the present invention, can be used in assays to test for one or more biological activities. If these polynucleotides or polypeptides, or agonists or antagonists of the present invention, do exhibit activity in a particular assay, it is likely that these molecules may be involved in the diseases associated with the biological activity. Thus, the polynucleotides and polypeptides, and agonists or antagonists could be used to treat the associated disease.

[0606] Members of the secreted family of proteins are believed to be involved in biological activities associated with, for example, cellular signaling. Accordingly, compositions of the invention (including polynucleotides, polypeptides and antibodies of the invention, and fragments and variants thereof) may be used in diagnosis, prognosis, prevention and/or treatment of diseases and/or disorders associated with aberrant activity of secreted polypeptides.

[0607] In preferred embodiments, compositions of the invention (including polynucleotides, polypeptides and antibodies of the invention, and fragments and variants thereof) may be used in the diagnosis, prognosis, prevention and/or treatment of diseases and/or disorders relating to diseases and disorders of the endocrine system, the nervous system (See, for example, “Neurological Disorders” section below), and the immune system (See, for example, “Immune Activity” section below).

[0608] In certain embodiments, a polypeptide of the invention, or polynucleotides, antibodies, agonists, or antagonists corresponding to that polypeptide, may be used to diagnose and/or prognose diseases and/or disorders associated with the tissue(s) in which the polypeptide of the invention is expressed including one, two, three, four, five, or more tissues disclosed in Table 1B.2, column 5 (Tissue Distribution Library Code).

[0609] Thus, polynucleotides, translation products and antibodies of the invention are useful in the diagnosis, detection and/or treatment of diseases and/or disorders associated with activities that include, but are not limited to, prohormone activation, neurotransmitter activity, cellular signaling, cellular proliferation, cellular differentiation, and cell migration.

[0610] More generally, polynucleotides, translation products and antibodies corresponding to this gene may be useful for the diagnosis, prognosis, prevention and/or treatment of diseases and/or disorders associated with the following systems.

Immune Activity

[0611] Polynucleotides, polypeptides, antibodies, and/or agonists or antagonists of the present invention may be useful in treating, preventing, diagnosing and/or prognosing diseases, disorders, and/or conditions of the immune system, by, for example, activating or inhibiting the proliferation, differentiation, or mobilization (chemotaxis) of immune cells. Immune cells develop through a process called hematopoiesis, producing myeloid (platelets, red blood cells, neutrophils, and macrophages) and lymphoid (B and T lymphocytes) cells from pluripotent stem cells. The etiology of these immune diseases, disorders, and/or conditions may be genetic, somatic, such as cancer and some autoimmune diseases, acquired (e.g., by chemotherapy or toxins), or infectious. Moreover, polynucleotides, polypeptides, antibodies, and/or agonists or antagonists of the present invention can be used as a marker or detector of a particular immune system disease or disorder.

[0612] In another embodiment, a polypeptide of the invention, or polynucleotides, antibodies, agonists, or antagonists corresponding to that polypeptide, may be used to treat diseases and disorders of the immune system and/or to inhibit or enhance an immune response generated by cells associated with the tissue(s) in which the polypeptide of the invention is expressed, including one, two, three, four, five, or more tissues disclosed in Table 1B.2, column 5 (Tissue Distribution Library Code).

[0613] Polynucleotides, polypeptides, antibodies, and/or agonists or antagonists of the present invention may be useful in treating, preventing, diagnosing, and/or prognosing immunodeficiencies, including both congenital and acquired immunodeficiencies. Examples of B cell immunodeficiencies in which immunoglobulin levels B cell function and/or B cell numbers are decreased include: X-linked agammaglobulinemia (Bruton's disease), X-linked infantile agammaglobulinemia, X-linked immunodeficiency with hyper IgM, non X-linked immunodeficiency with hyper IgM, X-linked lymphoproliferative syndrome (XLP), agammaglobulinemia including congenital and acquired agammaglobulinemia, adult onset agammaglobulinemia, late-onset agammaglobulinemia, dysgammaglobulinemia, hypogammaglobulinemia, unspecified hypogammaglobulinemia, recessive agammaglobulinemia (Swiss type), Selective IgM deficiency, selective IgA deficiency, selective IgG subclass deficiencies, IgG subclass deficiency (with or without IgA deficiency), Ig deficiency with increased IgM, IgG and IgA deficiency with increased IgM, antibody deficiency with normal or elevated Igs, Ig heavy chain deletions, kappa chain deficiency, B cell lymphoproliferative disorder (BLPD), common variable immunodeficiency (CVID), common variable immunodeficiency (CVI) (acquired), and transient hypogammaglobulinemia of infancy.

[0614] In specific embodiments, ataxia-telangiectasia or conditions associated with ataxia-telangiectasia are treated, prevented, diagnosed, and/or prognosing using the polypeptides or polynucleotides of the invention, and/or agonists or antagonists thereof.

[0615] Examples of congenital immunodeficiencies in which T cell and/or B cell function and/or number is decreased include, but are not limited to: DiGeorge anomaly, severe combined immunodeficiencies (SCID) (including, but not limited to, X-linked SCID, autosomal recessive SCID, adenosine deaminase deficiency, purine nucleoside phosphorylase (PNP) deficiency, Class II MHC deficiency (Bare lymphocyte syndrome), Wiskott-Aldrich syndrome, and ataxia telangiectasia), thymic hypoplasia, third and fourth pharyngeal pouch syndrome, 22q11.2 deletion, chronic mucocutaneous candidiasis, natural killer cell deficiency (NK), idiopathic CD4+ T-lymphocytopenia, immunodeficiency with predominant T cell defect (unspecified), and unspecified immunodeficiency of cell mediated immunity.

[0616] In specific embodiments, DiGeorge anomaly or conditions associated with DiGeorge anomaly are treated, prevented, diagnosed, and/or prognosed using polypeptides or polynucleotides of the invention, or antagonists or agonists thereof.

[0617] Other immunodeficiencies that may be treated, prevented, diagnosed, and/or prognosed using polypeptides or polynucleotides of the invention, and/or agonists or antagonists thereof, include, but are not limited to, chronic granulomatous disease, Chédiak-Higashi syndrome, myeloperoxidase deficiency, leukocyte glucose-6-phosphate dehydrogenase deficiency, X-linked lymphoproliferative syndrome (XLP), leukocyte adhesion deficiency, complement component deficiencies (including C1, C2, C3, C4, C5, C6, C7, C8 and/or C9 deficiencies), reticular dysgenesis, thymic alymphoplasia-aplasia, immunodeficiency with thymoma, severe congenital leukopenia, dysplasia with immunodeficiency, neonatal neutropenia, short limbed dwarfism, and Nezelof syndrome-combined immunodeficiency with Igs.

[0618] In a preferred embodiment, the immunodeficiencies and/or conditions associated with the immunodeficiencies recited above are treated, prevented, diagnosed and/or prognosed using polynucleotides, polypeptides, antibodies, and/or agonists or antagonists of the present invention.

[0619] In a preferred embodiment polynucleotides, polypeptides, antibodies, and/or agonists or antagonists of the present invention could be used as an agent to boost immunoresponsiveness among immunodeficient individuals. In specific embodiments, polynucleotides, polypeptides, antibodies, and/or agonists or antagonists of the present invention could be used as an agent to boost immunoresponsiveness among B cell and/or T cell immunodeficient individuals.

[0620] The polynucleotides, polypeptides, antibodies, and/or agonists or antagonists of the present invention may be useful in treating, preventing, diagnosing and/or prognosing autoimmune disorders. Many autoimmune disorders result from inappropriate recognition of self as foreign material by immune cells. This inappropriate recognition results in an immune response leading to the destruction of the host tissue. Therefore, the administration of polynucleotides and polypeptides of the invention that can inhibit an immune response, particularly the proliferation, differentiation, or chemotaxis of T-cells, may be an effective therapy in preventing autoimmune disorders.

[0621] Autoimmune diseases or disorders that may be treated, prevented, diagnosed and/or prognosed by polynucleotides, polypeptides, antibodies, and/or agonists or antagonists of the present invention include, but are not limited to, one or more of the following: systemic lupus erythematosus, rheumatoid arthritis, ankylosing spondylitis, multiple sclerosis, autoimmune thyroiditis, Hashimoto's thyroiditis, autoimmune hemolytic anemia, hemolytic anemia, thrombocytopenia, autoimmune thrombocytopenia purpura, autoimmune neonatal thrombocytopenia, idiopathic thrombocytopenia purpura, purpura (e.g., Henloch-Scoenlein purpura), autoimmunocytopenia, Goodpasture's syndrome, Pemphigus vulgaris, myasthenia gravis, Grave's disease (hyperthyroidism), and insulin-resistant diabetes mellitus.

[0622] Additional disorders that are likely to have an autoimmune component that may be treated, prevented, and/or diagnosed with the compositions of the invention include, but are not limited to, type II collagen-induced arthritis, antiphospholipid syndrome, dermatitis, allergic encephalomyelitis, myocarditis, relapsing polychondritis, rheumatic heart disease, neuritis, uveitis ophthalmia, polyendocrinopathies, Reiter's Disease, Stiff-Man Syndrome, autoimmune pulmonary inflammation, autism, Guillain-Barre Syndrome, insulin dependent diabetes mellitus, and autoimmune inflammatory eye disorders.

[0623] Additional disorders that are likely to have an autoimmune component that may be treated, prevented, diagnosed and/or prognosed with the compositions of the invention include, but are not limited to, scleroderma with anti-collagen antibodies (often characterized, e.g., by nucleolar and other nuclear antibodies), mixed connective tissue disease (often characterized, e.g., by antibodies to extractable nuclear antigens (e.g., ribonucleoprotein)), polymyositis (often characterized, e.g., by nonhistone ANA), pernicious anemia (often characterized, e.g., by antiparietal cell, microsomes, and intrinsic factor antibodies), idiopathic Addison's disease (often characterized, e.g., by humoral and cell-mediated adrenal cytotoxicity, infertility (often characterized, e.g., by antispermatozoal antibodies), glomerulonephritis (often characterized, e.g., by glomerular basement membrane antibodies or immune complexes), bullous pemphigoid (often characterized, e.g., by IgG and complement in basement membrane), Sjogren's syndrome (often characterized, e.g., by multiple tissue antibodies, and/or a specific nonhistone ANA (SS-B)), diabetes mellitus (often characterized, e.g., by cell-mediated and humoral islet cell antibodies), and adrenergic drug resistance (including adrenergic drug resistance with asthma or cystic fibrosis) (often characterized, e.g., by beta-adrenergic receptor antibodies).

[0624] Additional disorders that may have an autoimmune component that may be treated, prevented, diagnosed and/or prognosed with the compositions of the invention include, but are not limited to, chronic active hepatitis (often characterized, e.g., by smooth muscle antibodies), primary biliary cirrhosis (often characterized, e.g., by mitochondria antibodies), other endocrine gland failure (often characterized, e.g., by specific tissue antibodies in some cases), vitiligo (often characterized, e.g., by melanocyte antibodies), vasculitis (often characterized, e.g., by Ig and complement in vessel walls and/or low serum complement), post-MI (often characterized, e.g., by myocardial antibodies), cardiotomy syndrome (often characterized, e.g., by myocardial antibodies), urticaria (often characterized, e.g., by IgG and IgM antibodies to IgE), atopic dermatitis (often characterized, e.g., by IgG and IgM antibodies to IgE), asthma (often characterized, e.g., by IgG and IgM antibodies to IgE), and many other inflammatory, granulomatous, degenerative, and atrophic disorders.

[0625] In a preferred embodiment, the autoimmune diseases and disorders and/or conditions associated with the diseases and disorders recited above are treated, prevented, diagnosed and/or prognosed using for example, antagonists or agonists, polypeptides or polynucleotides, or antibodies of the present invention. In a specific preferred embodiment, rheumatoid arthritis is treated, prevented, and/or diagnosed using polynucleotides, polypeptides, antibodies, and/or agonists or antagonists of the present invention.

[0626] In another specific preferred embodiment, systemic lupus erythematosus is treated, prevented, and/or diagnosed using polynucleotides, polypeptides, antibodies, and/or agonists or antagonists of the present invention. In another specific preferred embodiment, idiopathic thrombocytopenia purpura is treated, prevented, and/or diagnosed using polynucleotides, polypeptides, antibodies, and/or agonists or antagonists of the present invention.

[0627] In another specific preferred embodiment IgA nephropathy is treated, prevented, and/or diagnosed using polynucleotides, polypeptides, antibodies, and/or agonists or antagonists of the present invention.

[0628] In a preferred embodiment, the autoimmune diseases and disorders and/or conditions associated with the diseases and disorders recited above are treated, prevented, diagnosed and/or prognosed using polynucleotides, polypeptides, antibodies, and/or agonists or antagonists of the present invention

[0629] In preferred embodiments, polypeptides, antibodies, polynucleotides and/or agonists or antagonists of the present invention are used as a immunosuppressive agent(s).

[0630] Polynucleotides, polypeptides, antibodies, and/or agonists or antagonists of the present invention may be useful in treating, preventing, prognosing, and/or diagnosing diseases, disorders, and/or conditions of hematopoietic cells. Polynucleotides, polypeptides, antibodies, and/or agonists or antagonists of the present invention could be used to increase differentiation and proliferation of hematopoietic cells, including the pluripotent stem cells, in an effort to treat or prevent those diseases, disorders, and/or conditions associated with a decrease in certain (or many) types hematopoietic cells, including but not limited to, leukopenia, neutropenia, anemia, and thrombocytopenia. Alternatively, Polynucleotides, polypeptides, antibodies, and/or agonists or antagonists of the present invention could be used to increase differentiation and proliferation of hematopoietic cells, including the pluripotent stem cells, in an effort to treat or prevent those diseases, disorders, and/or conditions associated with an increase in certain (or many) types of hematopoietic cells, including but not limited to, histiocytosis.

[0631] Allergic reactions and conditions, such as asthma (particularly allergic asthma) or other respiratory problems, may also be treated, prevented, diagnosed and/or prognosed using polypeptides, antibodies, or polynucleotides of the invention, and/or agonists or antagonists thereof. Moreover, these molecules can be used to treat, prevent, prognose, and/or diagnose anaphylaxis, hypersensitivity to an antigenic molecule, or blood group incompatibility.

[0632] Additionally, polypeptides or polynucleotides of the invention, and/or agonists or antagonists thereof, may be used to treat, prevent, diagnose and/or prognose IgE-mediated allergic reactions. Such allergic reactions include, but are not limited to, asthma, rhinitis, and eczema. In specific embodiments, polynucleotides, polypeptides, antibodies, and/or agonists or antagonists of the present invention may be used to modulate IgE concentrations in vitro or in vivo.

[0633] Moreover, polynucleotides, polypeptides, antibodies, and/or agonists or antagonists of the present invention have uses in the diagnosis, prognosis, prevention, and/or treatment of inflammatory conditions. For example, since polypeptides, antibodies, or polynucleotides of the invention, and/or agonists or antagonists of the invention may inhibit the activation, proliferation and/or differentiation of cells involved in an inflammatory response, these molecules can be used to prevent and/or treat chronic and acute inflammatory conditions. Such inflammatory conditions include, but are not limited to, for example, inflammation associated with infection (e.g., septic shock, sepsis, or systemic inflammatory response syndrome), ischemia-reperfusion injury, endotoxin lethality, complement-mediated hyperacute rejection, nephritis, cytokine or chemokine induced lung injury, inflammatory bowel disease, Crohn's disease, over production of cytokines (e.g., TNF or IL-1.), respiratory disorders (e.g., asthma and allergy); gastrointestinal disorders (e.g., inflammatory bowel disease); cancers (e.g., gastric, ovarian, lung, bladder, liver, and breast); CNS disorders (e.g., multiple sclerosis; ischemic brain injury and/or stroke, traumatic brain injury, neurodegenerative disorders (e.g., Parkinson's disease and Alzheimer's disease); AIDS-related dementia; and prion disease); cardiovascular disorders (e.g., atherosclerosis, myocarditis, cardiovascular disease, and cardiopulmonary bypass complications); as well as many additional diseases, conditions, and disorders that are characterized by inflammation (e.g., hepatitis, rheumatoid arthritis, gout, trauma, pancreatitis, sarcoidosis, dermatitis, renal ischemia-reperfusion injury, Grave's disease, systemic lupus erythematosus, diabetes mellitus, and allogenic transplant rejection).

[0634] Because inflammation is a fundamental defense mechanism, inflammatory disorders can effect virtually any tissue of the body. Accordingly, polynucleotides, polypeptides, and antibodies of the invention, as well as agonists or antagonists thereof, have uses in the treatment of tissue-specific inflammatory disorders, including, but not limited to, adrenalitis, alveolitis, angiocholecystitis, appendicitis, balanitis, blepharitis, bronchitis, bursitis, carditis, cellulitis, cervicitis, cholecystitis, chorditis, cochlitis, colitis, conjunctivitis, cystitis, dermatitis, diverticulitis, encephalitis, endocarditis, esophagitis, eustachitis, fibrositis, folliculitis, gastritis, gastroenteritis, gingivitis, glossitis, hepatosplenitis, keratitis, labyrinthitis, laryngitis, lymphangitis, mastitis, media otitis, meningitis, metritis, mucitis, myocarditis, myosititis, myringitis, nephritis, neuritis, orchitis, osteochondritis, otitis, pericarditis, peritendonitis, peritonitis, pharyngitis, phlebitis, poliomyelitis, prostatitis, pulpitis, retinitis, rhinitis, salpingitis, scleritis, sclerochoroiditis, scrotitis, sinusitis, spondylitis, steatitis, stomatitis, synovitis, syringitis, tendonitis, tonsillitis, urethritis, and vaginitis.

[0635] In specific embodiments, polypeptides, antibodies, or polynucleotides of the invention, and/or agonists or antagonists thereof, are useful to diagnose, prognose, prevent, and/or treat organ transplant rejections and graft-versus-host disease. Organ rejection occurs by host immune cell destruction of the transplanted tissue through an immune response. Similarly, an immune response is also involved in GVHD, but, in this case, the foreign transplanted immune cells destroy the host tissues. Polypeptides, antibodies, or polynucleotides of the invention, and/or agonists or antagonists thereof, that inhibit an immune response, particularly the activation, proliferation, differentiation, or chemotaxis of T-cells, may be an effective therapy in preventing organ rejection or GVHD. In specific embodiments, polypeptides, antibodies, or polynucleotides of the invention, and/or agonists or antagonists thereof, that inhibit an immune response, particularly the activation, proliferation, differentiation, or chemotaxis of T-cells, may be an effective therapy in preventing experimental allergic and hyperacute xenograft rejection.

[0636] In other embodiments, polypeptides, antibodies, or polynucleotides of the invention, and/or agonists or antagonists thereof, are useful to diagnose, prognose, prevent, and/or treat immune complex diseases, including, but not limited to, serum sickness, post streptococcal glomerulonephritis, polyarteritis nodosa, and immune complex-induced vasculitis.

[0637] Polypeptides, antibodies, polynucleotides and/or agonists or antagonists of the invention can be used to treat, detect, and/or prevent infectious agents. For example, by increasing the immune response, particularly increasing the proliferation activation and/or differentiation of B and/or T cells, infectious diseases may be treated, detected, and/or prevented. The immune response may be increased by either enhancing an existing immune response, or by initiating a new immune response. Alternatively, polynucleotides, polypeptides, antibodies, and/or agonists or antagonists of the present invention may also directly inhibit the infectious agent (refer to section of application listing infectious agents, etc), without necessarily eliciting an immune response.

[0638] In another embodiment, polypeptides, antibodies, polynucleotides and/or agonists or antagonists of the present invention are used as a vaccine adjuvant that enhances immune responsiveness to an antigen. In a specific embodiment, polypeptides, antibodies, polynucleotides and/or agonists or antagonists of the present invention are used as an adjuvant to enhance tumor-specific immune responses.

[0639] In another specific embodiment, polypeptides, antibodies, polynucleotides and/or agonists or antagonists of the present invention are used as an adjuvant to enhance anti-viral immune responses. Anti-viral immune responses that may be enhanced using the compositions of the invention as an adjuvant, include virus and virus associated diseases or symptoms described herein or otherwise known in the art. In specific embodiments, the compositions of the invention are used as an adjuvant to enhance an immune response to a virus, disease, or symptom selected from the group consisting of: AIDS, meningitis, Dengue, EBV, and hepatitis (e.g., hepatitis B). In another specific embodiment, the compositions of the invention are used as an adjuvant to enhance an immune response to a virus, disease, or symptom selected from the group consisting of: HIV/AIDS, respiratory syncytial virus, Dengue, rotavirus, Japanese B encephalitis, influenza A and B, parainfluenza, measles, cytomegalovirus, rabies, Junin, Chikungunya, Rift Valley Fever, herpes simplex, and yellow fever.

[0640] In another specific embodiment, polypeptides, antibodies, polynucleotides and/or agonists or antagonists of the present invention are used as an adjuvant to enhance anti-bacterial or anti-fungal immune responses. Anti-bacterial or anti-fungal immune responses that may be enhanced using the compositions of the invention as an adjuvant, include bacteria or fungus and bacteria or fungus associated diseases or symptoms described herein or otherwise known in the art. In specific embodiments, the compositions of the invention are used as an adjuvant to enhance an immune response to a bacteria or fungus, disease, or symptom selected from the group consisting of: tetanus, Diphtheria, botulism, and meningitis type B.

[0641] In another specific embodiment, the compositions of the invention are used as an adjuvant to enhance an immune response to a bacteria or fungus, disease, or symptom selected from the group consisting of: Vibrio cholerae, Mycobacterium leprae, Salmonella typhi, Salmonella paratyphi, Meisseria meningitidis, Streptococcus pneumoniae, Group B streptococcus, Shigella spp., Enterotoxigenic Escherichia coli, Enterohemorrhagic E. coli, and Borrelia burgdorferi.

[0642] In another specific embodiment, polypeptides, antibodies, polynucleotides and/or agonists or antagonists of the present invention are used as an adjuvant to enhance anti-parasitic immune responses. Anti-parasitic immune responses that may be enhanced using the compositions of the invention as an adjuvant, include parasite and parasite associated diseases or symptoms described herein or otherwise known in the art. In specific embodiments, the compositions of the invention are used as an adjuvant to enhance an immune response to a parasite. In another specific embodiment, the compositions of the invention are used as an adjuvant to enhance an immune response to Plasmodium (malaria) or Leishmania.

[0643] In another specific embodiment, polypeptides, antibodies, polynucleotides and/or agonists or antagonists of the present invention may also be employed to treat infectious diseases including silicosis, sarcoidosis, and idiopathic pulmonary fibrosis; for example, by preventing the recruitment and activation of mononuclear phagocytes.

[0644] In another specific embodiment, polypeptides, antibodies, polynucleotides and/or agonists or antagonists of the present invention are used as an antigen for the generation of antibodies to inhibit or enhance immune mediated responses against polypeptides of the invention.

[0645] In one embodiment, polypeptides, antibodies, polynucleotides and/or agonists or antagonists of the present invention are administered to an animal (e.g., mouse, rat, rabbit, hamster, guinea pig, pigs, micro-pig, chicken, camel, goat, horse, cow, sheep, dog, cat, non-human primate, and human, most preferably human) to boost the immune system to produce increased quantities of one or more antibodies (e.g., IgG, IgA, IgM, and IgE), to induce higher affinity antibody production and immunoglobulin class switching (e.g., IgG, IgA, IgM, and IgE), and/or to increase an immune response.

[0646] In another specific embodiment, polypeptides, antibodies, polynucleotides and/or agonists or antagonists of the present invention are used as a stimulator of B cell responsiveness to pathogens.

[0647] In another specific embodiment, polypeptides, antibodies, polynucleotides and/or agonists or antagonists of the present invention are used as an activator of T cells.

[0648] In another specific embodiment, polypeptides, antibodies, polynucleotides and/or agonists or antagonists of the present invention are used as an agent that elevates the immune status of an individual prior to their receipt of immunosuppressive therapies.

[0649] In another specific embodiment, polypeptides, antibodies, polynucleotides and/or agonists or antagonists of the present invention are used as an agent to induce higher affinity antibodies.

[0650] In another specific embodiment, polypeptides, antibodies, polynucleotides and/or agonists or antagonists of the present invention are used as an agent to increase serum immunoglobulin concentrations.

[0651] In another specific embodiment, polypeptides, antibodies, polynucleotides and/or agonists or antagonists of the present invention are used as an agent to accelerate recovery of immunocompromised individuals.

[0652] In another specific embodiment, polypeptides, antibodies, polynucleotides and/or agonists or antagonists of the present invention are used as an agent to boost immunoresponsiveness among aged populations and/or neonates.

[0653] In another specific embodiment, polypeptides, antibodies, polynucleotides and/or agonists or antagonists of the present invention are used as an immune system enhancer prior to, during, or after bone marrow transplant and/or other transplants (e.g., allogeneic or xenogeneic organ transplantation). With respect to transplantation, compositions of the invention may be administered prior to, concomitant with, and/or after transplantation. In a specific embodiment, compositions of the invention are administered after transplantation, prior to the beginning of recovery of T-cell populations. In another specific embodiment, compositions of the invention are first administered after transplantation after the beginning of recovery of T cell populations, but prior to full recovery of B cell populations.

[0654] In another specific embodiment, polypeptides, antibodies, polynucleotides and/or agonists or antagonists of the present invention are used as an agent to boost immunoresponsiveness among individuals having an acquired loss of B cell function. Conditions resulting in an acquired loss of B cell function that may be ameliorated or treated by administering the polypeptides, antibodies, polynucleotides and/or agonists or antagonists thereof, include, but are not limited to, HIV Infection, AIDS, bone marrow transplant, and B cell chronic lymphocytic leukemia (CLL).

[0655] In another specific embodiment, polypeptides, antibodies, polynucleotides and/or agonists or antagonists of the present invention are used as an agent to boost immunoresponsiveness among individuals having a temporary immune deficiency. Conditions resulting in a temporary immune deficiency that may be ameliorated or treated by administering the polypeptides, antibodies, polynucleotides and/or agonists or antagonists thereof, include, but are not limited to, recovery from viral infections (e.g., influenza), conditions associated with malnutrition, recovery from infectious mononucleosis, or conditions associated with stress, recovery from measles, recovery from blood transfusion, and recovery from surgery.

[0656] In another specific embodiment, polypeptides, antibodies, polynucleotides and/or agonists or antagonists of the present invention are used as a regulator of antigen presentation by monocytes, dendritic cells, and/or B-cells. In one embodiment, polynucleotides, polypeptides, antibodies, and/or agonists or antagonists of the present invention enhance antigen presentation or antagonizes antigen presentation in vitro or in vivo. Moreover, in related embodiments, said enhancement or antagonism of antigen presentation may be useful as an anti-tumor treatment or to modulate the immune system.

[0657] In another specific embodiment, polypeptides, antibodies, polynucleotides and/or agonists or antagonists of the present invention are used as an agent to direct an individual's immune system towards development of a humoral response (i.e. TH2) as opposed to a TH1 cellular response.

[0658] In another specific embodiment, polypeptides, antibodies, polynucleotides and/or agonists or antagonists of the present invention are used as a means to induce tumor proliferation and thus make it more susceptible to anti-neoplastic agents. For example, multiple myeloma is a slowly dividing disease and is thus refractory to virtually all anti-neoplastic regimens. If these cells were forced to proliferate more rapidly their susceptibility profile would likely change.

[0659] In another specific embodiment, polypeptides, antibodies, polynucleotides and/or agonists or antagonists of the present invention are used as a stimulator of B cell production in pathologies such as AIDS, chronic lymphocyte disorder and/or Common Variable Immunodificiency.

[0660] In another specific embodiment, polypeptides, antibodies, polynucleotides and/or agonists or antagonists of the present invention are used as a therapy for generation and/or regeneration of lymphoid tissues following surgery, trauma or genetic defect. In another specific embodiment, polypeptides, antibodies, polynucleotides and/or agonists or antagonists of the present invention are used in the pretreatment of bone marrow samples prior to transplant.

[0661] In another specific embodiment, polypeptides, antibodies, polynucleotides and/or agonists or antagonists of the present invention are used as a gene-based therapy for genetically inherited disorders resulting in immuno-incompetence/immunodeficiency such as observed among SCID patients.

[0662] In another specific embodiment, polypeptides, antibodies, polynucleotides and/or agonists or antagonists of the present invention are used as a means of activating monocytes/macrophages to defend against parasitic diseases that effect monocytes such as Leishmania.

[0663] In another specific embodiment, polypeptides, antibodies, polynucleotides and/or agonists or antagonists of the present invention are used as a means of regulating secreted cytokines that are elicited by polypeptides of the invention.

[0664] In another embodiment, polypeptides, antibodies, polynucleotides and/or agonists or antagonists of the present invention are used in one or more of the applications decribed herein, as they may apply to veterinary medicine.

[0665] In another specific embodiment, polypeptides, antibodies, polynucleotides and/or agonists or antagonists of the present invention are used as a means of blocking various aspects of immune responses to foreign agents or self. Examples of diseases or conditions in which blocking of certain aspects of immune responses may be desired include autoimmune disorders such as lupus, and arthritis, as well as immunoresponsiveness to skin allergies, inflammation, bowel disease, injury and diseases/disorders associated with pathogens.

[0666] In another specific embodiment, polypeptides, antibodies, polynucleotides and/or agonists or antagonists of the present invention are used as a therapy for preventing the B cell proliferation and Ig secretion associated with autoimmune diseases such as idiopathic thrombocytopenic purpura, systemic lupus erythematosus and multiple sclerosis.

[0667] In another specific embodiment, polypeptides, antibodies, polynucleotides and/or agonists or antagonists of the present invention are used as a inhibitor of B and/or T cell migration in endothelial cells. This activity disrupts tissue architecture or cognate responses and is useful, for example in disrupting immune responses, and blocking sepsis.

[0668] In another specific embodiment, polypeptides, antibodies, polynucleotides and/or agonists or antagonists of the present invention are used as a therapy for chronic hypergammaglobulinemia evident in such diseases as monoclonal gammopathy of undetermined significance (MGUS), Waldenstrom's disease, related idiopathic monoclonal gammopathies, and plasmacytomas.

[0669] In another specific embodiment, polypeptides, antibodies, polynucleotides and/or agonists or antagonists of the present invention may be employed for instance to inhibit polypeptide chemotaxis and activation of macrophages and their precursors, and of neutrophils, basophils, B lymphocytes and some T-cell subsets, e.g., activated and CD8 cytotoxic T cells and natural killer cells, in certain autoimmune and chronic inflammatory and infective diseases. Examples of autoimmune diseases are described herein and include multiple sclerosis, and insulin-dependent diabetes.

[0670] The polypeptides, antibodies, polynucleotides and/or agonists or antagonists of the present invention may also be employed to treat idiopathic hyper-eosinophilic syndrome by, for example, preventing eosinophil production and migration.

[0671] In another specific embodiment, polypeptides, antibodies, polynucleotides and/or agonists or antagonists of the present invention are used to enhance or inhibit complement mediated cell lysis.

[0672] In another specific embodiment, polypeptides, antibodies, polynucleotides and/or agonists or antagonists of the present invention are used to enhance or inhibit antibody dependent cellular cytotoxicity.

[0673] In another specific embodiment, polypeptides, antibodies, polynucleotides and/or agonists or antagonists of the present invention may also be employed for treating atherosclerosis, for example, by preventing monocyte infiltration in the artery wall.

[0674] In another specific embodiment, polypeptides, antibodies, polynucleotides and/or agonists or antagonists of the present invention may be employed to treat adult respiratory distress syndrome (ARDS).

[0675] In another specific embodiment, polypeptides, antibodies, polynucleotides and/or agonists or antagonists of the present invention may be useful for stimulating wound and tissue repair, stimulating angiogenesis, and/or stimulating the repair of vascular or lymphatic diseases or disorders. Additionally, agonists and antagonists of the invention may be used to stimulate the regeneration of mucosal surfaces.

[0676] In a specific embodiment, polynucleotides or polypeptides, and/or agonists thereof are used to diagnose, prognose, treat, and/or prevent a disorder characterized by primary or acquired immunodeficiency, deficient serum immunoglobulin production, recurrent infections, and/or immune system dysfunction. Moreover, polynucleotides or polypeptides, and/or agonists thereof may be used to treat or prevent infections of the joints, bones, skin, and/or parotid glands, blood-borne infections (e.g., sepsis, meningitis, septic arthritis, and/or osteomyelitis), autoimmune diseases (e.g., those disclosed herein), inflammatory disorders, and malignancies, and/or any disease or disorder or condition associated with these infections, diseases, disorders and/or malignancies) including, but not limited to, CVID, other primary immune deficiencies, HIV disease, CLL, recurrent bronchitis, sinusitis, otitis media, conjunctivitis, pneumonia, hepatitis, meningitis, herpes zoster (e.g., severe herpes zoster), and/or pneumocystis carnii. Other diseases and disorders that may be prevented, diagnosed, prognosed, and/or treated with polynucleotides or polypeptides, and/or agonists of the present invention include, but are not limited to, HIV infection, HTLV-BLV infection, lymphopenia, phagocyte bactericidal dysfunction anemia, thrombocytopenia, and hemoglobinuria.

[0677] In another embodiment, polynucleotides, polypeptides, antibodies, and/or agonists or antagonists of the present invention are used to treat, and/or diagnose an individual having common variable immunodeficiency disease (“CVID”; also known as “acquired agammaglobulinemia” and “acquired hypogammaglobulinemia”) or a subset of this disease.

[0678] In a specific embodiment, polynucleotides, polypeptides, antibodies, and/or agonists or antagonists of the present invention may be used to diagnose, prognose, prevent, and/or treat cancers or neoplasms including immune cell or immune tissue-related cancers or neoplasms. Examples of cancers or neoplasms that may be prevented, diagnosed, or treated by polynucleotides, polypeptides, antibodies, and/or agonists or antagonists of the present invention include, but are not limited to, acute myelogenous leukemia, chronic myelogenous leukemia, Hodgkin's disease, non-Hodgkin's lymphoma, acute lymphocytic anemia (ALL) Chronic lymphocyte leukemia, plasmacytomas, multiple myeloma, Burkitt's lymphoma, EBV-transformed diseases, and/or diseases and disorders described in the section entitled “Hyperproliferative Disorders” elsewhere herein.

[0679] In another specific embodiment, polypeptides, antibodies, polynucleotides and/or agonists or antagonists of the present invention are used as a therapy for decreasing cellular proliferation of Large B-cell Lymphomas.

[0680] In another specific embodiment, polypeptides, antibodies, polynucleotides and/or agonists or antagonists of the present invention are used as a means of decreasing the involvement of B cells and Ig associated with Chronic Myelogenous Leukemia.

[0681] In specific embodiments, the compositions of the invention are used as an agent to boost immunoresponsiveness among B cell immunodeficient individuals, such as, for example, an individual who has undergone a partial or complete splenectomy.

[0682] Antagonists of the invention include, for example, binding and/or inhibitory antibodies, antisense nucleic acids, ribozymes or soluble forms of the polypeptides of the present invention (e.g., Fc fusion protein; see, e.g., Example 9). Agonists of the invention include, for example, binding or stimulatory antibodies, and soluble forms of the polypeptides (e.g., Fc fusion proteins; see, e.g., Example 9) polypeptides, antibodies, polynucleotides and/or agonists or antagonists of the present invention may be employed in a composition with a pharmaceutically acceptable carrier, e.g., as described herein.

[0683] In another embodiment, polypeptides, antibodies, polynucleotides and/or agonists or antagonists of the present invention are administered to an animal (including, but not limited to, those listed above, and also including transgenic animals) incapable of producing functional endogenous antibody molecules or having an otherwise compromised endogenous immune system, but which is capable of producing human immunoglobulin molecules by means of a reconstituted or partially reconstituted immune system from another animal (see, e.g., published PCT Application Nos. WO98/24893, WO/9634096, WO/9633735, and WO/9110741). Administration of polypeptides, antibodies, polynucleotides and/or agonists or antagonists of the present invention to such animals is useful for the generation of monoclonal antibodies against the polypeptides, antibodies, polynucleotides and/or agonists or antagonists of the present invention.

Blood-Related Disorders

[0684] The polynucleotides, polypeptides, antibodies, and/or agonists or antagonists of the present invention may be used to modulate hemostatic (the stopping of bleeding) or thrombolytic (clot dissolving) activity. For example, by increasing hemostatic or thrombolytic activity, polynucleotides or polypeptides, and/or agonists or antagonists of the present invention could be used to treat or prevent blood coagulation diseases, disorders, and/or conditions (e.g., afibrinogenemia, factor deficiencies, hemophilia), blood platelet diseases, disorders, and/or conditions (e.g., thrombocytopenia), or wounds resulting from trauma, surgery, or other causes. Alternatively, polynucleotides, polypeptides, antibodies, and/or agonists or antagonists of the present invention that can decrease hemostatic or thrombolytic activity could be used to inhibit or dissolve clotting. These molecules could be important in the treatment or prevention of heart attacks (infarction), strokes, or scarring.

[0685] In specific embodiments, the polynucleotides, polypeptides, antibodies, and/or agonists or antagonists of the present invention may be used to prevent, diagnose, prognose, and/or treat thrombosis, arterial thrombosis, venous thrombosis, thromboembolism, pulmonary embolism, atherosclerosis, myocardial infarction, transient ischemic attack, unstable angina. In specific embodiments, the polynucleotides, polypeptides, antibodies, and/or agonists or antagonists of the present invention may be used for the prevention of occulsion of saphenous grafts, for reducing the risk of periprocedural thrombosis as might accompany angioplasty procedures, for reducing the risk of stroke in patients with atrial fibrillation including nonrheumatic atrial fibrillation, for reducing the risk of embolism associated with mechanical heart valves and or mitral valves disease. Other uses for the polynucleotides, polypeptides, antibodies, and/or agonists or antagonists of the present invention, include, but are not limited to, the prevention of occlusions in extrcorporeal devices (e.g., intravascular canulas, vascular access shunts in hemodialysis patients, hemodialysis machines, and cardiopulmonary bypass machines).

[0686] In another embodiment, a polypeptide of the invention, or polynucleotides, antibodies, agonists, or antagonists corresponding to that polypeptide, may be used to prevent, diagnose, prognose, and/or treat diseases and disorders of the blood and/or blood forming organs associated with the tissue(s) in which the polypeptide of the invention is expressed, including one, two, three, four, five, or more tissues disclosed in Table 1B.2, column 5 (Tissue Distribution Library Code).

[0687] The polynucleotides, polypeptides, antibodies, and/or agonists or antagonists of the present invention may be used to modulate hematopoietic activity (the formation of blood cells). For example, the polynucleotides, polypeptides, antibodies, and/or agonists or antagonists of the present invention may be used to increase the quantity of all or subsets of blood cells, such as, for example, erythrocytes, lymphocytes (B or T cells), myeloid cells (e.g., basophils, eosinophils, neutrophils, mast cells, macrophages) and platelets. The ability to decrease the quantity of blood cells or subsets of blood cells may be useful in the prevention, detection, diagnosis and/or treatment of anemias and leukopenias described below. Alternatively, the polynucleotides, polypeptides, antibodies, and/or agonists or antagonists of the present invention may be used to decrease the quantity of all or subsets of blood cells, such as, for example, erythrocytes, lymphocytes (B or T cells), myeloid cells (e.g., basophils, eosinophils, neutrophils, mast cells, macrophages) and platelets. The ability to decrease the quantity of blood cells or subsets of blood cells may be useful in the prevention, detection, diagnosis and/or treatment of leukocytoses, such as, for example eosinophilia.

[0688] The polynucleotides, polypeptides, antibodies, and/or agonists or antagonists of the present invention may be used to prevent, treat, or diagnose blood dyscrasia.

[0689] Anemias are conditions in which the number of red blood cells or amount of hemoglobin (the protein that carries oxygen) in them is below normal. Anemia may be caused by excessive bleeding, decreased red blood cell production, or increased red blood cell destruction (hemolysis). The polynucleotides, polypeptides, antibodies, and/or agonists or antagonists of the present invention may be useful in treating, preventing, and/or diagnosing anemias. Anemias that may be treated prevented or diagnosed by the polynucleotides, polypeptides, antibodies, and/or agonists or antagonists of the present invention include iron deficiency anemia, hypochromic anemia, microcytic anemia, chlorosis, hereditary sideroblastic anemia, idiopathic acquired sideroblastic anemia, red cell aplasia, megaloblastic anemia (e.g., pernicious anemia, (vitamin B12 deficiency) and folic acid deficiency anemia), aplastic anemia, hemolytic anemias (e.g., autoimmune helolytic anemia, microangiopathic hemolytic anemia, and paroxysmal nocturnal hemoglobinuria). The polynucleotides, polypeptides, antibodies, and/or agonists or antagonists of the present invention may be useful in treating, preventing, and/or diagnosing anemias associated with diseases including but not limited to, anemias associated with systemic lupus erythematosus, cancers, lymphomas, chronic renal disease, and enlarged spleens. The polynucleotides, polypeptides, antibodies, and/or agonists or antagonists of the present invention may be useful in treating, preventing, and/or diagnosing anemias arising from drug treatments such as anemias associated with methyldopa, dapsone, and/or sulfadrugs. Additionally, rhe polynucleotides, polypeptides, antibodies, and/or agonists or antagonists of the present invention may be useful in treating, preventing, and/or diagnosing anemias associated with abnormal red blood cell architecture including but not limited to, hereditary spherocytosis, hereditary elliptocytosis, glucose-6-phosphate dehydrogenase deficiency, and sickle cell anemia.

[0690] The polynucleotides, polypeptides, antibodies, and/or agonists or antagonists of the present invention may be useful in treating, preventing, and/or diagnosing hemoglobin abnormalities, (e.g., those associated with sickle cell anemia, hemoglobin C disease, hemoglobin S-C disease, and hemoglobin E disease). Additionally, the polynucleotides, polypeptides, antibodies, and/or agonists or antagonists of the present invention may be useful in diagnosing, prognosing, preventing, and/or treating thalassemias, including, but not limited to major and minor forms of alpha-thalassemia and beta-thalassemia.

[0691] In another embodiment, the polynucleotides, polypeptides, antibodies, and/or agonists or antagonists of the present invention may be useful in diagnosing, prognosing, preventing, and/or treating bleeding disorders including, but not limited to, thrombocytopenia (e.g., idiopathic thrombocytopenic purpura, and thrombotic thrombocytopenic purpura), Von Willebrand's disease, hereditary platelet disorders (e.g., storage pool disease such as Chediak-Higashi and Hermansky-Pudlak syndromes, thromboxane A2 dysfunction, thromboasthenia, and Bernard-Soulier syndrome), hemolytic-uremic syndrome, hemophelias such as hemophelia A or Factor VII deficiency and Christmas disease or Factor IX deficiency, Hereditary Hemorhhagic Telangiectsia, also known as Rendu-Osler-Weber syndrome, allergic purpura (Henoch Schonlein purpura) and disseminated intravascular coagulation.

[0692] The effect of the polynucleotides, polypeptides, antibodies, and/or agonists or antagonists of the present invention on the clotting time of blood may be monitored using any of the clotting tests known in the art including, but not limited to, whole blood partial thromboplastin time (PTT), the activated partial thromboplastin time (aPTT), the activated clotting time (ACT), the recalcified activated clotting time, or the Lee-White Clotting time.

[0693] Several diseases and a variety of drugs can cause platelet dysfunction. Thus, in a specific embodiment, the polynucleotides, polypeptides, antibodies, and/or agonists or antagonists of the present invention may be useful in diagnosing, prognosing, preventing, and/or treating acquired platelet dysfunction such as platelet dysfunction accompanying kidney failure, leukemia, multiple myeloma, cirrhosis of the liver, and systemic lupus erythematosus as well as platelet dysfunction associated with drug treatments, including treatment with aspirin, ticlopidine, nonsteroidal anti-inflammatory drugs (used for arthritis, pain, and sprains), and penicillin in high doses.

[0694] In another embodiment, the polynucleotides, polypeptides, antibodies, and/or agonists or antagonists of the present invention may be useful in diagnosing, prognosing, preventing, and/or treating diseases and disorders characterized by or associated with increased or decreased numbers of white blood cells. Leukopenia occurs when the number of white blood cells decreases below normal. Leukopenias include, but are not limited to, neutropenia and lymphocytopenia. An increase in the number of white blood cells compared to normal is known as leukocytosis. The body generates increased numbers of white blood cells during infection. Thus, leukocytosis may simply be a normal physiological parameter that reflects infection. Alternatively, leukocytosis may be an indicator of injury or other disease such as cancer. Leokocytoses, include but are not limited to, eosinophilia, and accumulations of macrophages. In specific embodiments, the polynucleotides, polypeptides, antibodies, and/or agonists or antagonists of the present invention may be useful in diagnosing, prognosing, preventing, and/or treating leukopenia. In other specific embodiments, the polynucleotides, polypeptides, antibodies, and/or agonists or antagonists of the present invention may be useful in diagnosing, prognosing, preventing, and/or treating leukocytosis.

[0695] Leukopenia may be a generalized decreased in all types of white blood cells, or may be a specific depletion of particular types of white blood cells. Thus, in specific embodiments, the polynucleotides, polypeptides, antibodies, and/or agonists or antagonists of the present invention may be useful in diagnosing, prognosing, preventing, and/or treating decreases in neutrophil numbers, known as neutropenia. Neutropenias that may be diagnosed, prognosed, prevented, and/or treated by the polynucleotides, polypeptides, antibodies, and/or agonists or antagonists of the present invention include, but are not limited to, infantile genetic agranulocytosis, familial neutropenia, cyclic neutropenia, neutropenias resulting from or associated with dietary deficiencies (e.g., vitamin B 12 deficiency or folic acid deficiency), neutropenias resulting from or associated with drug treatments (e.g., antibiotic regimens such as penicillin treatment, sulfonamide treatment, anticoagulant treatment, anticonvulsant drugs, anti-thyroid drugs, and cancer chemotherapy), and neutropenias resulting from increased neutrophil destruction that may occur in association with some bacterial or viral infections, allergic disorders, autoimmune diseases, conditions in which an individual has an enlarged spleen (e.g., Felty syndrome, malaria and sarcoidosis), and some drug treatment regimens.

[0696] The polynucleotides, polypeptides, antibodies, and/or agonists or antagonists of the present invention may be useful in diagnosing, prognosing, preventing, and/or treating lymphocytopenias (decreased numbers of B and/or T lymphocytes), including, but not limited lymphocytopenias resulting from or associated with stress, drug treatments (e.g., drug treatment with corticosteroids, cancer chemotherapies, and/or radiation therapies), AIDS infection and/or other diseases such as, for example, cancer, rheumatoid arthritis, systemic lupus erythematosus, chronic infections, some viral infections and/or hereditary disorders (e.g., DiGeorge syndrome, Wiskott-Aldrich Syndome, severe combined-immunodeficiency, ataxia telangiectsia).

[0697] The polynucleotides, polypeptides, antibodies, and/or agonists or antagonists of the present invention may be useful in diagnosing, prognosing, preventing, and/or treating diseases and disorders associated with macrophage numbers and/or macrophage function including, but not limited to, Gaucher's disease, Niemann-Pick disease, Letterer-Siwe disease and Hand-Schuller-Christian disease.

[0698] In another embodiment, the polynucleotides, polypeptides, antibodies, and/or agonists or antagonists of the present invention may be useful in diagnosing, prognosing, preventing, and/or treating diseases and disorders associated with eosinophil numbers and/or eosinophil function including, but not limited to, idiopathic hypereosinophilic syndrome, eosinophilia-myalgia syndrome, and Hand-Schuller-Christian disease.

[0699] In yet another embodiment, the polynucleotides, polypeptides, antibodies, and/or agonists or antagonists of the present invention may be useful in diagnosing, prognosing, preventing, and/or treating leukemias and lymphomas including, but not limited to, acute lymphocytic (lymphpblastic) leukemia (ALL), acute myeloid (myelocytic, myelogenous, myeloblastic, or myelomonocytic) leukemia, chronic lymphocytic leukemia (e.g., B cell leukemias, T cell leukemias, Sezary syndrome, and Hairy cell leukemia), chronic myelocytic (myeloid, myelogenous, or granulocytic) leukemia, Hodgkin's lymphoma, non-hodgkin's lymphoma, Burkitt's lymphoma, and mycosis fungoides.

[0700] In other embodiments, the polynucleotides, polypeptides, antibodies, and/or agonists or antagonists of the present invention may be useful in diagnosing, prognosing, preventing, and/or treating diseases and disorders of plasma cells including, but not limited to, plasma cell dyscrasias, monoclonal gammaopathies, monoclonal gammopathies of undetermined significance, multiple myeloma, macroglobulinemia, Waldenstrom's macroglobulinemia, cryoglobulinemia, and Raynaud's phenomenon.

[0701] In other embodiments, the polynucleotides, polypeptides, antibodies, and/or agonists or antagonists of the present invention may be useful in treating, preventing, and/or diagnosing myeloproliferative disorders, including but not limited to, polycythemia vera, relative polycythemia, secondary polycythemia, myelofibrosis, acute myelofibrosis, agnogenic myelod metaplasia, thrombocythemia, (including both primary and seconday thrombocythemia) and chronic myelocytic leukemia.

[0702] In other embodiments, the polynucleotides, polypeptides, antibodies, and/or agonists or antagonists of the present invention may be useful as a treatment prior to surgery, to increase blood cell production.

[0703] In other embodiments, the polynucleotides, polypeptides, antibodies, and/or agonists or antagonists of the present invention may be useful as an agent to enhance the migration, phagocytosis, superoxide production, antibody dependent cellular cytotoxicity of neutrophils, eosionophils and macrophages.

[0704] In other embodiments, the polynucleotides, polypeptides, antibodies, and/or agonists or antagonists of the present invention may be useful as an agent to increase the number of stem cells in circulation prior to stem cells pheresis. In another specific embodiment, the polynucleotides, polypeptides, antibodies, and/or agonists or antagonists of the present invention may be useful as an agent to increase the number of stem cells in circulation prior to platelet pheresis.

[0705] In other embodiments, the polynucleotides, polypeptides, antibodies, and/or agonists or antagonists of the present invention may be useful as an agent to increase cytokine production.

[0706] In other embodiments, the polynucleotides, polypeptides, antibodies, and/or agonists or antagonists of the present invention may be useful in preventing, diagnosing, and/or treating primary hematopoietic disorders.

Hyperproliferative Disorders

[0707] In certain embodiments, polynucleotides or polypeptides, or agonists or antagonists of the present invention can be used to treat or detect hyperproliferative disorders, including neoplasms. Polynucleotides or polypeptides, or agonists or antagonists of the present invention may inhibit the proliferation of the disorder through direct or indirect interactions. Alternatively, Polynucleotides or polypeptides, or agonists or antagonists of the present invention may proliferate other cells which can inhibit the hyperproliferative disorder.

[0708] For example, by increasing an immune response, particularly increasing antigenic qualities of the hyperproliferative disorder or by proliferating, differentiating, or mobilizing T-cells, hyperproliferative disorders can be treated. This immune response may be increased by either enhancing an existing immune response, or by initiating a new immune response. Alternatively, decreasing an immune response may also be a method of treating hyperproliferative disorders, such as a chemotherapeutic agent.

[0709] Examples of hyperproliferative disorders that can be treated or detected by polynucleotides or polypeptides, or agonists or antagonists of the present invention include, but are not limited to neoplasms located in the: colon, abdomen, bone, breast, digestive system, liver, pancreas, peritoneum, endocrine glands (adrenal, parathyroid, pituitary, testicles, ovary, thymus, thyroid), eye, head and neck, nervous (central and peripheral), lymphatic system, pelvis, skin, soft tissue, spleen, thorax, and urogenital tract.

[0710] Similarly, other hyperproliferative disorders can also be treated or detected by polynucleotides or polypeptides, or agonists or antagonists of the present invention. Examples of such hyperproliferative disorders include, but are not limited to: Acute Childhood Lymphoblastic Leukemia, Acute Lymphoblastic Leukemia, Acute Lymphocytic Leukemia, Acute Myeloid Leukemia, Adrenocortical Carcinoma, Adult (Primary) Hepatocellular Cancer, Adult (Primary) Liver Cancer, Adult Acute Lymphocytic Leukemia, Adult Acute Myeloid Leukemia, Adult Hodgkin's Disease, Adult Hodgkin's Lymphoma, Adult Lymphocytic Leukemia, Adult Non-Hodgkin's Lymphoma, Adult Primary Liver Cancer, Adult Soft Tissue Sarcoma, AIDS-Related Lymphoma, AIDS-Related Malignancies, Anal Cancer, Astrocytoma, Bile Duct Cancer, Bladder Cancer, Bone Cancer, Brain Stem Glioma, Brain Tumors, Breast Cancer, Cancer of the Renal Pelvis and Ureter, Central Nervous System (Primary) Lymphoma, Central Nervous System Lymphoma, Cerebellar Astrocytoma, Cerebral Astrocytoma, Cervical Cancer, Childhood (Primary) Hepatocellular Cancer, Childhood (Primary) Liver Cancer, Childhood Acute Lymphoblastic Leukemia, Childhood Acute Myeloid Leukemia, Childhood Brain Stem Glioma, Childhood Cerebellar Astrocytoma, Childhood Cerebral Astrocytoma, Childhood Extracranial Germ Cell Tumors, Childhood Hodgkin's Disease, Childhood Hodgkin's Lymphoma, Childhood Hypothalamic and Visual Pathway Glioma, Childhood Lymphoblastic Leukemia, Childhood Medulloblastoma, Childhood Non-Hodgkin's Lymphoma, Childhood Pineal and Supratentorial Primitive Neuroectodermal Tumors, Childhood Primary Liver Cancer, Childhood Rhabdomyosarcoma, Childhood Soft Tissue Sarcoma, Childhood Visual Pathway and Hypothalamic Glioma, Chronic Lymphocytic Leukemia, Chronic Myelogenous Leukemia, Colon Cancer, Cutaneous T-Cell Lymphoma, Endocrine Pancreas Islet Cell Carcinoma, Endometrial Cancer, Ependymoma, Epithelial Cancer, Esophageal Cancer, Ewing's Sarcoma and Related Tumors, Exocrine Pancreatic Cancer, Extracranial Gern Cell Tumor, Extragonadal Germ Cell Tumor, Extrahepatic Bile Duct Cancer, Eye Cancer, Female Breast Cancer, Gaucher's Disease, Gallbladder Cancer, Gastric Cancer, Gastrointestinal Carcinoid Tumor, Gastrointestinal Tumors, Germ Cell Tumors, Gestational Trophoblastic Tumor, Hairy Cell Leukemia, Head and Neck Cancer, Hepatocellular Cancer, Hodgkin's Disease, Hodgkin's Lymphoma, Hypergammaglobulinemia, Hypopharyngeal Cancer, Intestinal Cancers, Intraocular Melanoma, Islet Cell Carcinoma, Islet Cell Pancreatic Cancer, Kaposi's Sarcoma, Kidney Cancer, Laryngeal Cancer, Lip and Oral Cavity Cancer, Liver. Cancer, Lung Cancer, Lymphoproliferative Disorders, Macroglobulinemia, Male Breast Cancer, Malignant Mesothelioma, Malignant Thymoma, Medulloblastoma, Melanoma, Mesothelioma, Metastatic Occult Primary Squamous Neck Cancer, Metastatic Primary Squamous Neck Cancer, Metastatic Squamous Neck Cancer, Multiple Myeloma, Multiple Myeloma/Plasma Cell Neoplasm, Myelodysplastic Syndrome, Myelogenous Leukemia, Myeloid. Leukemia, Myeloproliferative Disorders, Nasal Cavity and Paranasal Sinus Cancer, Nasopharyngeal Cancer, Neuroblastoma, Non-Hodgkin's Lymphoma During Pregnancy, Nonmelanoma Skin Cancer, Non-Small Cell Lung Cancer, Occult Primary Metastatic Squamous Neck Cancer, Oropharyngeal Cancer, Osteo-/Malignant Fibrous Sarcoma, Osteosarcoma/Malignant Fibrous Histiocytoma, Osteosarcoma/Malignant Fibrous Histiocytoma of Bone, Ovarian Epithelial Cancer, Ovarian Germ Cell Tumor, Ovarian Low Malignant Potential Tumor, Pancreatic Cancer, Paraproteinemias, Purpura, Parathyroid Cancer, Penile Cancer, Pheochromocytoma, Pituitary Tumor, Plasma Cell Neoplasm/Multiple Myeloma, Primary Central Nervous System Lymphoma, Primary Liver Cancer, Prostate Cancer, Rectal Cancer, Renal Cell Cancer, Renal Pelvis and Ureter Cancer, Retinoblastoma, Rhabdomyosarcoma, Salivary Gland Cancer, Sarcoidosis Sarcomas, Sezary Syndrome, Skin Cancer, Small Cell Lung Cancer, Small Intestine Cancer, Soft Tissue Sarcoma, Squamous Neck Cancer, Stomach Cancer, Supratentorial Primitive Neuroectodermal and Pineal Tumors, T-Cell Lymphoma, Testicular Cancer, Thymoma, Thyroid Cancer, Transitional Cell Cancer of the Renal Pelvis and Ureter, Transitional Renal Pelvis and Ureter Cancer, Trophoblastic Tumors, Ureter and Renal Pelvis Cell Cancer, Urethral Cancer, Uterine Cancer, Uterine Sarcoma, Vaginal Cancer, Visual Pathway and Hypothalamic Glioma, Vulvar Cancer, Waldenstrom's Macroglobulinemia, Wilms' Tumor, and any other hyperproliferative disease, besides neoplasia, located in an organ system listed above.

[0711] In another preferred embodiment, polynucleotides or polypeptides, or agonists or antagonists of the present invention are used to diagnose, prognose, prevent, and/or treat premalignant conditions and to prevent progression to a neoplastic or malignant state, including but not limited to those disorders described above. Such uses are indicated in conditions known or suspected of preceding progression to neoplasia or cancer, in particular, where non-neoplastic cell growth consisting of hyperplasia, metaplasia, or most particularly, dysplasia has occurred (for review of such abnormal growth conditions, see Robbins and Angell, 1976, Basic Pathology, 2d Ed., W. B. Saunders Co., Philadelphia, pp. 68-79.)

[0712] Hyperplasia is a form of controlled cell proliferation, involving an increase in cell number in a tissue or organ, without significant alteration in structure or function. Hyperplastic disorders which can be diagnosed, prognosed, prevented, and/or treated with compositions of the invention (including polynucleotides, polypeptides, agonists or antagonists) include, but are not limited to, angiofollicular mediastinal lymph node hyperplasia, angiolymphoid hyperplasia with eosinophilia, atypical melanocytic hyperplasia, basal cell hyperplasia, benign giant lymph node hyperplasia, cementum hyperplasia, congenital adrenal hyperplasia, congenital sebaceous hyperplasia, cystic hyperplasia, cystic hyperplasia of the breast, denture hyperplasia, ductal hyperplasia, endometrial hyperplasia, fibromuscular hyperplasia, focal epithelial hyperplasia, gingival hyperplasia, inflammatory fibrous hyperplasia, inflammatory papillary hyperplasia, intravascular papillary endothelial hyperplasia, nodular hyperplasia of prostate, nodular regenerative hyperplasia, pseudoepitheliomatous hyperplasia, senile sebaceous hyperplasia, and verrucous hyperplasia.

[0713] Metaplasia is a form of controlled cell growth in which one type of adult or fully differentiated cell substitutes for another type of adult cell. Metaplastic disorders which can be diagnosed, prognosed, prevented, and/or treated with compositions of the invention (including polynucleotides, polypeptides, agonists or antagonists) include, but are not limited to, agnogenic myeloid metaplasia, apocrine metaplasia, atypical metaplasia, autoparenchymatous metaplasia, connective tissue metaplasia, epithelial metaplasia, intestinal metaplasia, metaplastic anemia, metaplastic ossification, metaplastic polyps, myeloid metaplasia, primary myeloid metaplasia, secondary myeloid metaplasia, squamous metaplasia, squamous metaplasia of amnion, and symptomatic myeloid metaplasia.

[0714] Dysplasia is frequently a forerunner of cancer, and is found mainly in the epithelia; it is the most disorderly form of non-neoplastic cell growth, involving a loss in individual cell uniformity and in the architectural orientation of cells. Dysplastic cells often have abnormally large, deeply stained nuclei, and exhibit pleomorphism. Dysplasia characteristically occurs where there exists chronic irritation or inflammation. Dysplastic disorders which can be diagnosed, prognosed, prevented, and/or treated with compositions of the invention (including polynucleotides, polypeptides, agonists or antagonists) include, but are not limited to, anhidrotic ectodermal dysplasia, anterofacial dysplasia, asphyxiating thoracic dysplasia, atriodigital dysplasia, bronchopulmonary dysplasia, cerebral dysplasia, cervical dysplasia, chondroectodermal dysplasia, cleidocranial dysplasia, congenital ectodermal dysplasia, craniodiaphysial dysplasia, craniocarpotarsal dysplasia, craniometaphysial dysplasia, dentin dysplasia, diaphysial dysplasia, ectodermal dysplasia, enamel dysplasia, encephalo-ophthalmic dysplasia, dysplasia epiphysialis hemimelia, dysplasia epiphysialis multiplex, dysplasia epiphysialis punctata, epithelial dysplasia, faciodigitogenital dysplasia, familial fibrous dysplasia of jaws, familial white folded dysplasia, fibromuscular dysplasia, fibrous dysplasia of bone, florid osseous dysplasia, hereditary renal-retinal dysplasia, hidrotic ectodermal dysplasia, hypohidrotic ectodermal dysplasia, lymphopenic thymic dysplasia, mammary dysplasia, mandibulofacial dysplasia, metaphysial dysplasia, Mondini dysplasia, monostotic fibrous dysplasia, mucoepithelial dysplasia, multiple epiphysial dysplasia, oculoauriculovertebral dysplasia, oculodentodigital dysplasia, oculovertebral dysplasia, odontogenic dysplasia, ophthalmomandibulomelic dysplasia, periapical cemental dysplasia, polyostotic fibrous dysplasia, pseudoachondroplastic spondyloepiphysial dysplasia, retinal dysplasia, septo-optic dysplasia, spondyloepiphysial dysplasia, and ventriculoradial dysplasia.

[0715] Additional pre-neoplastic disorders which can be diagnosed, prognosed, prevented, and/or treated with compositions of the invention (including polynucleotides, polypeptides, agonists or antagonists) include, but are not limited to, benign dysproliferative disorders (e.g., benign tumors, fibrocystic conditions, tissue hypertrophy, intestinal polyps, colon polyps, and esophageal dysplasia), leukoplakia, keratoses, Bowen's disease, Farmer's Skin, solar cheilitis, and solar keratosis.

[0716] In another embodiment, a polypeptide of the invention, or polynucleotides, antibodies, agonists, or antagonists corresponding to that polypeptide, may be used to diagnose and/or prognose disorders associated with the tissue(s) in which the polypeptide of the invention is expressed, including one, two, three, four, five, or more tissues disclosed in Table 1B.2, column 5 (Tissue Distribution Library Code).

[0717] In another embodiment, polynucleotides, polypeptides, antibodies, and/or agonists or antagonists of the present invention conjugated to a toxin or a radioactive isotope, as described herein, may be used to treat cancers and neoplasms, including, but not limited to those described herein. In a further preferred embodiment, polynucleotides, polypeptides, antibodies, and/or agonists or antagonists of the present invention conjugated to a toxin or a radioactive isotope, as described herein, may be used to treat acute myelogenous leukemia.

[0718] Additionally, polynucleotides, polypeptides, and/or agonists or antagonists of the invention may affect apoptosis, and therefore, would be useful in treating a number of diseases associated with increased cell survival or the inhibition of apoptosis. For example, diseases associated with increased cell survival or the inhibition of apoptosis that could be diagnosed, prognosed, prevented, and/or treated by polynucleotides, polypeptides, and/or agonists or antagonists of the invention, include cancers (such as follicular lymphomas, carcinomas with p53 mutations, and hormone-dependent tumors, including, but not limited to colon cancer, cardiac tumors, pancreatic cancer, melanoma, retinoblastoma, glioblastoma, lung cancer, intestinal cancer, testicular cancer, stomach cancer, neuroblastoma, myxoma, myoma, lymphoma, endothelioma, osteoblastoma, osteoclastoma, osteosarcoma, chondrosarcoma, adenoma, breast cancer, prostate cancer, Kaposi's sarcoma and ovarian cancer); autoimmune disorders such as, multiple sclerosis, Sjogren's syndrome, Hashimoto's thyroiditis, biliary cirrhosis, Behcet's disease, Crohn's disease, polymyositis, systemic lupus erythematosus and immune-related glomerulonephritis and rheumatoid arthritis) and viral infections (such as herpes viruses, pox viruses and adenoviruses), inflammation, graft v. host disease, acute graft rejection, and chronic graft rejection.

[0719] In preferred embodiments, polynucleotides, polypeptides, and/or agonists or antagonists of the invention are used to inhibit growth, progression, and/or metastasis of cancers, in particular those listed above.

[0720] Additional diseases or conditions associated with increased cell survival that could be diagnosed, prognosed, prevented, and/or treated by polynucleotides, polypeptides, and/or agonists or antagonists of the invention, include, but are not limited to, progression, and/or metastases of malignancies and related disorders such as leukemia (including acute leukemias (e.g., acute lymphocytic leukemia, acute myelocytic leukemia (including myeloblastic, promyelocytic, myelomonocytic, monocytic, and erythroleukemia)) and chronic leukemias (e.g., chronic myelocytic (granulocytic) leukemia and chronic lymphocytic leukemia)), polycythemia vera, lymphomas (e.g., Hodgkin's disease and non-Hodgkin's disease), multiple myeloma, Waldenstrom's macroglobulinemia, heavy chain disease, and solid tumors including, but not limited to, sarcomas and carcinomas such as fibrosarcoma, myxosarcoma, liposarcoma, chondrosarcoma, osteogenic sarcoma, chordoma, angiosarcoma, endotheliosarcoma, lymphangiosarcoma, lymphangioendotheliosarcoma, synovioma, mesothelioma, Ewing's tumor, leiomyosarcoma, rhabdomyosarcoma, colon carcinoma, pancreatic cancer, breast cancer, ovarian cancer, prostate cancer, squamous cell carcinoma, basal cell carcinoma, adenocarcinoma, sweat gland carcinoma, sebaceous gland carcinoma, papillary carcinoma, papillary adenocarcinomas, cystadenocarcinoma, medullary carcinoma, bronchogenic carcinoma, renal cell carcinoma, hepatoma, bile duct carcinoma, choriocarcinoma, seminoma, embryonal carcinoma, Wilm's tumor, cervical cancer, testicular tumor, lung carcinoma, small cell lung carcinoma, bladder carcinoma, epithelial carcinoma, glioma, astrocytoma, medulloblastoma, craniopharyngioma, ependymoma, pinealoma, emangioblastoma, acoustic neuroma, oligodendroglioma, menangioma, melanoma, neuroblastoma, and retinoblastoma.

[0721] Diseases associated with increased apoptosis that could be diagnosed, prognosed, prevented, and/or treated by polynucleotides, polypeptides, and/or agonists or antagonists of the invention, include AIDS; neurodegenerative disorders (such as Alzheimer's disease, Parkinson's disease, amyotrophic lateral sclerosis, retinitis pigmentosa, cerebellar degeneration and brain tumor or prior associated disease); autoimmune disorders (such as, multiple sclerosis, Sjogren's syndrome, Hashimoto's thyroiditis, biliary cirrhosis, Behcet's disease, Crohn's disease, polymyositis, systemic lupus erythematosus and immune-related glomerulonephritis and rheumatoid arthritis) myelodysplastic syndromes (such as aplastic anemia), graft v. host disease, ischemic injury (such as that caused by myocardial infarction, stroke and reperfusion injury), liver injury (e.g., hepatitis related liver injury, ischemia/reperfusion injury, cholestosis (bile duct injury) and liver cancer); toxin-induced liver disease (such as that caused by alcohol), septic shock, cachexia and anorexia.

[0722] Hyperproliferative diseases and/or disorders that could be diagnosed, prognosed, prevented, and/or treated by polynucleotides, polypeptides, and/or agonists or antagonists of the invention, include, but are not limited to, neoplasms located in the liver, abdomen, bone, breast, digestive system, pancreas, peritoneum, endocrine glands (adrenal, parathyroid, pituitary, testicles, ovary, thymus, thyroid), eye, head and neck, nervous system (central and peripheral), lymphatic system, pelvis, skin, soft tissue, spleen, thorax, and urogenital tract.

[0723] Similarly, other hyperproliferative disorders can also be diagnosed, prognosed, prevented, and/or treated by polynucleotides, polypeptides, and/or agonists or antagonists of the invention. Examples of such hyperproliferative disorders include, but are not limited to: hypergammaglobulinemia, lymphoproliferative disorders, paraproteinemias, purpura, sarcoidosis, Sezary Syndrome, Waldenstron's macroglobulinemia, Gaucher's Disease, histiocytosis, and any other hyperproliferative disease, besides neoplasia, located in an organ system listed above.

[0724] Another preferred embodiment utilizes polynucleotides of the present invention to inhibit aberrant cellular division, by gene therapy using the present invention, and/or protein fusions or fragments thereof.

[0725] Thus, the present invention provides a method for treating cell proliferative disorders by inserting into an abnormally proliferating cell a polynucleotide of the present invention, wherein said polynucleotide represses said expression.

[0726] Another embodiment of the present invention provides a method of treating cell-proliferative disorders in individuals comprising administration of one or more active gene copies of the present invention to an abnormally proliferating cell or cells. In a preferred embodiment, polynucleotides of the present invention is a DNA construct comprising a recombinant expression vector effective in expressing a DNA sequence encoding said polynucleotides. In another preferred embodiment of the present invention, the DNA construct encoding the poynucleotides of the present invention is inserted into cells to be treated utilizing a retrovirus, or more preferably an adenoviral vector (See G J. Nabel, et. al., PNAS 1999 96: 324-326, which is hereby incorporated by reference). In a most preferred embodiment, the viral vector is defective and will not transform non-proliferating cells, only proliferating cells. Moreover, in a preferred embodiment, the polynucleotides of the present invention inserted into proliferating cells either alone, or in combination with or fused to other polynucleotides, can then be modulated via an external stimulus (i.e. magnetic, specific small molecule, chemical, or drug administration, etc.), which acts upon the promoter upstream of said polynucleotides to induce expression of the encoded protein product. As such the beneficial therapeutic affect of the present invention may be expressly modulated (i.e. to increase, decrease, or inhibit expression of the present invention) based upon said external stimulus.

[0727] Polynucleotides of the present invention may be useful in repressing expression of oncogenic genes or antigens. By “repressing expression of the oncogenic genes” is intended the suppression of the transcription of the gene, the degradation of the gene transcript (pre-message RNA), the inhibition of splicing, the destruction of the messenger RNA, the prevention of the post-translational modifications of the protein, the destruction of the protein, or the inhibition of the normal function of the protein.

[0728] For local administration to abnormally proliferating cells, polynucleotides of the present invention may be administered by any method known to those of skill in the art including, but not limited to transfection, electroporation, microinjection of cells, or in vehicles such as liposomes, lipofectin, or as naked polynucleotides, or any other method described throughout the specification. The polynucleotide of the present invention may be delivered by known gene delivery systems such as, but not limited to, retroviral vectors (Gilboa, J. Virology 44:845 (1982); Hocke, Nature 320:275 (1986); Wilson, et al., Proc. Natl. Acad. Sci. U.S.A. 85:3014), vaccinia virus system (Chakrabarty et al., Mol. Cell Biol. 5:3403 (1985) or other efficient DNA delivery systems (Yates et al., Nature 313:812 (1985)) known to those skilled in the art. These references are exemplary only and are hereby incorporated by reference. In order to specifically deliver or transfect cells which are abnormally proliferating and spare non-dividing cells, it is preferable to utilize a retrovirus, or adenoviral (as described in the art and elsewhere herein) delivery system known to those of skill in the art. Since host DNA replication is required for retroviral DNA to integrate and the retrovirus will be unable to self replicate due to the lack of the retrovirus genes needed for its life cycle. Utilizing such a retroviral delivery system for polynucleotides of the present invention will target said gene and constructs to abnormally proliferating cells and will spare the non-dividing normal cells.

[0729] The polynucleotides of the present invention may be delivered directly to cell proliferative disorder/disease sites in internal organs, body cavities and the like by use of imaging devices used to guide an injecting needle directly to the disease site. The polynucleotides of the present invention may also be administered to disease sites at the time of surgical intervention.

[0730] By “cell proliferative disease” is meant any human or animal disease or disorder, affecting any one or any combination of organs, cavities, or body parts, which is characterized by single or multiple local abnormal proliferations of cells, groups of cells, or tissues, whether benign or malignant.

[0731] Any amount of the polynucleotides of the present invention may be administered as long as it has a biologically inhibiting effect on the proliferation of the treated cells. Moreover, it is possible to administer more than one of the polynucleotide of the present invention simultaneously to the same site. By “biologically inhibiting” is meant partial or total growth inhibition as well as decreases in the rate of proliferation or growth of the cells. The biologically inhibitory dose may be determined by assessing the effects of the polynucleotides of the present invention on target malignant or abnormally proliferating cell growth in tissue culture, tumor growth in animals and cell cultures, or any other method known to one of ordinary skill in the art.

[0732] The present invention is further directed to antibody-based therapies which involve administering of anti-polypeptides and anti-polynucleotide antibodies to a mammalian, preferably human, patient for treating one or more of the described disorders. Methods for producing anti-polypeptides and anti-polynucleotide antibodies polyclonal and monoclonal antibodies are described in detail elsewhere herein. Such antibodies may be provided in pharmaceutically acceptable compositions as known in the art or as described herein.

[0733] A summary of the ways in which the antibodies of the present invention may be used therapeutically includes binding polynucleotides or polypeptides of the present invention locally or systemically in the body or by direct cytotoxicity of the antibody, e.g. as mediated by complement (CDC) or by effector cells (ADCC). Some of these approaches are described in more detail below. Armed with the teachings provided herein, one of ordinary skill in the art will know how to use the antibodies of the present invention for diagnostic, monitoring or therapeutic purposes without undue experimentation.

[0734] In particular, the antibodies, fragments and derivatives of the present invention are useful for treating a subject having or developing cell proliferative and/or differentiation disorders as described herein. Such treatment comprises administering a single or multiple doses of the antibody, or a fragment, derivative, or a conjugate thereof.

[0735] The antibodies of this invention may be advantageously utilized in combination with other monoclonal or chimeric antibodies, or with lymphokines or hematopoietic growth factors, for example, which serve to increase the number or activity of effector cells which interact with the antibodies.

[0736] It is preferred to use high affinity and/or potent in vivo inhibiting and/or neutralizing antibodies against polypeptides or polynucleotides of the present invention, fragments or regions thereof, for both immunoassays directed to and therapy of disorders related to polynucleotides or polypeptides, including fragements thereof, of the present invention. Such antibodies, fragments, or regions, will preferably have an affinity for polynucleotides or polypeptides, including fragements thereof. Preferred binding affinities include those with a dissociation constant or Kd less than 5×10⁻⁶M, 10⁻⁶M, 5×10⁻⁷M, 10⁻⁷M, 5×10⁻⁸M, 10⁻⁸M, 5×10⁻⁹M, 10⁻⁹M, 5×10⁻¹⁰M, 10⁻¹⁰M, 5×10⁻¹¹M, 10⁻¹¹M, 5×10⁻¹²M, 10⁻¹²M, 5×10⁻¹³M, 10⁻¹³M, 5×10⁻¹⁴M, 10⁻¹⁴M, 5×10⁻¹⁵M, and 10⁻¹⁵M.

[0737] Moreover, polypeptides of the present invention are useful in inhibiting the angiogenesis of proliferative cells or tissues, either alone, as a protein fusion, or in combination with other polypeptides directly or indirectly, as described elsewhere herein. In a most preferred embodiment, said anti-angiogenesis effect may be achieved indirectly, for example, through the inhibition of hematopoietic, tumor-specific cells, such as tumor-associated macrophages (See Joseph I B, et al. J Natl Cancer Inst, 90(21):1648-53 (1998), which is hereby incorporated by reference). Antibodies directed to polypeptides or polynucleotides of the present invention may also result in inhibition of angiogenesis directly, or indirectly (See Witte L, et al., Cancer Metastasis Rev. 17(2):155-61 (1998), which is hereby incorporated by reference)).

[0738] Polypeptides, including protein fusions, of the present invention, or fragments thereof may be useful in inhibiting proliferative cells or tissues through the induction of apoptosis. Said polypeptides may act either directly, or indirectly to induce apoptosis of proliferative cells and tissues, for example in the activation of a death-domain receptor, such as tumor necrosis factor (TNF) receptor-1, CD95 (Fas/APO-1), TNF-receptor-related apoptosis-mediated protein (TRAMP) and TNF-related apoptosis-inducing ligand (TRAIL) receptor-1 and -2 (See Schulze-Osthoff K, et. al., Eur J Biochem 254(3):439-59 (1998), which is hereby incorporated by reference). Moreover, in another preferred embodiment of the present invention, said polypeptides may induce apoptosis through other mechanisms, such as in the activation of other proteins which will activate apoptosis, or through stimulating the expression of said proteins, either alone or in combination with small molecule drugs or adjuviants, such as apoptonin, galectins, thioredoxins, anti-inflammatory proteins (See for example, Mutat Res 400(1-2):447-55 (1998), Med Hypotheses 50(5):423-33 (1998), Chem Biol Interact. Apr 24; 111-112:23-34 (1998), J Mol Med.76(6):402-12 (1998), Int J Tissue React; 20(1):3-15 (1998), which are all hereby incorporated by reference).

[0739] Polypeptides, including protein fusions to, or fragments thereof, of the present invention are useful in inhibiting the metastasis of proliferative cells or tissues. Inhibition may occur as a direct result of administering polypeptides, or antibodies directed to said polypeptides as described elsewere herein, or indirectly, such as activating the expression of proteins known to inhibit metastasis, for example alpha 4 integrins, (See, e.g., Curr Top Microbiol Immunol 1998; 231:125-41 which is hereby incorporated by reference). Such thereapeutic affects of the present invention may be achieved either alone, or in combination with small molecule drugs or adjuvants.

[0740] In another embodiment, the invention provides a method of delivering compositions containing the polypeptides of the invention (e.g., compositions containing polypeptides or polypeptide antibodes associated with heterologous polypeptides, heterologous nucleic acids, toxins, or prodrugs) to targeted cells expressing the polypeptide of the present invention. Polypeptides or polypeptide antibodes of the invention may be associated with with heterologous polypeptides, heterologous nucleic acids, toxins, or prodrugs via hydrophobic, hydrophilic, ionic and/or covalent interactions.

[0741] Polypeptides, protein fusions to, or fragments thereof, of the present invention are useful in enhancing the immunogenicity and/or antigenicity of proliferating cells or tissues, either directly, such as would occur if the polypeptides of the present invention vaccinated the immune response to respond to proliferative antigens and immunogens, or indirectly, such as in activating the expression of proteins known to enhance the immune response (e.g. chemokines), to said antigens and immunogens.

Renal Disorders

[0742] Polynucleotides, polypeptides, antibodies, and/or agonists or antagonists of the present invention, may be used to treat, prevent, diagnose, and/or prognose disorders of the renal system. Renal disorders which can be diagnosed, prognosed, prevented, and/or treated with compositions of the invention include, but are not limited to, kidney failure, nephritis, blood vessel disorders of kidney, metabolic and congenital kidney disorders, urinary disorders of the kidney, autoimmune disorders, sclerosis and necrosis, electrolyte imbalance, and kidney cancers.

[0743] Kidney diseases which can be diagnosed, prognosed, prevented, and/or treated with compositions of the invention include, but are not limited to, acute kidney failure, chronic kidney failure, atheroembolic renal failure, end-stage renal disease, inflammatory diseases of the kidney (e.g., acute glomerulonephritis, postinfectious glomerulonephritis, rapidly progressive glomerulonephritis, nephrotic syndrome, membranous glomerulonephritis, familial nephrotic-syndrome, membranoproliferative glomerulonephritis I and II, mesangial proliferative glomerulonephritis, chronic glomerulonephritis, acute tubulointerstitial nephritis, chronic tubulointerstitial nephritis, acute post-streptococcal glomerulonephritis (PSGN), pyelonephritis, lupus nephritis, chronic nephritis, interstitial nephritis, and post-streptococcal glomerulonephritis), blood vessel disorders of the kidneys (e.g., kidney infarction, atheroembolic kidney disease, cortical necrosis, malignant nephrosclerosis, renal vein thrombosis, renal underperfusion, renal retinopathy, renal ischemia-reperfusion, renal artery embolism, and renal artery stenosis), and kidney disorders resulting form urinary tract disease (e.g., pyelonephritis, hydronephrosis, urolithiasis (renal lithiasis, nephrolithiasis), reflux nephropathy, urinary tract infections, urinary retention, and acute or chronic unilateral obstructive uropathy.)

[0744] In addition, compositions of the invention can be used to diagnose, prognose, prevent, and/or treat metabolic and congenital disorders of the kidney (e.g., uremia, renal amyloidosis, renal osteodystrophy, renal tubular acidosis, renal glycosuria, nephrogenic diabetes insipidus, cystinuria, Fanconi's syndrome, renal fibrocystic osteosis (renal rickets), Hartnup disease, Bartter's syndrome, Liddle's syndrome, polycystic kidney disease, medullary cystic disease, medullary sponge kidney, Alport's syndrome, nail-patella syndrome, congenital nephrotic syndrome, CRUSH syndrome, horseshoe kidney, diabetic nephropathy, nephrogenic diabetes insipidus, analgesic nephropathy, kidney stones, and membranous nephropathy), and autoimmune disorders of the kidney (e.g., systemic lupus erythematosus (SLE), Goodpasture syndrome, IgA nephropathy, and IgM mesangial proliferative glomerulonephritis).

[0745] Compositions of the invention can also be used to diagnose, prognose, prevent, and/or treat sclerotic or necrotic disorders of the kidney (e.g., glomerulosclerosis, diabetic nephropathy, focal segmental glomerulosclerosis (FSGS), necrotizing glomerulonephritis, and renal papillary necrosis), cancers of the kidney (e.g., nephroma, hypemephroma, nephroblastoma, renal cell cancer, transitional cell cancer, renal adenocarcinoma, squamous cell cancer, and Wilm's tumor), and electrolyte imbalances (e.g., nephrocalcinosis, pyuria, edema, hydronephritis, proteinuria, hyponatremia, hypematremia, hypokalemia, hyperkalemia, hypocalcemia, hypercalcemia, hypophosphatemia, and hyperphosphatemia).

[0746] Polypeptides may be administered using any method known in the art, including, but not limited to, direct needle injection at the delivery site, intravenous injection, topical administration, catheter infusion, biolistic injectors, particle accelerators, gelfoam sponge depots, other commercially available depot materials, osmotic pumps, oral or suppositorial solid pharmaceutical formulations, decanting or topical applications during surgery, aerosol delivery. Such methods are known in the art. Polypeptides may be administered as part of a Therapeutic, described in more detail below. Methods of delivering polynucleotides are described in more detail herein.

Cardiovascular Disorders

[0747] Polynucleotides or polypeptides, or agonists or antagonists of the present invention, may be used to treat, prevent, diagnose, and/or prognose cardiovascular disorders, including, but not limited to, peripheral artery disease, such as limb ischemia.

[0748] Cardiovascular disorders include, but are not limited to, cardiovascular abnormalities, such as arterio-arterial fistula, arteriovenous fistula, cerebral arteriovenous malformations, congenital heart defects, pulmonary atresia, and Scimitar Syndrome. Congenital heart defects include, but are not limited to, aortic coarctation, cor triatriatum, coronary vessel anomalies, crisscross heart, dextrocardia, patent ductus arteriosus, Ebstein's anomaly, Eisenmenger complex, hypoplastic left heart syndrome, levocardia, tetralogy of fallot, transposition of great vessels, double outlet right ventricle, tricuspid atresia, persistent truncus arteriosus, and heart septal defects, such as aortopulmonary septal defect, endocardial cushion defects, Lutembacher's Syndrome, trilogy of Fallot, ventricular heart septal defects.

[0749] Cardiovascular disorders also include, but are not limited to, heart disease, such as arrhythmias, carcinoid heart disease, high cardiac output, low cardiac output, cardiac tamponade, endocarditis (including bacterial), heart aneurysm, cardiac arrest, congestive heart failure, congestive cardiomyopathy, paroxysmal dyspnea, cardiac edema, heart hypertrophy, congestive cardiomyopathy, left ventricular hypertrophy, right ventricular hypertrophy, post-infarction heart rupture, ventricular septal rupture, heart valve diseases, myocardial diseases, myocardial ischemia, pericardial effusion, pericarditis (including constrictive and tuberculous), pneumopericardium, postpericardiotomy syndrome, pulmonary heart disease, rheumatic heart disease, ventricular dysfunction, hyperemia, cardiovascular pregnancy complications, Scimitar Syndrome, cardiovascular syphilis, and cardiovascular tuberculosis.

[0750] Arrhythmias include, but are not limited to, sinus arrhythmia, atrial fibrillation, atrial flutter, bradycardia, extrasystole, Adams-Stokes Syndrome, bundle-branch block, sinoatrial block, long QT syndrome, parasystole, Lown-Ganong-Levine Syndrome, Mahaim-type pre-excitation syndrome, Wolff-Parkinson-White syndrome, sick sinus syndrome, tachycardias, and ventricular fibrillation. Tachycardias include paroxysmal tachycardia, supraventricular tachycardia, accelerated idioventricular rhythm, atrioventricular nodal reentry tachycardia, ectopic atrial tachycardia, ectopic junctional tachycardia, sinoatrial nodal reentry tachycardia, sinus tachycardia, Torsades de Pointes, and ventricular tachycardia.

[0751] Heart valve diseases include, but are not limited to, aortic valve insufficiency, aortic valve stenosis, hear murmurs, aortic valve prolapse, mitral valve prolapse, tricuspid valve prolapse, mitral valve insufficiency, mitral valve stenosis, pulmonary atresia, pulmonary valve insufficiency, pulmonary valve stenosis, tricuspid atresia, tricuspid valve insufficiency, and tricuspid valve stenosis.

[0752] Myocardial diseases include, but are not limited to, alcoholic cardiomyopathy, congestive cardiomyopathy, hypertrophic cardiomyopathy, aortic subvalvular stenosis, pulmonary subvalvular stenosis, restrictive cardiomyopathy, Chagas cardiomyopathy, endocardial fibroelastosis, endomyocardial fibrosis, Kearns Syndrome, myocardial reperfusion injury, and myocarditis.

[0753] Myocardial ischemias include, but are not limited to, coronary disease, such as angina pectoris, coronary aneurysm, coronary arteriosclerosis, coronary thrombosis, coronary vasospasm, myocardial infarction and myocardial stunning.

[0754] Cardiovascular diseases also include vascular diseases such as aneurysms, angiodysplasia, angiomatosis, bacillary angiomatosis, Hippel-Lindau Disease, Klippel-Trenaunay-Weber Syndrome, Sturge-Weber Syndrome, angioneurotic edema, aortic diseases, Takayasu's Arteritis, aortitis, Leriche's Syndrome, arterial occlusive diseases, arteritis, enarteritis, polyarteritis nodosa, cerebrovascular disorders, diabetic angiopathies, diabetic retinopathy, embolisms, thrombosis, erythromelalgia, hemorrhoids, hepatic veno-occlusive disease, hypertension, hypotension, ischemia, peripheral vascular diseases, phlebitis, pulmonary veno-occlusive disease, Raynaud's disease, CREST syndrome, retinal vein occlusion, Scimitar syndrome, superior vena cava syndrome, telangiectasia, atacia telangiectasia, hereditary hemorrhagic telangiectasia, varicocele, varicose veins, varicose ulcer, vasculitis, and venous insufficiency.

[0755] Aneurysms include, but are not limited to, dissecting aneurysms, false aneurysms, infected aneurysms, ruptured aneurysms, aortic aneurysms, cerebral aneurysms, coronary aneurysms, heart aneurysms, and iliac aneurysms.

[0756] Arterial occlusive diseases include, but are not limited to, arteriosclerosis, intermittent claudication, carotid stenosis, fibromuscular dysplasias, mesenteric vascular occlusion, Moyamoya disease, renal artery obstruction, retinal artery occlusion, and thromboangiitis obliterans.

[0757] Cerebrovascular disorders include, but are not limited to, carotid artery diseases, cerebral amyloid angiopathy, cerebral aneurysm, cerebral anoxia, cerebral arteriosclerosis, cerebral arteriovenous malformation, cerebral artery diseases, cerebral embolism and thrombosis, carotid artery thrombosis, sinus thrombosis, Wallenberg's syndrome, cerebral hemorrhage, epidural hematoma, subdural hematoma, subaraxhnoid hemorrhage, cerebral infarction, cerebral ischemia (including transient), subclavian steal syndrome, periventricular leukomalacia, vascular headache, cluster headache, migraine, and vertebrobasilar insufficiency.

[0758] Embolisms include, but are not limited to, air embolisms, amniotic fluid embolisms, cholesterol embolisms, blue toe syndrome, fat embolisms, pulmonary embolisms, and thromoboembolisms. Thrombosis include, but are not limited to, coronary thrombosis, hepatic vein thrombosis, retinal vein occlusion, carotid artery thrombosis, sinus thrombosis, Wallenberg's syndrome, and thrombophlebitis.

[0759] Ischemic disorders include, but are not limited to, cerebral ischemia, ischemic colitis, compartment syndromes, anterior compartment syndrome, myocardial ischemia, reperfusion injuries, and peripheral limb ischemia. Vasculitis includes, but is not limited to, aortitis, arteritis, Behcet's Syndrome, Churg-Strauss Syndrome, mucocutaneous lymph node syndrome, thromboangiitis obliterans, hypersensitivity vasculitis, Schoenlein-Henoch purpura, allergic cutaneous vasculitis, and Wegener's granulomatosis.

[0760] Polypeptides may be administered using any method known in the art, including, but not limited to, direct needle injection at the delivery site, intravenous injection, topical administration, catheter infusion, biolistic injectors, particle accelerators, gelfoam sponge depots, other commercially available depot materials, osmotic pumps, oral or suppositorial solid pharmaceutical formulations, decanting or topical applications during surgery, aerosol delivery. Such methods are known in the art. Polypeptides may be administered as part of a Therapeutic, described in more detail below. Methods of delivering polynucleotides are described in more detail herein.

Respiratory Disorders

[0761] Polynucleotides or polypeptides, or agonists or antagonists of the present invention may be used to treat, prevent, diagnose, and/or prognose diseases and/or disorders of the respiratory system.

[0762] Diseases and disorders of the respiratory system include, but are not limited to, nasal vestibulitis, nonallergic rhinitis (e.g., acute rhinitis, chronic rhinitis, atrophic rhinitis, vasomotor rhinitis), nasal polyps, and sinusitis, juvenile angiofibromas, cancer of the nose and juvenile papillomas, vocal cord polyps, nodules (singer's nodules), contact ulcers, vocal cord paralysis, laryngoceles, pharyngitis (e.g., viral and bacterial), tonsillitis, tonsillar cellulitis, parapharyngeal abscess, laryngitis, laryngoceles, and throat cancers (e.g., cancer of the nasopharynx, tonsil cancer, larynx cancer), lung cancer (e.g., squamous cell carcinoma, small cell (oat cell) carcinoma, large cell carcinoma, and adenocarcinoma), allergic disorders (eosinophilic pneumonia, hypersensitivity pneumonitis (e.g., extrinsic allergic alveolitis, allergic interstitial pneumonitis, organic dust pneumoconiosis, allergic bronchopulmonary aspergillosis, asthma, Wegener's granulomatosis (granulomatous vasculitis), Goodpasture's syndrome)), pneumonia (e.g., bacterial pneumonia (e.g., Streptococcus pneumoniae (pneumoncoccal pneumonia), Staphylococcus aureus (staphylococcal pneumonia), Gram-negative bacterial pneumonia (caused by, e.g., Klebsiella and Pseudomas spp.), Mycoplasma pneumoniae pneumonia, Hemophilus influenzae pneumonia, Legionella pneumophila (Legionnaires' disease), and Chlamydia psittaci (Psittacosis)), and viral pneumonia (e.g., influenza, chickenpox (varicella).

[0763] Additional diseases and disorders of the respiratory system include, but are not limited to bronchiolitis, polio (poliomyelitis), croup, respiratory syncytial viral infection, mumps, erythema infectiosum (fifth disease), roseola infantum, progressive rubella panencephalitis, german measles, and subacute sclerosing panencephalitis), fungal pneumonia (e.g., Histoplasmosis, Coccidioidomycosis, Blastomycosis, fungal infections in people with severely suppressed immune systems (e.g., cryptococcosis, caused by Cryptococcus neoformans; aspergillosis, caused by Aspergillus spp.; candidiasis, caused by Candida; and mucormycosis)), Pneumocystis carinii (pneumocystis pneumonia), atypical pneumonias (e.g., Mycoplasma and Chlamydia spp.), opportunistic infection pneumonia, nosocomial pneumonia, chemical pneumonitis, and aspiration pneumonia, pleural disorders (e.g., pleurisy, pleural effusion, and pneumothorax (e.g., simple spontaneous pneumothorax, complicated spontaneous pneumothorax, tension pneumothorax)), obstructive airway diseases (e.g., asthma, chronic obstructive pulmonary disease (COPD), emphysema, chronic or acute bronchitis), occupational lung diseases (e.g., silicosis, black lung (coal workers' pneumoconiosis), asbestosis, berylliosis, occupational asthsma, byssinosis, and benign pneumoconioses), Infiltrative Lung Disease (e.g., pulmonary fibrosis (e.g., fibrosing alveolitis, usual interstitial pneumonia), idiopathic pulmonary fibrosis, desquamative interstitial pneumonia, lymphoid interstitial pneumonia, histiocytosis X (e.g., Letterer-Siwe disease, Hand-Schuller-Christian disease, eosinophilic granuloma), idiopathic pulmonary hemosiderosis, sarcoidosis and pulmonary alveolar proteinosis), Acute respiratory distress syndrome (also called, e.g., adult respiratory distress syndrome), edema, pulmonary embolism, bronchitis (e.g., viral, bacterial), bronchiectasis, atelectasis, lung abscess (caused by, e.g., Staphylococcus aureus or Legionella pneumophila), and cystic fibrosis.

Anti-Angiogenesis Activity

[0764] The naturally occurring balance between endogenous stimulators and inhibitors of angiogenesis is one in which inhibitory influences predominate. Rastinejad et al., Cell 56:345-355 (1989). In those rare instances in which neovascularization occurs under normal physiological conditions, such as wound healing, organ regeneration, embryonic development, and female reproductive processes, angiogenesis is stringently regulated and spatially and temporally delimited. Under conditions of pathological angiogenesis such as that characterizing solid tumor growth, these regulatory controls fail. Unregulated angiogenesis becomes pathologic and sustains progression of many neoplastic and non-neoplastic diseases. A number of serious diseases are dominated by abnormal neovascularization including solid tumor growth and metastases, arthritis, some types of eye disorders, and psoriasis. See, e.g., reviews by Moses et al., Biotech. 9:630-634 (1991); Folkman et al., N. Engl. J. Med., 333:1757-1763 (1995); Auerbach et al., J. Microvasc. Res. 29:401-411 (1985); Folkman, Advances in Cancer Research, eds. Klein and Weinhouse, Academic Press, New York, pp. 175-203 (1985); Patz, Am. J. Opthalmol. 94:715-743 (1982); and Folkman et al., Science 221:719-725 (1983). In a number of pathological conditions, the process of angiogenesis contributes to the disease state. For example, significant data have accumulated which suggest that the growth of solid tumors is dependent on angiogenesis. Folkman and Klagsbrun, Science 235:442-447 (1987).

[0765] The present invention provides for treatment of diseases or disorders associated with neovascularization by administration of the polynucleotides and/or polypeptides of the invention, as well as agonists or antagonists of the present invention. Malignant and metastatic conditions which can be treated with the polynucleotides and polypeptides, or agonists or antagonists of the invention include, but are not limited to, malignancies, solid tumors, and cancers described herein and otherwise known in the art (for a review of such disorders, see Fishman et al., Medicine, 2d Ed., J. B. Lippincott Co., Philadelphia (1985)). Thus, the present invention provides a method of treating an angiogenesis-related disease and/or disorder, comprising administering to an individual in need thereof a therapeutically effective amount of a polynucleotide, polypeptide, antagonist and/or agonist of the invention. For example, polynucleotides, polypeptides, antagonists and/or agonists may be utilized in a variety of additional methods in order to therapeutically treat a cancer or tumor. Cancers which may be treated with polynucleotides, polypeptides, antagonists and/or agonists include, but are not limited to solid tumors, including prostate, lung, breast, ovarian, stomach, pancreas, larynx, esophagus, testes, liver, parotid, biliary tract, colon, rectum, cervix, uterus, endometrium, kidney, bladder, thyroid cancer; primary tumors and metastases; melanomas; glioblastoma; Kaposi's sarcoma; leiomyosarcoma; non-small cell lung cancer; colorectal cancer; advanced malignancies; and blood born tumors such as leukemias. For example, polynucleotides, polypeptides, antagonists and/or agonists may be delivered topically, in order to treat cancers such as skin cancer, head and neck tumors, breast tumors, and Kaposi's sarcoma.

[0766] Within yet other aspects, polynucleotides, polypeptides, antagonists and/or agonists may be utilized to treat superficial forms of bladder cancer by, for example, intravesical administration. Polynucleotides, polypeptides, antagonists and/or agonists may be delivered directly into the tumor, or near the tumor site, via injection or a catheter. Of course, as the artisan of ordinary skill will appreciate, the appropriate mode of administration will vary according to the cancer to be treated. Other modes of delivery are discussed herein.

[0767] Polynucleotides, polypeptides, antagonists and/or agonists may be useful in treating other disorders, besides cancers, which involve angiogenesis. These disorders include, but are not limited to: benign tumors, for example hemangiomas, acoustic neuromas, neurofibromas, trachomas, and pyogenic granulomas; artheroscleric plaques; ocular angiogenic diseases, for example, diabetic retinopathy, retinopathy of prematurity, macular degeneration, corneal graft rejection, neovascular glaucoma, retrolental fibroplasia, rubeosis, retinoblastoma, uvietis and Pterygia (abnormal blood vesset growth) of the eye; rheumatoid arthritis; psoriasis; delayed wound healing; endometriosis; vasculogenesis; granulations; hypertrophic scars (keloids); nonunion fractures; seleroderma; trachoma; vascular adhesions; myocardial angiogenesis; coronary collaterals; cerebral collaterals; arteriovenous malformations; ischemic limb angiogenesis; Osler-Webber Syndrome; plaque neovascularization; telangiectasia; hemophiliac joints; angiofibroma; fibromuscular dysplasia; wound granulation; Crohn's disease; and atherosclerosis.

[0768] For example, within one aspect of the present invention methods are provided for treating hypertrophic scars and keloids, comprising the step of administering a polynucleotide, polypeptide, antagonist and/or agonist of the invention to a hypertrophic scar or keloid.

[0769] Within one embodiment of the present invention polynucleotides, polypeptides, antagonists and/or agonists of the invention are directly injected into a hypertrophic scar or keloid, in order to prevent the progression of these lesions. This therapy is of particular value in the prophylactic treatment of conditions which are known to result in the development of hypertrophic scars and keloids (e.g., burns), and is preferably initiated after the proliferative phase has had time to progress (approximately 14 days after the initial injury), but before hypertrophic scar or keloid development. As noted above, the present invention also provides methods for treating neovascular diseases of the eye, including for example, corneal neovascularization, neovascular glaucoma, proliferative diabetic retinopathy, retrolental fibroplasia and macular degeneration.

[0770] Moreover, Ocular disorders associated with neovascularization which can be treated with the polynucleotides and polypeptides of the present invention (including agonists and/or antagonists) include, but are not limited to: neovascular glaucoma, diabetic retinopathy, retinoblastoma, retrolental fibroplasia, uveitis, retinopathy of prematurity macular degeneration, corneal graft neovascularization, as well as other eye inflammatory diseases, ocular tumors and diseases associated with choroidal or iris neovascularization. See, e.g., reviews by Waltman et al., Am. J. Ophthal. 85:704-710 (1978) and Gartner et al., Surv. Ophthal. 22:291-312 (1978).

[0771] Thus, within one aspect of the present invention methods are provided for treating neovascular diseases of the eye such as corneal neovascularization (including corneal graft neovascularization), comprising the step of administering to a patient a therapeutically effective amount of a compound (as described above) to the cornea, such that the formation of blood vessels is inhibited. Briefly, the cornea is a tissue which normally lacks blood vessels. In certain pathological conditions however, capillaries may extend into the cornea from the pericorneal vascular plexus of the limbus. When the cornea becomes vascularized, it also becomes clouded, resulting in a decline in the patient's visual acuity. Visual loss may become complete if the cornea completely opacitates. A wide variety of disorders can result in corneal neovascularization, including for example, corneal infections (e.g., trachoma, herpes simplex keratitis, leishmaniasis and onchocerciasis), immunological processes (e.g., graft rejection and Stevens-Johnson's syndrome), alkali burns, trauma, inflammation (of any cause), toxic and nutritional deficiency states, and as a complication of wearing contact lenses.

[0772] Within particularly preferred embodiments of the invention, may be prepared for topical administration in saline (combined with any of the preservatives and antimicrobial agents commonly used in ocular preparations), and administered in eyedrop form. The solution or suspension may be prepared in its pure form and administered several times daily. Alternatively, anti-angiogenic compositions, prepared as described above, may also be administered directly to the cornea. Within preferred embodiments, the anti-angiogenic composition is prepared with a muco-adhesive polymer which binds to cornea. Within further embodiments, the anti-angiogenic factors or anti-angiogenic compositions may be utilized as an adjunct to conventional steroid therapy. Topical therapy may also be useful prophylactically in corneal lesions which are known to have a high probability of inducing an angiogenic response (such as chemical burns). In these instances the treatment, likely in combination with steroids, may be instituted immediately to help prevent subsequent complications.

[0773] Within other embodiments, the compounds described above may be injected directly into the corneal stroma by an ophthalmologist under microscopic guidance. The preferred site of injection may vary with the morphology of the individual lesion, but the goal of the administration would be to place the composition at the advancing front of the vasculature (i.e., interspersed between the blood vessels and the normal cornea). In most cases this would involve perilimbic corneal injection to “protect” the cornea from the advancing blood vessels. This method may also be utilized shortly after a corneal insult in order to prophylactically prevent corneal neovascularization. In this situation the material could be injected in the perilimbic cornea interspersed between the corneal lesion and its undesired potential limbic blood supply. Such methods may also be utilized in a similar fashion to prevent capillary invasion of transplanted corneas. In a sustained-release form injections might only be required 2-3 times per year. A steroid could also be added to the injection solution to reduce inflammation resulting from the injection itself.

[0774] Within another aspect of the present invention, methods are provided for treating neovascular glaucoma, comprising the step of administering to a patient a therapeutically effective amount of a polynucleotide, polypeptide, antagonist and/or agonist to the eye, such that the formation of blood vessels is inhibited. In one embodiment, the compound may be administered topically to the eye in order to treat early forms of neovascular glaucoma. Within other embodiments, the compound may be implanted by injection into the region of the anterior chamber angle. Within other embodiments, the compound may also be placed in any location such that the compound is continuously released into the aqueous humor. Within another aspect of the present invention, methods are provided for treating proliferative diabetic retinopathy, comprising the step of administering to a patient a therapeutically effective amount of a polynucleotide, polypeptide, antagonist and/or agonist to the eyes, such that the formation of blood vessels is inhibited.

[0775] Within particularly preferred embodiments of the invention, proliferative diabetic retinopathy may be treated by injection into the aqueous humor or the vitreous, in order to increase the local concentration of the polynucleotide, polypeptide, antagonist and/or agonist in the retina. Preferably, this treatment should be initiated prior to the acquisition of severe disease requiring photocoagulation.

[0776] Within another aspect of the present invention, methods are provided for treating retrolental fibroplasia, comprising the step of administering to a patient a therapeutically effective amount of a polynucleotide, polypeptide, antagonist and/or agonist to the eye, such that the formation of blood vessels is inhibited. The compound may be administered topically, via intravitreous injection and/or via intraocular implants.

[0777] Additionally, disorders which can be treated with the polynucleotides, polypeptides, agonists and/or agonists include, but are not limited to, hemangioma, arthritis, psoriasis, angiofibroma, atherosclerotic plaques, delayed wound healing, granulations, hemophilic joints, hypertrophic scars, nonunion fractures, Osler-Weber syndrome, pyogenic granuloma, scleroderma, trachoma, and vascular adhesions.

[0778] Moreover, disorders and/or states, which can be treated, prevented, diagnosed, and/or prognosed with the the polynucleotides, polypeptides, agonists and/or agonists of the invention include, but are not limited to, solid tumors, blood born tumors such as leukemias, tumor metastasis, Kaposi's sarcoma, benign tumors, for example hemangiomas, acoustic neuromas, neurofibromas, trachomas, and pyogenic granulomas, rheumatoid arthritis, psoriasis, ocular angiogenic diseases, for example, diabetic retinopathy, retinopathy of prematurity, macular degeneration, corneal graft rejection, neovascular glaucoma, retrolental fibroplasia, rubeosis, retinoblastoma, and uvietis, delayed wound healing, endometriosis, vascluogenesis, granulations, hypertrophic scars (keloids), nonunion fractures, scleroderma, trachoma, vascular adhesions, myocardial angiogenesis, coronary collaterals, cerebral collaterals, arteriovenous malformations, ischemic limb angiogenesis, Osler-Webber Syndrome, plaque neovascularization, telangiectasia, hemophiliac joints, angiofibroma fibromuscular dysplasia, wound granulation, Crohn's disease, atherosclerosis, birth control agent by preventing vascularization required for embryo implantation controlling menstruation, diseases that have angiogenesis as a pathologic consequence such as cat scratch disease (Rochele minalia quintosa), ulcers (Helicobacter pylori), Bartonellosis and bacillary angiomatosis.

[0779] In one aspect of the birth control method, an amount of the compound sufficient to block embryo implantation is administered before or after intercourse and fertilization have occurred, thus providing an effective method of birth control, possibly a “morning after” method. Polynucleotides, polypeptides, agonists and/or agonists may also be used in controlling menstruation or administered as either a peritoneal lavage fluid or for peritoneal implantation in the treatment of endometriosis.

[0780] Polynucleotides, polypeptides, agonists and/or agonists of the present invention may be incorporated into surgical sutures in order to prevent stitch granulomas.

[0781] Polynucleotides, polypeptides, agonists and/or agonists may be utilized in a wide variety of surgical procedures. For example, within one aspect of the present invention a compositions (in the form of, for example, a spray or film) may be utilized to coat or spray an area prior to removal of a tumor, in order to isolate normal surrounding tissues from malignant tissue, and/or to prevent the spread of disease to surrounding tissues. Within other aspects of the present invention, compositions (e.g., in the form of a spray) may be delivered via endoscopic procedures in order to coat tumors, or inhibit angiogenesis in a desired locale. Within yet other aspects of the present invention, surgical meshes which have been coated with anti-angiogenic compositions of the present invention may be utilized in any procedure wherein a surgical mesh might be utilized. For example, within one embodiment of the invention a surgical mesh laden with an anti-angiogenic composition may be utilized during abdominal cancer resection surgery (e.g., subsequent to colon resection) in order to provide support to the structure, and to release an amount of the anti-angiogenic factor.

[0782] Within further aspects of the present invention, methods are provided for treating tumor excision sites, comprising administering a polynucleotide, polypeptide, agonist and/or agonist to the resection margins of a tumor subsequent to excision, such that the local recurrence of cancer and the formation of new blood vessels at the site is inhibited. Within one embodiment of the invention, the anti-angiogenic compound is administered directly to the tumor excision site (e.g., applied by swabbing, brushing or otherwise coating the resection margins of the tumor with the anti-angiogenic compound). Alternatively, the anti-angiogenic compounds may be incorporated into known surgical pastes prior to administration. Within particularly preferred embodiments of the invention, the anti-angiogenic compounds are applied after hepatic resections for malignancy, and after neurosurgical operations.

[0783] Within one aspect of the present invention, polynucleotides, polypeptides, agonists and/or agonists may be administered to the resection margin of a wide variety of tumors, including for example, breast, colon, brain and hepatic tumors. For example, within one embodiment of the invention, anti-angiogenic compounds may be administered to the site of a neurological tumor subsequent to excision, such that the formation of new blood vessels at the site are inhibited.

[0784] The polynucleotides, polypeptides, agonists and/or agonists of the present invention may also be administered along with other anti-angiogenic factors. Representative examples of other anti-angiogenic factors include: Anti-Invasive Factor, retinoic acid and derivatives thereof, paclitaxel, Suramin, Tissue Inhibitor of Metalloproteinase-1, Tissue Inhibitor of Metalloproteinase-2, Plasminogen Activator Inhibitor-1, Plasminogen Activator Inhibitor-2, and various forms of the lighter “d group” transition metals.

[0785] Lighter “d group” transition metals include, for example, vanadium, molybdenum, tungsten, titanium, niobium, and tantalum species. Such transition metal species may form transition metal complexes. Suitable complexes of the above-mentioned transition metal species include oxo transition metal complexes.

[0786] Representative examples of vanadium complexes include oxo vanadium complexes such as vanadate and vanadyl complexes. Suitable vanadate complexes include metavanadate and orthovanadate complexes such as, for example, ammonium metavanadate, sodium metavanadate, and sodium orthovanadate. Suitable vanadyl complexes include, for example, vanadyl acetylacetonate and vanadyl sulfate including vanadyl sulfate hydrates such as vanadyl sulfate mono- and trihydrates.

[0787] Representative examples of tungsten and molybdenum complexes also include oxo complexes. Suitable oxo tungsten complexes include tungstate and tungsten oxide complexes. Suitable tungstate complexes include ammonium tungstate, calcium tungstate, sodium tungstate dihydrate, and tungstic acid. Suitable tungsten oxides include tungsten (IV) oxide and tungsten (VI) oxide. Suitable oxo molybdenum complexes include molybdate, molybdenum oxide, and molybdenyl complexes. Suitable molybdate complexes include ammonium molybdate and its hydrates, sodium molybdate and its hydrates, and potassium molybdate and its hydrates. Suitable molybdenum oxides include molybdenum (VI) oxide, molybdenum (VI) oxide, and molybdic acid. Suitable molybdenyl complexes include, for example, molybdenyl acetylacetonate. Other suitable tungsten and molybdenum complexes include hydroxo derivatives derived from, for example, glycerol, tartaric acid, and sugars.

[0788] A wide variety of other anti-angiogenic factors may also be utilized within the context of the present invention. Representative examples include platelet factor 4; protamine sulphate; sulphated chitin derivatives (prepared from queen crab shells), (Murata et al., Cancer Res. 51:22-26, 1991); Sulphated Polysaccharide Peptidoglycan Complex (SP-PG) (the function of this compound may be enhanced by the presence of steroids such as estrogen, and tamoxifen citrate); Staurosporine; modulators of matrix metabolism, including for example, proline analogs, cishydroxyproline, d,L-3,4-dehydroproline, Thiaproline, alpha,alpha-dipyridyl, aminopropionitrile fumarate; 4-propyl-5-(4-pyridinyl)-2(3H)-oxazolone; Methotrexate; Mitoxantrone; Heparin; Interferons; 2 Macroglobulin-serum; ChIMP-3 (Pavloff et al., J. Bio. Chem. 267:17321-17326, 1992); Chymostatin (Tomkinson et al., Biochem J. 286:475-480, 1992); Cyclodextrin Tetradecasulfate; Eponemycin; Camptothecin; Fumagillin (Ingber et al., Nature 348:555-557, 1990); Gold Sodium Thiomalate (“GST”; Matsubara and Ziff, J. Clin. Invest. 79:1440-1446, 1987); anticollagenase-serum; alpha2-antiplasmin (Holmes et al., J. Biol. Chem. 262(4):1659-1664, 1987); Bisantrene (National Cancer Institute); Lobenzarit disodium (N-(2)-carboxyphenyl-4-chloroanthronilic acid disodium or “CCA”; Takeuchi et al., Agents Actions 36:312-316, 1992); Thalidomide; Angostatic steroid; AGM-1470; carboxynaminolmidazole; and metalloproteinase inhibitors such as BB94.

Diseases at the Cellular Level

[0789] Diseases associated with increased cell survival or the inhibition of apoptosis that could be treated, prevented, diagnosed, and/or prognosed using polynucleotides or polypeptides, as well as antagonists or agonists of the present invention, include cancers (such as follicular lymphomas, carcinomas with p53 mutations, and hormone-dependent tumors, including, but not limited to colon cancer, cardiac tumors, pancreatic cancer, melanoma, retinoblastoma, glioblastoma, lung cancer, intestinal cancer, testicular cancer, stomach cancer, neuroblastoma, myxoma, myoma, lymphoma, endothelioma, osteoblastoma, osteoclastoma, osteosarcoma, chondrosarcoma, adenoma, breast cancer, prostate cancer, Kaposi's sarcoma and ovarian cancer); autoimmune disorders (such as, multiple sclerosis, Sjogren's syndrome, Hashimoto's thyroiditis, biliary cirrhosis, Behcet's disease, Crohn's disease, polymyositis, systemic lupus erythematosus and immune-related glomerulonephritis and rheumatoid arthritis) and viral infections (such as herpes viruses, pox viruses and adenoviruses), inflammation, graft v. host disease, acute graft rejection, and chronic graft rejection.

[0790] In preferred embodiments, polynucleotides, polypeptides, and/or antagonists of the invention are used to inhibit growth, progression, and/or metasis of cancers, in particular those listed above.

[0791] Additional diseases or conditions associated with increased cell survival that could be treated or detected by polynucleotides or polypeptides, or agonists or antagonists of the present invention include, but are not limited to, progression, and/or metastases of malignancies and related disorders such as leukemia (including acute leukemias (e.g., acute lymphocytic leukemia, acute myelocytic leukemia (including myeloblastic, promyelocytic, myelomonocytic, monocytic, and erythroleukemia)) and chronic leukemias (e.g., chronic myelocytic (granulocytic) leukemia and chronic lymphocytic leukemia)), polycythemia vera, lymphomas (e.g., Hodgkin's disease and non-Hodgkin's disease), multiple myeloma, Waldenstrom's macroglobulinemia, heavy chain disease, and solid tumors including, but not limited to, sarcomas and carcinomas such as fibrosarcoma, myxosarcoma, liposarcoma, chondrosarcoma, osteogenic sarcoma, chordoma, angiosarcoma, endotheliosarcoma, lymphangiosarcoma, lymphangioendotheliosarcoma, synovioma, mesothelioma, Ewing's tumor, leiomyosarcoma, rhabdomyosarcoma, colon carcinoma, pancreatic cancer, breast cancer, ovarian cancer, prostate cancer, squamous cell carcinoma, basal cell carcinoma, adenocarcinoma, sweat gland carcinoma, sebaceous gland carcinoma, papillary carcinoma, papillary adenocarcinomas, cystadenocarcinoma, medullary carcinoma, bronchogenic carcinoma, renal cell carcinoma, hepatoma, bile duct carcinoma, choriocarcinoma, seminoma, embryonal carcinoma, Wilm's tumor, cervical cancer, testicular tumor, lung carcinoma, small cell lung carcinoma, bladder carcinoma, epithelial carcinoma, glioma, astrocytoma, medulloblastoma, craniopharyngioma, ependymoma, pinealoma, hemangioblastoma, acoustic neuroma, oligodendroglioma, menangioma, melanoma, neuroblastoma, and retinoblastoma.

[0792] Diseases associated with increased apoptosis that could be treated, prevented, diagnosed, and/or prognesed using polynucleotides or polypeptides, as well as agonists or antagonists of the present invention, include, but are not limited to, AIDS; neurodegenerative disorders (such as Alzheimer's disease, Parkinson's disease, Amyotrophic lateral sclerosis, Retinitis pigmentosa, Cerebellar degeneration and brain tumor or prior associated disease); autoimmune disorders (such as, multiple sclerosis, Sjogren's syndrome, Hashimoto's thyroiditis, biliary cirrhosis, Behcet's disease, Crohn's disease, polymyositis, systemic lupus erythematosus and immune-related glomerulonephritis and rheumatoid arthritis) myelodysplastic syndromes (such as aplastic anemia), graft v. host disease, ischemic injury (such as that caused by myocardial infarction, stroke and reperfusion injury), liver injury (e.g., hepatitis related liver injury, ischemia/reperfusion injury, cholestosis (bile duct injury) and liver cancer); toxin-induced liver disease (such as that caused by alcohol), septic shock, cachexia and anorexia.

Wound Healing and Epithelial Cell Proliferation

[0793] In accordance with yet a further aspect of the present invention, there is provided a process for utilizing polynucleotides or polypeptides, as well as agonists or antagonists of the present invention, for therapeutic purposes, for example, to stimulate epithelial cell proliferation and basal keratinocytes for the purpose of wound healing, and to stimulate hair follicle production and healing of dermal wounds. Polynucleotides or polypeptides, as well as agonists or antagonists of the present invention, may be clinically useful in stimulating wound healing including surgical wounds, excisional wounds, deep wounds involving damage of the dermis and epidermis, eye tissue wounds, dental tissue wounds, oral cavity wounds, diabetic ulcers, dermal ulcers, cubitus ulcers, arterial ulcers, venous stasis ulcers, burns resulting from heat exposure or chemicals, and other abnormal wound healing conditions such as uremia, malnutrition, vitamin deficiencies and complications associated with systemic treatment with steroids, radiation therapy and antineoplastic drugs and antimetabolites. Polynucleotides or polypeptides, as well as agonists or antagonists of the present invention, could be used to promote dermal reestablishment subsequent to dermal loss

[0794] Polynucleotides or polypeptides, as well as agonists or antagonists of the present invention, could be used to increase the adherence of skin grafts to a wound bed and to stimulate re-epithelialization from the wound bed. The following are types of grafts that polynucleotides or polypeptides, agonists or antagonists of the present invention, could be used to increase adherence to a wound bed: autografts, artificial skin, allografts, autodermic graft, autoepdermic grafts, avacular grafts, Blair-Brown grafts, bone graft, brephoplastic grafts, cutis graft, delayed graft, dermic graft, epidermic graft, fascia graft, full thickness graft, heterologous graft, xenograft, homologous graft, hyperplastic graft, lamellar graft, mesh graft, mucosal graft, Ollier-Thiersch graft, omenpal graft, patch graft, pedicle graft, penetrating graft, split skin graft, thick split graft. Polynucleotides or polypeptides, as well as agonists or antagonists of the present invention, can be used to promote skin strength and to improve the appearance of aged skin.

[0795] It is believed that polynucleotides or polypeptides, as well as agonists or antagonists of the present invention, will also produce changes in hepatocyte proliferation, and epithelial cell proliferation in the lung, breast, pancreas, stomach, small intestine, and large intestine. Polynucleotides or polypeptides, as well as agonists or antagonists of the present invention, could promote proliferation of epithelial cells such as sebocytes, hair follicles, hepatocytes, type II pneumocytes, mucin-producing goblet cells, and other epithelial cells and their progenitors contained within the skin, lung, liver, and gastrointestinal tract. Polynucleotides or polypeptides, agonists or antagonists of the present invention, may promote proliferation of endothelial cells, keratinocytes, and basal keratinocytes.

[0796] Polynucleotides or polypeptides, as well as agonists or antagonists of the present invention, could also be used to reduce the side effects of gut toxicity that result from radiation, chemotherapy treatments or viral infections. Polynucleotides or polypeptides, as well as agonists or antagonists of the present invention, may have a cytoprotective effect on the small intestine mucosa. Polynucleotides or polypeptides, as well as agonists or antagonists of the present invention, may also stimulate healing of mucositis (mouth ulcers) that result from chemotherapy and viral infections.

[0797] Polynucleotides or polypeptides, as well as agonists or antagonists of the present invention, could further be used in full regeneration of skin in full and partial thickness skin defects, including burns, (i.e., repopulation of hair follicles, sweat glands, and sebaceous glands), treatment of other skin defects such as psoriasis. Polynucleotides or polypeptides, as well as agonists or antagonists of the present invention, could be used to treat epidermolysis bullosa, a defect in adherence of the epidermis to the underlying dermis which results in frequent, open and painful blisters by accelerating reepithelialization of these lesions. Polynucleotides or polypeptides, as well as agonists or antagonists of the present invention, could also be used to treat gastric and doudenal ulcers and help heal by scar formation of the mucosal lining and regeneration of glandular mucosa and duodenal mucosal lining more rapidly. Inflammatory bowel diseases, such as Crohn's disease and ulcerative colitis, are diseases which result in destruction of the mucosal surface of the small or large intestine, respectively. Thus, polynucleotides or polypeptides, as well as agonists or antagonists of the present invention, could be used to promote the resurfacing of the mucosal surface to aid more rapid healing and to prevent progression of inflammatory bowel disease. Treatment with polynucleotides or polypeptides, agonists or antagonists of the present invention, is expected to have a significant effect on the production of mucus throughout the gastrointestinal tract and could be used to protect the intestinal mucosa from injurious substances that are ingested or following surgery. Polynucleotides or polypeptides, as well as agonists or antagonists of the present invention, could be used to treat diseases associate with the under expression.

[0798] Moreover, polynucleotides or polypeptides, as well as agonists or antagonists of the present invention, could be used to prevent and heal damage to the lungs due to various pathological states. Polynucleotides or polypeptides, as well as agonists or antagonists of the present invention, which could stimulate proliferation and differentiation and promote the repair of alveoli and brochiolar epithelium to prevent or treat acute or chronic lung damage. For example, emphysema, which results in the progressive loss of aveoli, and inhalation injuries, i.e., resulting from smoke inhalation and burns, that cause necrosis of the bronchiolar epithelium and alveoli could be effectively treated using polynucleotides or polypeptides, agonists or antagonists of the present invention. Also, polynucleotides or polypeptides, as well as agonists or antagonists of the present invention, could be used to stimulate the proliferation of and differentiation of type II pneumocytes, which may help treat or prevent disease such as hyaline membrane diseases, such as infant respiratory distress syndrome and bronchopulmonary displasia, in premature infants.

[0799] Polynucleotides or polypeptides, as well as agonists or antagonists of the present invention, could stimulate the proliferation and differentiation of hepatocytes and, thus, could be used to alleviate or treat liver diseases and pathologies such as fulminant liver failure caused by cirrhosis, liver damage caused by viral hepatitis and toxic substances (i.e., acetaminophen, carbon tetraholoride and other hepatotoxins known in the art).

[0800] In addition, polynucleotides or polypeptides, as well as agonists or antagonists of the present invention, could be used treat or prevent the onset of diabetes mellitus. In patients with newly diagnosed Types I and II diabetes, where some islet cell function remains, polynucleotides or polypeptides, as well as agonists or antagonists of the present invention, could be used to maintain the islet function so as to alleviate, delay or prevent permanent manifestation of the disease. Also, polynucleotides or polypeptides, as well as agonists or antagonists of the present invention, could be used as an auxiliary in islet cell transplantation to improve or promote islet cell function.

Neural Activity and Neurological Diseases

[0801] The polynucleotides, polypeptides and agonists or antagonists of the invention may be used for the diagnosis and/or treatment of diseases, disorders, damage or injury of the brain and/or nervous system. Nervous system disorders that can be treated with the compositions of the invention (e.g., polypeptides, polynucleotides, and/or agonists or antagonists), include, but are not limited to, nervous system injuries, and diseases or disorders which result in either a disconnection of axons, a diminution or degeneration of neurons, or demyelination. Nervous system lesions which may be treated in a patient (including human and non-human mammalian patients) according to the methods of the invention, include but are not limited to, the following lesions of either the central (including spinal cord, brain) or peripheral nervous systems: (1) ischemic lesions, in which a lack of oxygen in a portion of the nervous system results in neuronal injury or death, including cerebral infarction or ischemia, or spinal cord infarction or ischemia; (2) traumatic lesions, including lesions caused by physical injury or associated with surgery, for example, lesions which sever a portion of the nervous system, or compression injuries; (3) malignant lesions, in which a portion of the nervous system is destroyed or injured by malignant tissue which is either a nervous system associated malignancy or a malignancy derived from non-nervous system tissue; (4) infectious lesions, in which a portion of the nervous system is destroyed or injured as a result of infection, for example, by an abscess or associated with infection by human immunodeficiency virus, herpes zoster, or herpes simplex virus or with Lyme disease, tuberculosis, or syphilis; (5) degenerative lesions, in which a portion of the nervous system is destroyed or injured as a result of a degenerative process including but not limited to, degeneration associated with Parkinson's disease, Alzheimer's disease, Huntington's chorea, or amyotrophic lateral sclerosis (ALS); (6) lesions associated with nutritional diseases or disorders, in which a portion of the nervous system is destroyed or injured by a nutritional disorder or disorder of metabolism including, but not limited to, vitamin B12 deficiency, folic acid deficiency, Wernicke disease, tobacco-alcohol amblyopia, Marchiafava-Bignami disease (primary degeneration of the corpus callosum), and alcoholic cerebellar degeneration; (7) neurological lesions associated with systemic diseases including, but not limited to, diabetes (diabetic neuropathy, Bell's palsy), systemic lupus erythematosus, carcinoma, or sarcoidosis; (8) lesions caused by toxic substances including alcohol, lead, or particular neurotoxins; and (9) demyelinated lesions in which a portion of the nervous system is destroyed or injured by a demyelinating disease including, but not limited to, multiple sclerosis, human immunodeficiency virus-associated myelopathy, transverse myelopathy or various etiologies, progressive multifocal leukoencephalopathy, and central pontine myelinolysis.

[0802] In one embodiment, the polypeptides, polynucleotides, or agonists or antagonists of the invention are used to protect neural cells from the damaging effects of hypoxia. In a further preferred embodiment, the polypeptides, polynucleotides, or agonists or antagonists of the invention are used to protect neural cells from the damaging effects of cerebral hypoxia. According to this embodiment, the compositions of the invention are used to treat or prevent neural cell injury associated with cerebral hypoxia. In one non-exclusive aspect of this embodiment, the polypeptides, polynucleotides, or agonists or antagonists of the invention, are used to treat or prevent neural cell injury associated with cerebral ischemia. In another non-exclusive aspect of this embodiment, the polypeptides, polynucleotides, or agonists or antagonists of the invention are used to treat or prevent neural cell injury associated with cerebral infarction.

[0803] In another preferred embodiment, the polypeptides, polynucleotides, or agonists or antagonists of the invention are used to treat or prevent neural cell injury associated with a stroke. In a specific embodiment, the polypeptides, polynucleotides, or agonists or antagonists of the invention are used to treat or prevent cerebral neural cell injury associated with a stroke.

[0804] In another preferred embodiment, the polypeptides, polynucleotides, or agonists or antagonists of the invention are used to treat or prevent neural cell injury associated with a heart attack. In a specific embodiment, the polypeptides, polynucleotides, or agonists or antagonists of the invention are used to treat or prevent cerebral neural cell injury associated with a heart attack.

[0805] The compositions of the invention which are useful for treating or preventing a nervous system disorder may be selected by testing for biological activity in promoting the survival or differentiation of neurons. For example, and not by way of limitation, compositions of the invention which elicit any of the following effects may be useful according to the invention: (1) increased survival time of neurons in culture either in the presence or absence of hypoxia or hypoxic conditions; (2) increased sprouting of neurons in culture or in vivo; (3) increased production of a neuron-associated molecule in culture or in vivo, e.g., choline acetyltransferase or acetylcholinesterase with respect to motor neurons; or (4) decreased symptoms of neuron dysfunction in vivo. Such effects may be measured by any method known in the art. In preferred, non-limiting embodiments, increased survival of neurons may routinely be measured using a method set forth herein or otherwise known in the art, such as, for example, in Zhang et al., Proc Natl Acad Sci USA 97:3637-42 (2000) or in Arakawa et al., J. Neurosci., 10:3507-15 (1990); increased sprouting of neurons may be detected by methods known in the art, such as, for example, the methods set forth in Pestronk et al., Exp. Neurol., 70:65-82 (1980), or Brown et al., Ann. Rev. Neurosci., 4:17-42 (1981); increased production of neuron-associated molecules may be measured by bioassay, enzymatic assay, antibody binding, Northern blot assay, etc., using techniques known in the art and depending on the molecule to be measured; and motor neuron dysfunction may be measured by assessing the physical manifestation of motor neuron disorder, e.g., weakness, motor neuron conduction velocity, or functional disability.

[0806] In specific embodiments, motor neuron disorders that may be treated according to the invention include, but are not limited to, disorders such as infarction, infection, exposure to toxin, trauma, surgical damage, degenerative disease or malignancy that may affect motor neurons as well as other components of the nervous system, as well as disorders that selectively affect neurons such as amyotrophic lateral sclerosis, and including, but not limited to, progressive spinal muscular atrophy, progressive bulbar palsy, primary lateral sclerosis, infantile and juvenile muscular atrophy, progressive bulbar paralysis of childhood (Fazio-Londe syndrome), poliomyelitis and the post polio syndrome, and Hereditary Motorsensory Neuropathy (Charcot-Marie-Tooth Disease).

[0807] Further, polypeptides or polynucleotides of the invention may play a role in neuronal survival; synapse formation; conductance; neural differentiation, etc. Thus, compositions of the invention (including polynucleotides, polypeptides, and agonists or antagonists) may be used to diagnose and/or treat or prevent diseases or disorders associated with these roles, including, but not limited to, learning and/or cognition disorders. The compositions of the invention may also be useful in the treatment or prevention of neurodegenerative disease states and/or behavioural disorders. Such neurodegenerative disease states and/or behavioral disorders include, but are not limited to, Alzheimer's Disease, Parkinson's Disease, Huntington's Disease, Tourette Syndrome, schizophrenia, mania, dementia, paranoia, obsessive compulsive disorder, panic disorder, learning disabilities, ALS, psychoses, autism, and altered behaviors, including disorders in feeding, sleep patterns, balance, and perception. In addition, compositions of the invention may also play a role in the treatment, prevention and/or detection of developmental disorders associated with the developing embryo, or sexually-linked disorders.

[0808] Additionally, polypeptides, polynucleotides and/or agonists or antagonists of the invention, may be useful in protecting neural cells from diseases, damage, disorders, or injury, associated with cerebrovascular disorders including, but not limited to, carotid artery diseases (e.g., carotid artery thrombosis, carotid stenosis, or Moyamoya Disease), cerebral amyloid angiopathy, cerebral aneurysm, cerebral anoxia, cerebral arteriosclerosis, cerebral artenovenous malformations, cerebral artery diseases, cerebral embolism and thrombosis (e.g., carotid artery thrombosis, sinus thrombosis, or Wallenberg's Syndrome), cerebral hemorrhage (e.g., epidural or subdural hematoma, or subarachnoid hemorrhage), cerebral infarction, cerebral ischemia (e.g., transient cerebral ischemia, Subclavian Steal Syndrome, or vertebrobasilar insufficiency), vascular dementia (e.g., multi-infarct), leukomalacia, penventricular, and vascular headache (e.g., cluster headache or migraines).

[0809] In accordance with yet a further aspect of the present invention, there is provided a process for utilizing polynucleotides or polypeptides, as well as agonists or antagonists of the present invention, for therapeutic purposes, for example, to stimulate neurological cell proliferation and/or differentiation. Therefore, polynucleotides, polypeptides, agonists and/or antagonists of the invention may be used to treat and/or detect neurologic diseases. Moreover, polynucleotides or polypeptides, or agonists or antagonists of the invention, can be used as a marker or detector of a particular nervous system disease or disorder.

[0810] Examples of neurologic diseases which can be treated or detected with polynucleotides, polypeptides, agonists, and/or antagonists of the present invention include brain diseases, such as metabolic brain diseases which includes phenylketonuria such as maternal phenylketonuria, pyruvate carboxylase deficiency, pyruvate dehydrogenase complex deficiency, Wernicke's Encephalopathy, brain edema, brain neoplasms such as cerebellar neoplasms which include infratentorial neoplasms, cerebral ventricle neoplasms such as choroid plexus neoplasms, hypothalamic neoplasms, supratentorial neoplasms, canavan disease, cerebellar diseases such as cerebellar ataxia which include spinocerebellar degeneration such as ataxia telangiectasia, cerebellar dyssynergia, Friederich's Ataxia, Machado-Joseph Disease, olivopontocerebellar atrophy, cerebellar neoplasms such as infratentorial neoplasms, diffuse cerebral sclerosis such as encephalitis periaxialis, globoid cell leukodystrophy, metachromatic leukodystrophy and subacute sclerosing panencephalitis.

[0811] Additional neurologic diseases which can be treated or detected with polynucleotides, polypeptides, agonists, and/or antagonists of the present invention include cerebrovascular disorders (such as carotid artery diseases which include carotid artery thrombosis, carotid stenosis and Moyamoya Disease), cerebral amyloid angiopathy, cerebral aneurysm, cerebral anoxia, cerebral arteriosclerosis, cerebral arteriovenous malformations, cerebral artery diseases, cerebral embolism and thrombosis such as carotid artery thrombosis, sinus thrombosis and Wallenberg's Syndrome, cerebral hemorrhage such as epidural hematoma, subdural hematoma and subarachnoid hemorrhage, cerebral infarction, cerebral ischemia such as transient cerebral ischemia, Subclavian Steal Syndrome and vertebrobasilar insufficiency, vascular dementia such as multi-infarct dementia, periventricular leukomalacia, vascular headache such as cluster headache and migraine.

[0812] Additional neurologic diseases which can be treated or detected with polynucleotides, polypeptides, agonists, and/or antagonists of the present invention include dementia such as AIDS Dementia Complex, presenile dementia such as Alzheimer's Disease and Creutzfeldt-Jakob Syndrome, senile dementia such as Alzheimer's Disease and progressive supranuclear palsy, vascular dementia such as multi-infarct dementia, encephalitis which include encephalitis periaxialis, viral encephalitis such as epidemic encephalitis, Japanese Encephalitis, St. Louis Encephalitis, tick-borne encephalitis and West Nile Fever, acute disseminated encephalomyelitis, meningoencephalitis such as uveomeningoencephalitic syndrome, Postencephalitic Parkinson Disease and subacute sclerosing panencephalitis, encephalomalacia such as periventricular leukomalacia, epilepsy such as generalized epilepsy which includes infantile spasms, absence epilepsy, myoclonic epilepsy which includes MERRF Syndrome, tonic-clonic epilepsy, partial epilepsy such as complex partial epilepsy, frontal lobe epilepsy and temporal lobe epilepsy, post-traumatic epilepsy, status epilepticus such as Epilepsia Partialis Continua, and Hallervorden-Spatz Syndrome.

[0813] Additional neurologic diseases which can be treated or detected with polynucleotides, polypeptides, agonists, and/or antagonists of the present invention include hydrocephalus such as Dandy-Walker Syndrome and normal pressure hydrocephalus, hypothalamic diseases such as hypothalamic neoplasms, cerebral malaria, narcolepsy which includes cataplexy, bulbar poliomyelitis, cerebri pseudotumor, Rett Syndrome, Reye's Syndrome, thalamic diseases, cerebral toxoplasmosis, intracranial tuberculoma and Zellweger Syndrome, central nervous system infections such as AIDS Dementia Complex, Brain Abscess, subdural empyema, encephalomyelitis such as Equine Encephalomyelitis, Venezuelan Equine Encephalomyelitis, Necrotizing Hemorrhagic Encephalomyelitis, Visna, and cerebral malaria.

[0814] Additional neurologic diseases which can be treated or detected with polynucleotides, polypeptides, agonists, and/or antagonists of the present invention include meningitis such as arachnoiditis, aseptic meningtitis such as viral meningtitis which includes lymphocytic choriomeningitis, Bacterial meningtitis which includes Haemophilus Meningtitis, Listeria Meningtitis, Meningococcal Meningtitis such as Waterhouse-Friderichsen Syndrome, Pneumococcal Meningtitis and meningeal tuberculosis, fungal meningitis such as Cryptococcal Meningtitis, subdural effusion, meningoencephalitis such as uvemeningoencephalitic syndrome, myelitis such as transverse myelitis, neurosyphilis such as tabes dorsalis, poliomyelitis which includes bulbar poliomyelitis and postpoliomyelitis syndrome, prion diseases (such as Creutzfeldt-Jakob Syndrome, Bovine Spongiform Encephalopathy, Gerstmann-Straussler Syndrome, Kuru, Scrapie), and cerebral toxoplasmosis.

[0815] Additional neurologic diseases which can be treated or detected with polynucleotides, polypeptides, agonists, and/or antagonists of the present invention include central nervous system neoplasms such as brain neoplasms that include cerebellar neoplasms such as infratentorial neoplasms, cerebral ventricle neoplasms such as choroid plexus neoplasms, hypothalamic neoplasms and supratentorial neoplasms, meningeal neoplasms, spinal cord neoplasms which include epidural neoplasms, demyelinating diseases such as Canavan Diseases, diffuse cerebral sceloris which includes adrenoleukodystrophy, encephalitis periaxialis, globoid cell leukodystrophy, diffuse cerebral sclerosis such as metachromatic leukodystrophy, allergic encephalomyelitis, necrotizing hemorrhagic encephalomyelitis, progressive multifocal leukoencephalopathy, multiple sclerosis, central pontine myelinolysis, transverse myelitis, neuromyelitis optica, Scrapie, Swayback, Chronic Fatigue Syndrome, Visna, High Pressure Nervous Syndrome, Meningism, spinal cord diseases such as amyotonia congenita, amyotrophic lateral sclerosis, spinal muscular atrophy such as Werdnig-Hoffmann Disease, spinal cord compression, spinal cord neoplasms such as epidural neoplasms, syringomyelia, Tabes Dorsalis, Stiff-Man Syndrome, mental retardation such as Angelman Syndrome, Cri-du-Chat Syndrome, De Lange's Syndrome, Down Syndrome, Gangliosidoses such as gangliosidoses G(M1), Sandhoff Disease, Tay-Sachs Disease, Hartnup Disease, homocystinuria, Laurence-Moon-Biedl Syndrome, Lesch-Nyhan Syndrome, Maple Syrup Urine Disease, mucolipidosis such as fucosidosis, neuronal ceroid-lipofuscinosis, oculocerebrorenal syndrome, phenylketonuria such as maternal phenylketonuria, Prader-Willi Syndrome, Rett Syndrome, Rubinstein-Taybi Syndrome, Tuberous Sclerosis, WAGR Syndrome, nervous system abnormalities such as holoprosencephaly, neural tube defects such as anencephaly which includes hydrangencephaly, Arnold-Chairi Deformity, encephalocele, meningocele, meningomyelocele, spinal dysraphism such as spina bifida cystica and spina bifida occulta.

[0816] Additional neurologic diseases which can be treated or detected with polynucleotides, polypeptides, agonists, and/or antagonists of the present invention include hereditary motor and sensory neuropathies which include Charcot-Marie Disease, Hereditary optic atrophy, Refsum's Disease, hereditary spastic paraplegia, Werdnig-Hoffmann Disease, Hereditary Sensory and Autonomic Neuropathies such as Congenital Analgesia and Familial Dysautonomia, Neurologic manifestations (such as agnosia that include Gerstmann's Syndrome, Amnesia such as retrograde amnesia, apraxia, neurogenic bladder, cataplexy, communicative disorders such as hearing disorders that includes deafness, partial hearing loss, loudness recruitment and tinnitus, language disorders such as aphasia which include agraphia, anomia, broca aphasia, and Wernicke Aphasia, Dyslexia such as Acquired Dyslexia, language development disorders, speech disorders such as aphasia which includes anomia, broca aphasia and Wernicke Aphasia, articulation disorders, communicative disorders such as speech disorders which include dysarthria, echolalia, mutism and stuttering, voice disorders such as aphonia and hoarseness, decerebrate state, delirium, fasciculation, hallucinations, meningism, movement disorders such as angelman syndrome, ataxia, athetosis, chorea, dystonia, hypokinesia, muscle hypotonia, myoclonus, tic, torticollis and tremor, muscle hypertonia such as muscle rigidity such as stiff-man syndrome, muscle spasticity, paralysis such as facial paralysis which includes Herpes Zoster Oticus, Gastroparesis, Hemiplegia, ophthalmoplegia such as diplopia, Duane's Syndrome, Horner's Syndrome, Chronic progressive external ophthalmoplegia such as Kearns Syndrome, Bulbar Paralysis, Tropical Spastic Paraparesis, Paraplegia such as Brown-Sequard Syndrome, quadriplegia, respiratory paralysis and vocal cord paralysis, paresis, phantom limb, taste disorders such as ageusia and dysgeusia, vision disorders such as amblyopia, blindness, color vision defects, diplopia, hemianopsia, scotoma and subnormal vision, sleep disorders such as hypersomnia which includes Kleine-Levin Syndrome, insomnia, and somnambulism, spasm such as trismus, unconsciousness such as coma, persistent vegetative state and syncope and vertigo, neuromuscular diseases such as amyotonia congenita, amyotrophic lateral sclerosis, Lambert-Eaton Myasthenic Syndrome, motor neuron disease, muscular atrophy such as spinal muscular atrophy, Charcot-Marie Disease and Werdnig-Hoffmann Disease, Postpoliomyelitis Syndrome, Muscular Dystrophy, Myasthenia Gravis, Myotonia Atrophica, Myotonia Confenita, Nemaline Myopathy, Familial Periodic Paralysis, Multiplex Paramyloclonus, Tropical Spastic Paraparesis and Stiff-Man Syndrome, peripheral nervous system diseases such as acrodynia, amyloid neuropathies, autonomic nervous system diseases such as Adie's Syndrome, Barre-Lieou Syndrome, Familial Dysautonomia, Horner's Syndrome, Reflex Sympathetic Dystrophy and Shy-Drager Syndrome, Cranial Nerve Diseases such as Acoustic Nerve Diseases such as Acoustic Neuroma which includes Neurofibromatosis 2, Facial Nerve Diseases such as Facial Neuralgia, Melkersson-Rosenthal Syndrome, ocular motility disorders which includes amblyopia, nystagmus, oculomotor nerve paralysis, ophthalmoplegia such as Duane's Syndrome, Horner's Syndrome, Chronic Progressive External Ophthalmoplegia which includes Kearns Syndrome, Strabismus such as Esotropia and Exotropia, Oculomotor Nerve Paralysis, Optic Nerve Diseases such as Optic Atrophy which includes Hereditary Optic Atrophy, Optic Disk Drusen, Optic Neuritis such as Neuromyelitis Optica, Papilledema, Trigeminal Neuralgia, Vocal Cord Paralysis, Demyelinating Diseases such as Neuromyelitis Optica and Swayback, and Diabetic neuropathies such as diabetic foot.

[0817] Additional neurologic diseases which can be treated or detected with polynucleotides, polypeptides, agonists, and/or antagonists of the present invention include nerve compression syndromes such as carpal tunnel syndrome, tarsal tunnel syndrome, thoracic outlet syndrome such as cervical rib syndrome, ulnar nerve compression syndrome, neuralgia such as causalgia, cervico-brachial neuralgia, facial neuralgia and trigeminal neuralgia, neuritis such as experimental allergic neuritis, optic neuritis, polyneuritis, polyradiculoneuritis and radiculities such as polyradiculitis, hereditary motor and sensory neuropathies such as Charcot-Marie Disease, Hereditary Optic Atrophy, Refsum's Disease, Hereditary Spastic Paraplegia and Werdnig-Hoffmann Disease, Hereditary Sensory and Autonomic Neuropathies which include Congenital Analgesia and Familial Dysautonomia, POEMS Syndrome, Sciatica, Gustatory Sweating and Tetany).

Endocrine Disorders

[0818] Polynucleotides or polypeptides, or agonists or antagonists of the present invention, may be used to treat, prevent, diagnose, and/or prognose disorders and/or diseases related to hormone imbalance, and/or disorders or diseases of the endocrine system.

[0819] Hormones secreted by the glands of the endocrine system control physical growth, sexual function, metabolism, and other functions. Disorders may be classified in two ways: disturbances in the production of hormones, and the inability of tissues, to respond to hormones. The etiology of these hormone imbalance or endocrine system diseases, disorders or conditions may be genetic, somatic, such as cancer and some autoimmune diseases, acquired (e.g., by chemotherapy, injury or toxins), or infectious. Moreover, polynucleotides, polypeptides, antibodies, and/or agonists or antagonists of the present invention can be used as a marker or detector of a particular disease or disorder related to the endocrine system and/or hormone imbalance.

[0820] Endocrine system and/or hormone imbalance and/or diseases encompass disorders of uterine motility including, but not limited to: complications with pregnancy and labor (e.g., pre-term labor, post-term pregnancy, spontaneous abortion, and slow or stopped labor); and disorders and/or diseases of the menstrual cycle (e.g., dysmenorrhea and endometriosis).

[0821] Endocrine system and/or hormone imbalance disorders and/or diseases include disorders and/or diseases of the pancreas, such as, for example, diabetes mellitus, diabetes insipidus, congenital pancreatic agenesis, pheochromocytoma—islet cell tumor syndrome; disorders and/or diseases of the adrenal glands such as, for example, Addison's Disease, corticosteroid deficiency, virilizing disease, hirsutism, Cushing's Syndrome, hyperaldosteronism, pheochromocytoma; disorders and/or diseases of the pituitary gland, such as, for example, hyperpituitarism, hypopituitarism, pituitary dwarfism, pituitary adenoma, panhypopituitarism, acromegaly, gigantism; disorders and/or diseases of the thyroid, including but not limited to, hyperthyroidism, hypothyroidism, Plummer's disease, Graves' disease (toxic diffuse goiter), toxic nodular goiter, thyroiditis (Hashimoto's thyroiditis, subacute granulomatous thyroiditis, and silent lymphocytic thyroiditis), Pendred's syndrome, myxedema, cretinism, thyrotoxicosis, thyroid hormone coupling defect, thymic aplasia, Hurthle cell tumours of the thyroid, thyroid cancer, thyroid carcinoma, Medullary thyroid carcinoma; disorders and/or diseases of the parathyroid, such as, for example, hyperparathyroidism, hypoparathyroidism; disorders and/or diseases of the hypothalamus.

[0822] In addition, endocrine, system and/or hormone imbalance disorders and/or diseases may also include disorders and/or diseases of the testes or ovaries, including cancer. Other disorders and/or diseases of the testes or ovaries further include, for example, ovarian cancer, polycystic ovary syndrome, Klinefelter's syndrome, vanishing testes syndrome (bilateral anorchia), congenital absence of Leydig's cells, cryptorchidism, Noonan's syndrome, myotonic dystrophy, capillary haemangioma of the testis (benign), neoplasias of the testis and neo-testis.

[0823] Moreover, endocrine system and/or hormone imbalance disorders and/or diseases may also include disorders and/or diseases such as, for example, polyglandular deficiency syndromes, pheochromocytoma, neuroblastoma, multiple Endocrine neoplasia, and disorders and/or cancers of endocrine tissues.

[0824] In another embodiment, a polypeptide of the invention, or polynucleotides, antibodies, agonists, or antagonists corresponding to that polypeptide, may be used to diagnose, prognose, prevent, and/or treat endocrine diseases and/or disorders associated with the tissue(s) in which the polypeptide of the invention is expressed, including one, two, three, four, five, or more tissues disclosed in Table 1B.2, column 5 (Tissue Distribution Library Code).

Reproductive System Disorders

[0825] The polynucleotides or polypeptides, or agonists or antagonists of the invention may be used for the diagnosis, treatment, or prevention of diseases and/or disorders of the reproductive system. Reproductive system disorders that can be treated by the compositions of the invention, include, but are not limited to, reproductive system injuries, infections, neoplastic disorders, congenital defects, and diseases or disorders which result in infertility, complications with pregnancy, labor, or parturition, and postpartum difficulties.

[0826] Reproductive system disorders and/or diseases include diseases and/or disorders of the testes, including testicular atrophy, testicular feminization, cryptorchism (unilateral and bilateral), anorchia, ectopic testis, epididymitis and orchitis (typically resulting from infections such as, for example, gonorrhea, mumps, tuberculosis, and syphilis), testicular torsion, vasitis nodosa, germ cell tumors (e.g., seminomas, embryonal cell carcinomas, teratocarcinomas, choriocarcinomas, yolk sac tumors, and teratomas), stromal tumors (e.g., Leydig cell tumors), hydrocele, hematocele, varicocele, spermatocele, inguinal hernia, and disorders of sperm production (e.g., immotile cilia syndrome, aspermia, asthenozoospermia, azoospermia, oligospermia, and teratozoospermia).

[0827] Reproductive system disorders also include disorders of the prostate gland, such as acute non-bacterial prostatitis, chronic non-bacterial prostatitis, acute bacterial prostatitis, chronic bacterial prostatitis, prostatodystonia, prostatosis, granulomatous prostatitis, malacoplakia, benign prostatic hypertrophy or hyperplasia, and prostate neoplastic disorders, including adenocarcinomas, transitional cell carcinomas, ductal carcinomas, and squamous cell carcinomas.

[0828] Additionally, the compositions of the invention may be useful in the diagnosis, treatment, and/or prevention of disorders or diseases of the penis and urethra, including inflammatory disorders, such as balanoposthitis, balanitis xerotica obliterans, phimosis, paraphimosis, syphilis, herpes simplex virus, gonorrhea, non-gonococcal urethritis, chlamydia, mycoplasma, trichomonas, HIV, AIDS, Reiter's syndrome, condyloma acuminatum, condyloma latum, and pearly penile papules; urethral abnormalities, such as hypospadias, epispadias, and phimosis; premalignant lesions, including Erythroplasia of Queyrat, Bowen's disease, Bowenoid paplosis, giant condyloma of Buscke-Lowenstein, and varrucous carcinoma; penile cancers, including squamous cell carcinomas, carcinoma in situ, verrucous carcinoma, and disseminated penile carcinoma; urethral neoplastic disorders, including penile urethral carcinoma, bulbomembranous urethral carcinoma, and prostatic urethral carcinoma; and erectile disorders, such as priapism, Peyronie's disease, erectile dysfunction, and impotence.

[0829] Moreover, diseases and/or disorders of the vas deferens include vasculititis and CBAVD (congenital bilateral absence of the vas deferens); additionally, the polynucleotides, polypeptides, and agonists or antagonists of the present invention may be used in the diagnosis, treatment, and/or prevention of diseases and/or disorders of the seminal vesicles, including hydatid disease, congenital chloride diarrhea, and polycystic kidney disease.

[0830] Other disorders and/or diseases of the male reproductive system include, for example, Klinefelter's syndrome, Young's syndrome, premature ejaculation, diabetes mellitus, cystic fibrosis, Kartagener's syndrome, high fever, multiple sclerosis, and gynecomastia.

[0831] Further, the polynucleotides, polypeptides, and agonists or antagonists of the present invention may be used in the diagnosis, treatment, and/or prevention of diseases and/or disorders of the vagina and vulva, including bacterial vaginosis, candida vaginitis, herpes simplex virus, chancroid, granuloma inguinale, lymphogranuloma venereum, scabies, human papillomavirus, vaginal trauma, vulvar trauma, adenosis, chlamydia vaginitis, gonorrhea, trichomonas vaginitis, condyloma acuminatum, syphilis, molluscum contagiosum, atrophic vaginitis, Paget's disease, lichen sclerosus, lichen planus, vulvodynia, toxic shock syndrome, vaginismus, vulvovaginitis, vulvar vestibulitis, and neoplastic disorders, such as squamous cell hyperplasia, clear cell carcinoma, basal cell carcinoma, melanomas, cancer of Bartholin's gland, and vulvar intraepithelial neoplasia.

[0832] Disorders and/or diseases of the uterus include dysmenorrhea, retroverted uterus, endometriosis, fibroids, adenomyosis, anovulatory bleeding, amenorrhea, Cushing's syndrome, hydatidiform moles, Asherman's syndrome, premature menopause, precocious puberty, uterine polyps, dysfunctional uterine bleeding (e.g., due to aberrant hormonal signals), and neoplastic disorders, such as adenocarcinomas, keiomyosarcomas, and sarcomas. Additionally, the polypeptides, polynucleotides, or agonists or antagonists of the invention may be useful as a marker or detector of, as well as in the diagnosis, treatment, and/or prevention of congenital uterine abnormalities, such as bicornuate uterus, septate uterus, simple unicornuate uterus, unicornuate uterus with a noncavitary rudimentary horn, unicornuate uterus with a non-communicating cavitary rudimentary horn, unicornuate uterus with a communicating cavitary horn, arcuate uterus, uterine didelfus, and T-shaped uterus.

[0833] Ovarian diseases and/or disorders include anovulation, polycystic ovary syndrome (Stein-Leventhal syndrome), ovarian cysts, ovarian hypofunction, ovarian insensitivity to gonadotropins, ovarian overproduction of androgens, right ovarian vein syndrome, amenorrhea, hirutism, and ovarian cancer (including, but not limited to, primary and secondary cancerous growth, Sertoli-Leydig tumors, endometriod carcinoma of the ovary, ovarian papillary serous adenocarcinoma, ovarian mucinous adenocarcinoma, and Ovarian Krukenberg tumors).

[0834] Cervical diseases and/or disorders include cervicitis, chronic cervicitis, mucopurulent cervicitis, cervical dysplasia, cervical polyps, Nabothian cysts, cervical erosion, cervical incompetence, and cervical neoplasms (including, for example, cervical carcinoma, squamous metaplasia, squamous cell carcinoma, adenosquamous cell neoplasia, and columnar cell neoplasia).

[0835] Additionally, diseases and/or disorders of the reproductive system include disorders and/or diseases of pregnancy, including miscarriage and stillbirth, such as early abortion, late abortion, spontaneous abortion, induced abortion, therapeutic abortion, threatened abortion, missed abortion, incomplete abortion, complete abortion, habitual abortion, missed abortion, and septic abortion; ectopic pregnancy, anemia, Rh incompatibility, vaginal bleeding during pregnancy, gestational diabetes, intrauterine growth retardation, polyhydramnios, HELLP syndrome, abruptio placentae, placenta previa, hyperemesis, preeclampsia, eclampsia, herpes gestationis, and urticaria of pregnancy. Additionally, the polynucleotides, polypeptides, and agonists or antagonists of the present invention may be used in the diagnosis, treatment, and/or prevention of diseases that can complicate pregnancy, including heart disease, heart failure, rheumatic heart disease, congenital heart disease, mitral valve prolapse, high blood pressure, anemia, kidney disease, infectious disease (e.g., rubella, cytomegalovirus, toxoplasmosis, infectious hepatitis, chlamydia, HIV, AIDS, and genital herpes), diabetes mellitus, Graves' disease, thyroiditis, hypothyroidism, Hashimoto's thyroiditis, chronic active hepatitis, cirrhosis of the liver, primary biliary cirrhosis, asthma, systemic, lupus eryematosis, rheumatoid arthritis, myasthenia gravis, idiopathic thrombocytopenic purpura, appendicitis, ovarian cysts, gallbladder disorders, and obstruction of the intestine.

[0836] Complications associated with labor and parturition include premature rupture of the membranes, pre-term labor, post-term pregnancy, postmaturity, labor that progresses too slowly, fetal distress (e.g., abnormal heart rate (fetal or maternal), breathing problems, and abnormal fetal position), shoulder dystocia, prolapsed umbilical cord, amniotic fluid embolism, and aberrant uterine bleeding.

[0837] Further, diseases and/or disorders of the postdelivery period, including endometritis, myometritis, parametritis, peritonitis, pelvic thrombophlebitis, pulmonary embolism, endotoxemia, pyelonephritis, saphenous thrombophlebitis, mastitis, cystitis, postpartum hemorrhage, and inverted uterus.

[0838] Other disorders and/or diseases of the female reproductive system that may be diagnosed, treated, and/or prevented by the polynucleotides, polypeptides, and agonists or antagonists of the present invention include, for example, Turner's syndrome, pseudohermaphroditism, premenstrual syndrome, pelvic inflammatory disease, pelvic congestion (vascular engorgement), frigidity, anorgasmia, dyspareunia, ruptured fallopian tube, and Mittelschmerz.

Infectious Disease

[0839] Polynucleotides or polypeptides, as well as agonists or antagonists of the present invention can be used to treat or detect infectious agents. For example, by increasing the immune response, particularly increasing the proliferation and differentiation of B and/or T cells, infectious diseases may be treated. The immune response may be increased by either enhancing an existing immune response, or by initiating a new immune response. Alternatively, polynucleotides or polypeptides, as well as agonists or antagonists of the present invention may also directly inhibit the infectious agent, without necessarily eliciting an immune response.

[0840] Viruses are one example of an infectious agent that can cause disease or symptoms that can be treated or detected by a polynucleotide or polypeptide and/or agonist or antagonist of the present invention. Examples of viruses, include, but are not limited to Examples of viruses, include, but are not limited to the following DNA and RNA viruses and viral families: Arbovirus, Adenoviridae, Arenaviridae, Arterivirus, Birnaviridae, Bunyaviridae, Caliciviridae, Circoviridae, Coronaviridae, Dengue, EBV, HIV, Flaviviridae, Hepadnaviridae (Hepatitis), Herpesviridae (such as, Cytomegalovirus, Herpes Simplex, Herpes Zoster), Mononegavirus (e.g., Paramyxoviridae, Morbillivirus, Rhabdoviridae), Orthomyxoviridae (e.g., Influenza A, Influenza B, and parainfluenza), Papiloma virus, Papovaviridae, Parvoviridae, Picornaviridae, Poxviridae (such as Smallpox or Vaccinia), Reoviridae (e.g., Rotavirus), Retroviridae (HTLV-I, HTLV-II, Lentivirus), and Togaviridae (e.g., Rubivirus). Viruses falling within these families can cause a variety of diseases or symptoms, including, but not limited to: arthritis, bronchiollitis, respiratory syncytial virus, encephalitis, eye infections (e.g., conjunctivitis, keratitis), chronic fatigue syndrome, hepatitis (A, B, C, E, Chronic Active, Delta), Japanese B encephalitis, Junin, Chikungunya, Rift Valley fever, yellow fever, meningitis, opportunistic infections (e.g., AIDS), pneumonia, Burkitt's Lymphoma, chickenpox, hemorrhagic fever, Measles, Mumps, Parainfluenza, Rabies, the common cold, Polio, leukemia, Rubella, sexually transmitted diseases, skin diseases (e.g., Kaposi's, warts), and viremia polynucleotides or polypeptides, or agonists or antagonists of the invention, can be used to treat or detect any of these symptoms or diseases. In specific embodiments, polynucleotides, polypeptides, or agonists or antagonists of the invention are used to treat: meningitis, Dengue, EBV, and/or hepatitis (e.g., hepatitis B). In an additional specific embodiment polynucleotides, polypeptides, or agonists or antagonists of the invention are used to treat patients nonresponsive to one or more other commercially available hepatitis vaccines. In a further specific embodiment polynucleotides, polypeptides, or agonists or antagonists of the invention are used to treat AIDS.

[0841] Similarly, bacterial and fungal agents that can cause disease or symptoms and that can be treated or detected by a polynucleotide or polypeptide and/or agonist or antagonist of the present invention include, but not limited to, the following Gram-Negative and Gram-positive bacteria, bacterial families, and fungi: Actinomyces (e.g., Norcardia), Acinetobacter, Cryptococcus neoformans, Aspergillus, Bacillaceae (e.g., Bacillus anthrasis), Bacteroides (e.g., Bacteroides fragilis), Blastomycosis, Bordetella, Borrelia (e.g., Borrelia burgdorferi), Brucella, Candidia, Campylobacter, Chlamydia, Clostridium (e.g., Clostridium botulinum, Clostridium dificile, Clostridium perfringens, Clostridium tetani), Coccidioides, Corynebacterium (e.g., Corynebacterium diptheriae), Cryptococcus, Dermatocycoses, E. coli (e.g., Enterotoxigenic E. coli and Enterohemorrhagic E. coli), Enterobacter (e.g. Enterobacter aerogenes), Enterobacteriaceae (Klebsiella, Salmonella (e.g., Salmonella typhi, Salmonella enteritidis, Salmonella typhi), Serratia, Yersinia, Shigella), Erysipelothrix, Haemophilus (e.g., Haemophilus influenza type B), Helicobacter, Legionella (e.g., Legionella pneumophila), Leptospira, Listeria (e.g., Listeria monocytogenes), Mycoplasma, Mycobacterium (e.g., Mycobacterium leprae and Mycobacterium tuberculosis), Vibrio (e.g., Vibrio cholerae), Neisseriaceae (e.g., Neisseria gonorrhea, Neisseria meningitidis), Pasteurellacea, Proteus, Pseudomonas (e.g., Pseudomonas aeruginosa), Rickettsiaceae, Spirochetes (e.g., Treponema spp., Leptospira spp., Borrelia spp.), Shigella spp., Staphylococcus (e.g., Staphylococcus aureus), Meningiococcus, Pneumococcus and Streptococcus (e.g., Streptococcus pneumoniae and Groups A, B, and C Streptococci), and Ureaplasmas. These bacterial, parasitic, and fungal families can cause diseases or symptoms, including, but not limited to: antibiotic-resistant infections, bacteremia, endocarditis, septicemia, eye infections (e.g., conjunctivitis), uveitis, tuberculosis, gingivitis, bacterial diarrhea, opportunistic infections (e.g., AIDS related infections), paronychia, prosthesis-related infections, dental caries, Reiter's Disease, respiratory tract infections, such as Whooping Cough or Empyema, sepsis, Lyme Disease, Cat-Scratch Disease, dysentery, paratyphoid fever, food poisoning, Legionella disease, chronic and acute inflammation, erythema, yeast infections, typhoid, pneumonia, gonorrhea, meningitis (e.g., mengitis types A and B), chlamydia, syphillis, diphtheria, leprosy, brucellosis, peptic ulcers, anthrax, spontaneous abortions, birth defects, pneumonia, lung infections, ear infections, deafness, blindness, lethargy, malaise, vomiting, chronic diarrhea, Crohn's disease, colitis, vaginosis, sterility, pelvic inflammatory diseases, candidiasis, paratuberculosis, tuberculosis, lupus, botulism, gangrene, tetanus, impetigo, Rheumatic Fever, Scarlet Fever, sexually transmitted diseases, skin diseases (e.g., cellulitis, dermatocycoses), toxemia, urinary tract infections, wound infections, noscomial infections. Polynucleotides or polypeptides, agonists or antagonists of the invention, can be used to treat or detect any of these symptoms or diseases. In specific embodiments, polynucleotides, polypeptides, agonists or antagonists of the invention are used to treat: tetanus, diptheria, botulism, and/or meningitis type B.

[0842] Moreover, parasitic agents causing disease or symptoms that can be treated, prevented, and/or diagnosed by a polynucleotide or polypeptide and/or agonist or antagonist of the present invention include, but not limited to, the following families or class: Amebiasis, Babesiosis, Coccidiosis, Cryptosporidiosis, Dientamoebiasis, Dourine, Ectoparasitic, Giardias, Helminthiasis, Leishmaniasis, Schistisoma, Theileriasis, Toxoplasmosis, Trypanosomiasis, and Trichomonas and Sporozoans (e.g., Plasmodium virax, Plasmodium falciparium, Plasmodium malariae and Plasmodium ovale). These parasites can cause a variety of diseases or symptoms, including, but not limited to: Scabies, Trombiculiasis, eye infections, intestinal disease (e.g., dysentery, giardiasis), liver disease, lung disease, opportunistic infections (e.g., AIDS related), malaria, pregnancy complications, and toxoplasmosis polynucleotides or polypeptides, or agonists or antagonists of the invention, can be used to treat, prevent, and/or diagnose any of these symptoms or diseases. In specific embodiments, polynucleotides, polypeptides, or agonists or antagonists of the invention are used to treat, prevent, and/or diagnose malaria.

[0843] Polynucleotides or polypeptides, as well as agonists or antagonists of the present invention of the present invention could either be by administering an effective amount of a polypeptide to the patient, or by removing cells from the patient, supplying the cells with a polynucleotide of the present invention, and returning the engineered cells to the patient (ex vivo therapy). Moreover, the polypeptide or polynucleotide of the present invention can be used as an antigen in a vaccine to raise an immune response against infectious disease.

Regeneration

[0844] Polynucleotides or polypeptides, as well as agonists or antagonists of the present invention can be used to differentiate, proliferate, and attract cells, leading to the regeneration of tissues. (See, Science 276:59-87 (1997)). The regeneration of tissues could be used to repair, replace, or protect tissue damaged by congenital defects, trauma (wounds, burns, incisions, or ulcers), age, disease (e.g. osteoporosis, osteocarthritis, periodontal disease, liver failure), surgery, including cosmetic plastic surgery, fibrosis, reperfusion injury, or systemic cytokine damage.

[0845] Tissues that could be regenerated using the present invention include organs (e.g., pancreas, liver, intestine, kidney, skin, endothelium), muscle (smooth, skeletal or cardiac), vasculature (including vascular and lymphatics), nervous, hematopoietic, and skeletal (bone, cartilage, tendon, and ligament) tissue. Preferably, regeneration occurs without or decreased scarring. Regeneration also may include angiogenesis.

[0846] Moreover, polynucleotides or polypeptides, as well as agonists or antagonists of the present invention, may increase regeneration of tissues difficult to heal. For example, increased tendon/ligament regeneration would quicken recovery time after damage. Polynucleotides or polypeptides, as well as agonists or antagonists of the present invention could also be used prophylactically in an effort to avoid damage. Specific diseases that could be treated include of tendinitis, carpal tunnel syndrome, and other tendon or ligament defects. A further example of tissue regeneration of non-healing wounds includes pressure ulcers, ulcers associated with vascular insufficiency, surgical, and traumatic wounds.

[0847] Similarly, nerve and brain tissue could also be regenerated by using polynucleotides or polypeptides, as well as agonists or antagonists of the present invention, to proliferate and differentiate nerve cells. Diseases that could be treated using this method include central and peripheral nervous system diseases, neuropathies, or mechanical and traumatic disorders (e.g., spinal cord disorders, head trauma, cerebrovascular disease, and stoke). Specifically, diseases associated with peripheral nerve injuries, peripheral neuropathy (e.g., resulting from chemotherapy or other medical therapies), localized neuropathies, and central nervous system diseases (e.g., Alzheimer's disease, Parkinson's disease, Huntington's disease, amyotrophic lateral sclerosis, and Shy-Drager syndrome), could all be treated using the polynucleotides or polypeptides, as well as agonists or antagonists of the present invention.

Gastrointestinal Disorders

[0848] Polynucleotides or polypeptides, or agonists or antagonists of the present invention, may be used to treat, prevent, diagnose, and/or prognose gastrointestinal disorders, including inflammatory diseases and/or conditions, infections, cancers (e.g., intestinal neoplasms (carcinoid tumor of the small intestine, non-Hodgkin's lymphoma of the small intestine, small bowl lymphoma)), and ulcers, such as peptic ulcers.

[0849] Gastrointestinal disorders include dysphagia, odynophagia, inflammation of the esophagus, peptic esophagitis, gastric reflux, submucosal fibrosis and structuring, Mallory-Weiss lesions, leiomyomas, lipomas, epidermal cancers, adeoncarcinomas, gastric retention disorders, gastroenteritis, gastric atrophy, gastric/stomach cancers, polyps of the stomach, autoimmune disorders such as pernicious anemia, pyloric stenosis, gastritis (bacterial, viral, eosinophilic, stress-induced, chronic erosive, atrophic, plasma cell, and Ménétrier's), and peritoneal diseases (e.g., chyloperioneum, hemoperitoneum, mesenteric cyst, mesenteric lymphadenitis, mesenteric vascular occlusion, panniculitis, neoplasms, peritonitis, pneumoperitoneum, bubphrenic abscess,).

[0850] Gastrointestinal disorders also include disorders associated with the small intestine, such as malabsorption syndromes, distension, irritable bowel syndrome, sugar intolerance, celiac disease, duodenal ulcers, duodenitis, tropical sprue, Whipple's disease, intestinal lymphangiectasia, Crohn's disease, appendicitis, obstructions of the ileum, Meckel's diverticulum, multiple diverticula, failure of complete rotation of the small and large intestine, lymphoma, and bacterial and parasitic diseases (such as Traveler's diarrhea, typhoid and paratyphoid, cholera, infection by Roundworms (Ascariasis lumbricoides), Hookworms (Ancylostoma duodenale), Threadworms (Enterobius vermicularis), Tapeworms (Taenia saginata, Echinococcus granulosus, Diphyllobothrium spp., and T. solium).

[0851] Liver diseases and/or disorders include intrahepatic cholestasis (alagille syndrome, biliary liver cirrhosis), fatty liver (alcoholic fatty liver, reye syndrome), hepatic vein thrombosis, hepatolentricular degeneration, hepatomegaly, hepatopulmonary syndrome, hepatorenal syndrome, portal hypertension (esophageal and gastric varices), liver abscess (amebic liver abscess), liver cirrhosis (alcoholic, biliary and experimental), alcoholic liver diseases (fatty liver, hepatitis, cirrhosis), parasitic (hepatic echinococcosis, fascioliasis, amebic liver abscess), jaundice (hemolytic, hepatocellular, and cholestatic), cholestasis, portal hypertension, liver enlargement, ascites, hepatitis (alcoholic hepatitis, animal hepatitis, chronic hepatitis (autoimmune, hepatitis B, hepatitis C, hepatitis D, drug induced), toxic hepatitis, viral human hepatitis (hepatitis A, hepatitis B, hepatitis C, hepatitis D, hepatitis E), Wilson's disease, granulomatous hepatitis, secondary biliary cirrhosis, hepatic encephalopathy, portal hypertension, varices, hepatic encephalopathy, primary biliary cirrhosis, primary sclerosing cholangitis, hepatocellular adenoma, hemangiomas, bile stones, liver failure (hepatic encephalopathy, acute liver failure), and liver neoplasms (angiomyolipoma, calcified liver metastases, cystic liver metastases, epithelial tumors, fibrolamellar hepatocarcinoma, focal nodular hyperplasia, hepatic adenoma, hepatobiliary cystadenoma, hepatoblastoma, hepatocellular carcinoma, hepatoma, liver cancer, liver hemangioendothelioma, mesenchymal hamartoma, mesenchymal tumors of liver, nodular regenerative hyperplasia, benign liver tumors (Hepatic cysts [Simple cysts, Polycystic liver disease, Hepatobiliary cystadenoma, Choledochal cyst], Mesenchymal tumors [Mesenchymal hamartoma, Infantile hemangioendothelioma, Hemangioma, Peliosis hepatis, Lipomas, Inflammatory pseudotumor, Miscellaneous], Epithelial tumors [Bile duct epithelium (Bile duct hamartoma, Bile duct adenoma), Hepatocyte (Adenoma, Focal nodular hyperplasia, Nodular regenerative hyperplasia)], malignant liver tumors [hepatocellular, hepatoblastoma, hepatocellular carcinoma, cholangiocellular, cholangiocarcinoma, cystadenocarcinoma, tumors of blood vessels, angiosarcoma, Karposi's sarcoma, hemangioendothelioma, other tumors, embryonal sarcoma, fibrosarcoma, leiomyosarcoma, rhabdomyosarcoma, carcinosarcoma, teratoma, carcinoid, squamous carcinoma, primary lymphoma]), peliosis hepatis, erythrohepatic porphyria, hepatic porphyria (acute intermittent porphyria, porphyria cutanea tarda), Zellweger syndrome).

[0852] Pancreatic diseases and/or disorders include acute pancreatitis, chronic pancreatitis (acute necrotizing pancreatitis, alcoholic pancreatitis), neoplasms (adenocarcinoma of the pancreas, cystadenocarcinoma, insulinoma, gastrinoma, and glucagonoma, cystic neoplasms, islet-cell tumors, pancreoblastoma), and other pancreatic diseases (e.g., cystic fibrosis, cyst (pancreatic pseudocyst, pancreatic fistula, insufficiency)).

[0853] Gallbladder diseases include gallstones (cholelithiasis and choledocholithiasis), postcholecystectomy syndrome, diverticulosis of the gallbladder, acute cholecystitis, chronic cholecystitis, bile duct tumors, and mucocele.

[0854] Diseases and/or disorders of the large intestine include antibiotic-associated colitis, diverticulitis, ulcerative colitis, acquired megacolon, abscesses, fungal and bacterial infections, anorectal disorders (e.g., fissures, hemorrhoids), colonic diseases (colitis, colonic neoplasms [colon cancer, adenomatous colon polyps (e.g., villous adenoma), colon carcinoma, colorectal cancer], colonic diverticulitis, colonic diverticulosis, megacolon [Hirschsprung disease, toxic megacolon]; sigmoid diseases [proctocolitis, sigmoin neoplasms]), constipation, Crohn's disease, diarrhea (infantile diarrhea, dysentery), duodenal diseases (duodenal neoplasms, duodenal obstruction, duodenal ulcer, duodenitis), enteritis (enterocolitis), HIV enteropathy, ileal diseases (ileal neoplasms, ileitis), immunoproliferative small intestinal disease, inflammatory bowel disease (ulcerative colitis, Crohn's disease), intestinal atresia, parasitic diseases (anisakiasis, balantidiasis, blastocystis infections, cryptosporidiosis, dientamoebiasis, amebic dysentery, giardiasis), intestinal fistula (rectal fistula), intestinal neoplasms (cecal neoplasms, colonic neoplasms, duodenal neoplasms, ileal neoplasms, intestinal polyps, jejunal neoplasms, rectal neoplasms), intestinal obstruction (afferent loop syndrome, duodenal obstruction, impacted feces, intestinal pseudo-obstruction [cecal volvulus], intussusception), intestinal perforation, intestinal polyps (colonic polyps, gardner syndrome, peutz-jeghers syndrome), jejunal diseases (jejunal neoplasms), malabsorption syndromes (blind loop syndrome, celiac disease, lactose intolerance, short bowl syndrome, tropical sprue, whipple's disease), mesenteric vascular occlusion, pneumatosis cystoides intestinalis, protein-losing enteropathies (intestinal lymphagiectasis), rectal diseases (anus diseases, fecal incontinence, hemorrhoids, proctitis, rectal fistula, rectal prolapse, rectocele), peptic ulcer (duodenal ulcer, peptic esophagitis, hemorrhage, perforation, stomach ulcer, Zollinger-Ellison syndrome), postgastrectomy syndromes (dumping syndrome), stomach diseases (e.g., achlorhydria, duodenogastric reflux (bile reflux), gastric antral vascular ectasia, gastric fistula, gastric outlet obstruction, gastritis (atrophic or hypertrophic), gastroparesis, stomach dilatation, stomach diverticulum, stomach neoplasms (gastric cancer, gastric polyps, gastric adenocarcinoma, hyperplastic gastric polyp), stomach rupture, stomach ulcer, stomach volvulus), tuberculosis, visceroptosis, vomiting (e.g., hematemesis, hyperemesis gravidarum, postoperative nausea and vomiting) and hemorrhagic colitis.

[0855] Further diseases and/or disorders of the gastrointestinal system include biliary tract diseases, such as, gastroschisis, fistula (e.g., biliary fistula, esophageal fistula, gastric fistula, intestinal fistula, pancreatic fistula), neoplasms (e.g., biliary tract neoplasms, esophageal neoplasms, such as adenocarcinoma of the esophagus, esophageal squamous cell carcinoma, gastrointestinal neoplasms, pancreatic neoplasms, such as adenocarcinoma of the pancreas, mucinous cystic neoplasm of the pancreas, pancreatic cystic neoplasms, pancreatoblastoma, and peritoneal neoplasms), esophageal disease (e.g., bullous diseases, candidiasis, glycogenic acanthosis, ulceration, barrett esophagus varices, atresia, cyst, diverticulum (e.g., Zenker's diverticulum), fistula (e.g., tracheoesophageal fistula), motility disorders (e.g., CREST syndrome, deglutition disorders, achalasia, spasm, gastroesophageal reflux), neoplasms, perforation (e.g., Boerhaave syndrome, Mallory-Weiss syndrome), stenosis, esophagitis, diaphragmatic hernia (e.g., hiatal hernia); gastrointestinal diseases, such as, gastroenteritis (e.g., cholera morbus, norwalk virus infection), hemorrhage (e.g., hematemesis, melena, peptic ulcer hemorrhage), stomach neoplasms (gastric cancer, gastric polyps, gastric adenocarcinoma, stomach cancer)), hernia (e.g., congenital diaphragmatic hernia, femoral hernia, inguinal hernia, obturator hernia, umbilical hernia, ventral hernia), and intestinal diseases (e.g., cecal diseases (appendicitis, cecal neoplasms)).

Chemotaxis

[0856] Polynucleotides or polypeptides, as well as agonists or antagonists of the present invention may have chemotaxis activity. A chemotaxic molecule attracts or mobilizes cells (e.g., monocytes, fibroblasts, neutrophils, T-cells, mast cells, eosinophils, epithelial and/or endothelial cells) to a particular site in the body, such as inflammation, infection, or site of hyperproliferation. The mobilized cells can then fight off and/or heal the particular trauma or abnormality.

[0857] Polynucleotides or polypeptides, as well as agonists or antagonists of the present invention may increase chemotaxic activity of particular cells. These chemotactic molecules can then be used to treat inflammation, infection, hyperproliferative disorders, or any immune system disorder by increasing the number of cells targeted to a particular location in the body. For example, chemotaxic molecules can be used to treat wounds and other trauma to tissues by attracting immune cells to the injured location. Chemotactic molecules of the present invention can also attract fibroblasts, which can be used to treat wounds.

[0858] It is also contemplated that polynucleotides or polypeptides, as well as agonists or antagonists of the present invention may inhibit chemotactic activity. These molecules could also be used to treat disorders. Thus, polynucleotides or polypeptides, as well as agonists or antagonists of the present invention could be used as an inhibitor of chemotaxis.

Binding Activity

[0859] A polypeptide of the present invention may be used to screen for molecules that bind to the polypeptide or for molecules to which the polypeptide binds. The binding of the polypeptide and the molecule may activate (agonist), increase, inhibit (antagonist), or decrease activity of the polypeptide or the molecule bound. Examples of such molecules include antibodies, oligonucleotides, proteins (e.g., receptors), or small molecules.

[0860] Preferably, the molecule is closely related to the natural ligand of the polypeptide, e.g., a fragment of the ligand, or a natural substrate, a ligand, a structural or functional mimetic. (See, Coligan et al., Current Protocols in Immunology 1(2): Chapter 5 (1991)). Similarly, the molecule can be closely related to the natural receptor to which the polypeptide binds, or at least, a fragment of the receptor capable of being bound by the polypeptide (e.g., active site). In either case, the molecule can be rationally designed using known techniques.

[0861] Preferably, the screening for these molecules involves producing appropriate cells which express the polypeptide. Preferred cells include cells from mammals, yeast, Drosophila, or E. coli. Cells expressing the polypeptide (or cell membrane containing the expressed polypeptide) are then preferably contacted with a test compound potentially containing the molecule to observe binding, stimulation, or inhibition of activity of either the polypeptide or the molecule.

[0862] The assay may simply test binding of a candidate compound to the polypeptide, wherein binding is detected by a label, or in an assay involving competition with a labeled competitor. Further, the assay may test whether the candidate compound results in a signal generated by binding to the polypeptide.

[0863] Alternatively, the assay can be carried out using cell-free preparations, polypeptide/molecule affixed to a solid support, chemical libraries, or natural product mixtures. The assay may also simply comprise the steps of mixing a candidate compound with a solution containing a polypeptide, measuring polypeptide/molecule activity or binding, and comparing the polypeptide/molecule activity or binding to a standard.

[0864] Preferably, an ELISA assay can measure polypeptide level or activity in a sample (e.g., biological sample) using a monoclonal or polyclonal antibody. The antibody can measure polypeptide level or activity by either binding, directly or indirectly, to the polypeptide or by competing with the polypeptide for a substrate.

[0865] Additionally, the receptor to which the polypeptide of the present invention binds can be identified by numerous methods known to those of skill in the art, for example, ligand panning and FACS sorting (Coligan, et al., Current Protocols in Immun., 1(2), Chapter 5, (1991)). For example, expression cloning is employed wherein polyadenylated RNA is prepared from a cell responsive to the polypeptides, for example, NIH3T3 cells which are known to contain multiple receptors for the FGF family proteins, and SC-3 cells, and a cDNA library created from this RNA is divided into pools and used to transfect COS cells or other cells that are not responsive to the polypeptides. Transfected cells which are grown on glass slides are exposed to the polypeptide of the present invention, after they have been labeled. The polypeptides can be labeled by a variety of means including iodination or inclusion of a recognition site for a site-specific protein kinase.

[0866] Following fixation and incubation, the slides are subjected to auto-radiographic analysis. Positive pools are identified and sub-pools are prepared and re-transfected using an iterative sub-pooling and re-screening process, eventually yielding a single clones that encodes the putative receptor.

[0867] As an alternative approach for receptor identification, the labeled polypeptides can be photoaffinity linked with cell membrane or extract preparations that express the receptor molecule. Cross-linked material is resolved by PAGE analysis and exposed to X-ray film. The labeled complex containing the receptors of the polypeptides can be excised, resolved into peptide fragments, and subjected to protein microsequencing. The amino acid sequence obtained from microsequencing would be used to design a set of degenerate oligonucleotide probes to screen a cDNA library to identify the genes encoding the putative receptors.

[0868] Moreover, the techniques of gene-shuffling, motif-shuffling, exon-shuffling, and/or codon-shuffling (collectively referred to as “DNA shuffling”) may be employed to modulate the activities of the polypeptide of the present invention thereby effectively generating agonists and antagonists of the polypeptide of the present invention. See generally, U.S. Pat. Nos. 5,605,793, 5,811,238, 5,830,721, 5,834,252, and 5,837,458, and Patten, P. A., et al: Curr. Opinion Biotechnol. 8:724-33 (1997); Harayama, S. Trends Biotechnol. 16(2):76-82 (1998); Hansson, L. O., et al., J. Mol. Biol. 287:265-76 (1999); and Lorenzo, M. M. and Blasco, R. Biotechniques 24(2):308-13 (1998); each of these patents and publications are hereby incorporated by reference). In one embodiment, alteration of polynucleotides and corresponding polypeptides may be achieved by DNA shuffling. DNA shuffling involves the assembly of two or more DNA segments into a desired molecule by homologous, or site-specific, recombination. In another embodiment, polynucleotides and corresponding polypeptides may be altered by being subjected to random mutagenesis by error-prone PCR, random nucleotide insertion or other methods prior to recombination. In another embodiment, one or more components, motifs, sections, parts, domains, fragments, etc., of the polypeptide of the present invention may be recombined with one or more components, motifs, sections, parts, domains, fragments, etc. of one or more heterologous molecules. In preferred embodiments, the heterologous molecules are family members. In further preferred embodiments, the heterologous molecule is a growth factor such as, for example, platelet-derived growth factor (PDGF), insulin-like growth factor (IGF-I), transforming growth factor (TGF)-alpha, epidermal growth factor (EGF), fibroblast growth factor (FGF), TGF-beta, bone morphogenetic protein (BMP)-2, BMP-4, BMP-5, BMP-6, BMP-7, activins A and B, decapentaplegic (dpp), 60A, OP-2, dorsalin, growth differentiation factors (GDFs), nodal, MIS, inhibin-alpha, TGF-beta1, TGF-beta2, TGF-beta3, TGF-beta5, and glial-derived neurotrophic factor (GDNF).

[0869] Other preferred fragments are biologically active fragments of the polypeptide of the present invention. Biologically active fragments are those exhibiting activity similar, but not necessarily identical, to an activity of the polypeptide of the present invention. The biological activity of the fragments may include an improved desired activity, or a decreased undesirable activity.

[0870] Additionally, this invention provides a method of screening compounds to identify those which modulate the action of the polypeptide of the present invention. An example of such an assay comprises combining a mammalian fibroblast cell, a the polypeptide of the present invention, the compound to be screened and ³[H] thymidine under cell culture conditions where the fibroblast cell would normally proliferate. A control assay may be performed in the absence of the compound to be screened and compared to the amount of fibroblast proliferation in the presence of the compound to determine if the compound stimulates proliferation by determining the uptake of ³[H] thymidine in each case. The amount of fibroblast cell proliferation is measured by liquid scintillation chromatography which measures the incorporation of ³[H] thymidine. Both agonist and antagonist compounds may be identified by this procedure.

[0871] In another method, a mammalian cell or membrane preparation expressing a receptor for a polypeptide of the present invention is incubated with a labeled polypeptide of the present invention in the presence of the compound. The ability of the compound to enhance or block this interaction could then be measured. Alternatively, the response of a known second messenger system following interaction of a compound to be screened and the receptor is measured and the ability of the compound to bind to the receptor and elicit a second messenger response is measured to determine if the compound is a potential agonist or antagonist. Such second messenger systems include but are not limited to, cAMP guanylate cyclase, ion channels or phosphoinositide hydrolysis.

[0872] All of these above assays can be used as diagnostic or prognostic markers. The molecules discovered using these assays can be used to treat disease or to bring about a particular result in a patient (e.g., blood vessel growth) by activating or inhibiting the polypeptide/molecule. Moreover, the assays can discover agents which may inhibit or enhance the production of the polypeptides of the invention from suitably manipulated cells or tissues.

[0873] Therefore, the invention includes a method of identifying compounds which bind to a polypeptide of the invention comprising the steps of: (a) incubating a candidate binding compound with a polypeptide of the present invention; and (b) determining if binding has occurred. Moreover, the invention includes a method of identifying agonists/antagonists comprising the steps of: (a) incubating a candidate compound with a polypeptide of the present invention, (b) assaying a biological activity, and (b) determining if a biological activity of the polypeptide has been altered.

Targeted Delivery

[0874] In another embodiment, the invention provides a method of delivering compositions to targeted cells expressing a receptor for a polypeptide of the invention, or cells expressing a cell bound form of a polypeptide of the invention.

[0875] As discussed herein, polypeptides or antibodies of the invention may be associated with heterologous polypeptides, heterologous nucleic acids, toxins, or prodrugs via hydrophobic, hydrophilic, ionic and/or covalent interactions. In one embodiment, the invention provides a method for the specific delivery of compositions of the invention to cells by administering polypeptides of the invention (including antibodies) that are associated with heterologous polypeptides, or nucleic acids. In one example, the invention provides a method for delivering a therapeutic protein into the targeted cell. In another example, the invention provides a method for delivering a single stranded nucleic acid (e.g., antisense or ribozymes) or double stranded nucleic acid (e.g., DNA that can integrate into the cell's genome or replicate episomally and that can be transcribed) into the targeted cell.

[0876] In another embodiment, the invention provides a method for the specific destruction of cells (e.g., the destruction of tumor cells) by administering polypeptides of the invention (e.g., polypeptides of the invention or antibodies of the invention) in association with toxins or cytotoxic prodrugs.

[0877] By “toxin” is meant compounds that bind and activate endogenous cytotoxic effector systems, radioisotopes, holotoxins, modified toxins, catalytic subunits of toxins, or any molecules or enzymes not normally present in or on the surface of a cell that under defined conditions cause the cell's death. Toxins that may be used according to the methods of the invention include, but are not limited to, radioisotopes known in the art, compounds such as, for example, antibodies (or complement fixing containing portions thereof) that bind an inherent or induced endogenous cytotoxic effector system, thymidine kinase, endonuclease, RNAse, alpha toxin, ricin, abrin, Pseudomonas exotoxin A, diphtheria toxin, saporin, momordin, gelonin, pokeweed antiviral protein, alpha-sarcin and cholera toxin. By “cytotoxic prodrug” is meant a non-toxic compound that is converted by an enzyme, normally present in the cell, into a cytotoxic compound. Cytotoxic prodrugs that may be used according to the methods of the invention include, but are not limited to, glutamyl derivatives of benzoic acid mustard alkylating agent, phosphate derivatives of etoposide or mitomycin C, cytosine arabinoside, daunorubisin, and phenoxyacetamide derivatives of doxorubicin.

Drug Screening

[0878] Further contemplated is the use of the polypeptides of the present invention, or the polynucleotides encoding these polypeptides, to screen for molecules which modify the activities of the polypeptides of the present invention. Such a method would include contacting the polypeptide of the present invention with a selected compound(s) suspected of having antagonist or agonist activity, and assaying the activity of these polypeptides following binding.

[0879] This invention is particularly useful for screening therapeutic compounds by using the polypeptides of the present invention, or binding fragments thereof, in any of a variety of drug screening techniques. The polypeptide or fragment employed in such a test may be affixed to a solid support, expressed on a cell surface, free in solution, or located intracellularly. One method of drug screening utilizes eukaryotic or prokaryotic host cells which are stably transformed with recombinant nucleic acids expressing the polypeptide or fragment. Drugs are screened against such transformed cells in competitive binding assays. One may measure, for example, the formulation of complexes between the agent being tested and a polypeptide of the present invention.

[0880] Thus, the present invention provides methods of screening for drugs or any other agents which affect activities mediated by the polypeptides of the present invention. These methods comprise contacting such an agent with a polypeptide of the present invention or a fragment thereof and assaying for the presence of a complex between the agent and the polypeptide or a fragment thereof, by methods well known in the art. In such a competitive binding assay, the agents to screen are typically labeled. Following incubation, free agent is separated from that present in bound form, and the amount of free or uncomplexed label is a measure of the ability of a particular agent to bind to the polypeptides of the present invention.

[0881] Another technique for drug screening provides high throughput screening for compounds having suitable binding affinity to the polypeptides of the present invention, and is described in great detail in European Patent Application 84/03564, published on Sep. 13, 1984, which is incorporated herein by reference herein. Briefly stated, large numbers of different small peptide test compounds are synthesized on a solid substrate, such as plastic pins or some other surface. The peptide test compounds are reacted with polypeptides of the present invention and washed. Bound polypeptides are then detected by methods well known in the art. Purified polypeptides are coated directly onto plates for use in the aforementioned drug screening techniques. In addition, non-neutralizing antibodies may be used to capture the peptide and immobilize it on the solid support.

[0882] This invention also contemplates the use of competitive drug screening assays in which neutralizing antibodies capable of binding polypeptides of the present invention specifically compete with a test compound for binding to the polypeptides or fragments thereof. In this manner, the antibodies are used to detect the presence of any peptide which shares one or more antigenic epitopes with a polypeptide of the invention.

Antisense and Ribozyme (Antagonists)

[0883] In specific embodiments, antagonists according, to the present invention are nucleic acids corresponding to the sequences contained in SEQ ID NO:X, or the complementary strand thereof, and/or to cDNA sequences contained in cDNA ATCC Deposit No:Z identified for example, in Table 1A and/or 1B. In one embodiment, antisense sequence is generated internally, by the organism, in another embodiment, the antisense sequence is separately administered (see, for example, O'Connor, J., Neurochem. 56:560 (1991). Oligodeoxynucleotides as Antisense Inhibitors of Gene Expression, CRC Press, Boca Raton, Fla. (1988). Antisense technology can be used to control gene expression through antisense DNA or RNA, or through triple-helix formation. Antisense techniques are discussed for example, in Okano, J., Neurochem. 56:560 (1991); Oligodeoxynucleotides as Antisense Inhibitors of Gene Expression, CRC Press, Boca Raton, Fla. (1988). Triple helix formation is discussed in, for instance, Lee et al., Nucleic Acids Research 6:3073 (1979); Cooney et al., Science 241:456 (1988); and Dervan et al., Science 251:1300 (1991). The methods are based on binding of a polynucleotide to a complementary DNA or RNA.

[0884] For example, the use of c-myc and c-myb antisense RNA constructs to inhibit the growth of the non-lymphocytic leukemia cell line HL-60 and other cell lines was previously described. (Wickstrom et al. (1988); Anfossi et al. (1989)). These experiments were performed in vitro by incubating cells with the oligoribonucleotide. A similar procedure for in vivo use is described in WO 91/15580. Briefly, a pair of oligonucleotides for a given antisense RNA is produced as follows: A sequence complimentary to the first 15 bases of the open reading frame is flanked by an EcoR1 site on the 5 end and a HindIII site on the 3 end. Next, the pair of oligonucleotides is heated at 90° C. for one minute and then annealed in 2× ligation buffer (20 mM TRIS HCl pH 7.5, 10 mM MgCl2, 10 MM dithiothreitol (DTT) and 0.2 mM ATP) and then ligated to the EcoR1/Hind III site of the retroviral vector PMV7 (WO 91/15580).

[0885] For example, the 5′ coding portion of a polynucleotide that encodes the polypeptide of the present invention may be used to design an antisense RNA oligonucleotide of from about 10 to 40 base pairs in length. A DNA oligonucleotide is designed to be complementary to a region of the gene involved in transcription thereby preventing transcription and the production of the receptor. The antisense RNA oligonucleotide hybridizes to the mRNA in vivo and blocks translation of the mRNA molecule into receptor polypeptide.

[0886] In one embodiment, the antisense nucleic acid of the invention is produced intracellularly by transcription from an exogenous sequence. For example, a vector or a portion thereof, is transcribed, producing an antisense nucleic acid (RNA) of the invention. Such a vector would contain a sequence encoding the antisense nucleic acid. Such a vector can remain episomal or become chromosomally integrated, as long as it can be transcribed to produce the desired antisense RNA. Such vectors can be constructed by recombinant DNA technology methods standard in the art. Vectors can be plasmid, viral, or others known in the art, used for replication and expression in vertebrate cells. Expression of the sequence encoding the polypeptide of the present invention or fragments thereof, can be by any promoter known in the art to act in vertebrate, preferably human cells. Such promoters can be inducible or constitutive. Such promoters include, but are not limited to, the SV40 early promoter region (Bernoist and Chambon, Nature 29:304-310 (1981), the promoter contained in the 3′ long terminal repeat of Rous sarcoma virus (Yamamoto et al., Cell 22:787-797 (1980), the herpes thymidine promoter (Wagner et al., Proc. Natl. Acad. Sci. U.S.A. 78:1441-1445 (1981), the regulatory sequences of the metallothionein gene (Brinster, et al., Nature 296:39-42 (1982)), etc.

[0887] The antisense nucleic acids of the invention comprise a sequence complementary to at least a portion of an RNA transcript of a gene of the present invention. However, absolute complementarity, although preferred, is not required. A sequence “complementary to at least a portion of an RNA,” referred to herein, means a sequence having sufficient complementarity to be able to hybridize with the RNA, forming a stable duplex; in the case of double stranded antisense nucleic acids, a single strand of the duplex DNA may thus be tested, or triplex formation may be assayed. The ability to hybridize will depend on both the degree of complementarity and the length of the antisense nucleic acid. Generally, the larger the hybridizing nucleic acid, the more base mismatches with a RNA it may contain and still form a stable duplex (or triplex as the case may be). One skilled in the art can ascertain a tolerable degree of mismatch by use of standard procedures to determine the melting point of the hybridized complex.

[0888] Oligonucleotides that are complementary to the 5′ end of the message, e.g., the 5′ untranslated sequence up to and including the AUG initiation codon, should work most efficiently at inhibiting translation. However, sequences complementary to the 3′ untranslated sequences of mRNAs have been shown to be effective at inhibiting translation of mRNAs as well. See generally, Wagner, R., 1994, Nature 372:333-335. Thus, oligonucleotides complementary to either the 5′- or 3′-non-translated, non-coding regions of polynucleotide sequences described herein could be used in an antisense approach to inhibit translation of endogenous mRNA. Oligonucleotides complementary to the 5′ untranslated region of the mRNA should include the complement of the AUG start codon. Antisense oligonucleotides complementary to mRNA coding regions are less efficient inhibitors of translation but could be used in accordance with the invention. Whether designed to hybridize to the 5′-, 3′- or coding region of mRNA of the present invention, antisense nucleic acids should be at least six nucleotides in length, and are preferably oligonucleotides ranging from 6 to about 50 nucleotides in length. In specific aspects the oligonucleotide is at least 10 nucleotides, at least 17 nucleotides, at least 25 nucleotides or at least 50 nucleotides.

[0889] The polynucleotides of the invention can be DNA or RNA or chimeric mixtures or derivatives or modified versions thereof, single-stranded or double-stranded. The oligonucleotide can be modified at the base moiety, sugar moiety, or phosphate backbone, for example, to improve stability of the molecule, hybridization, etc. The oligonucleotide may include other appended groups such as peptides (e.g., for targeting host cell receptors in vivo), or agents facilitating transport across the cell membrane (see, e.g., Letsinger et al., 1989, Proc. Natl. Acad. Sci. U.S.A. 86:6553-6556; Lemaitre et al., 1987, Proc. Natl. Acad. Sci. 84:648-652; PCT Publication No. WO88/09810, published Dec. 15, 1988) or the blood-brain barrier (see, e.g., PCT Publication No. WO89/10134, published Apr. 25, 1988), hybridization-triggered cleavage agents. (See, e.g., Krol et al., 1988, BioTechniques 6:958-976) or intercalating agents. (See, e.g., Zon, 1988, Pharm. Res. 5:539-549). To this end, the oligonucleotide may be conjugated to another molecule, e.g., a peptide, hybridization triggered cross-linking agent, transport agent, hybridization-triggered cleavage agent, etc.

[0890] The antisense oligonucleotide may comprise at least one modified base moiety which is selected from the group including, but not limited to, 5-fluorouracil, 5-bromouracil, 5-chlorouracil, 5-iodouracil, hypoxanthine, xantine, 4-acetylcytosine, 5-(carboxyhydroxylmethyl)uracil, 5-carboxymethylaminomethyl-2-thiouridine, 5-carboxymethylaminomethyluracil, dihydrouracil, beta-D-galactosylqueosine, inosine, N6-isopentenyladenine, 1-methylguanine, 1-methylinosine, 2,2-dimethylguanine, 2-methyladenine, 2-methylguanine, 3-methylcytosine, 5-methylcytosine, N6-adenine, 7-methylguanine, 5-methylaminomethyluracil, 5-methoxyaminomethyl-2-thiouracil, beta-D-mannosylqueosine, 5′-methoxycarboxymethyluracil, 5-methoxyuracil, 2-methylthio-N6-isopentenyladenine, uracil-5-oxyacetic acid (v), wybutoxosine, pseudouracil, queosine, 2-thiocytosine, 5-methyl-2-thiouracil, 2-thiouracil, 4-thiouracil, 5-methyluracil, uracil-5-oxyacetic acid methylester, uracil-5-oxyacetic acid (v), 5-methyl-2-thiouracil, 3-(3-amino-3-N-2-carboxypropyl)uracil, (acp3)w, and 2,6-diaminopurine.

[0891] The antisense oligonucleotide may also comprise at least one modified sugar moiety selected from the group including, but not limited to, arabinose, 2-fluoroarabinose, xylulose, and hexose.

[0892] In yet another embodiment, the antisense oligonucleotide comprises at least one modified phosphate backbone selected from the group including, but not limited to, a phosphorothioate, a phosphorodithioate, a phosphoramidothioate, a phosphoramidate, a phosphordiamidate, a methylphosphonate, an alkyl phosphotriester, and a formacetal or analog thereof.

[0893] In yet another embodiment, the antisense oligonucleotide is an a-anomeric oligonucleotide. An a-anomeric oligonucleotide forms specific double-stranded hybrids with complementary RNA in which, contrary to the usual b-units, the strands run parallel to each other (Gautier et al., 1987, Nucl. Acids Res. 15:6625-6641). The oligonucleotide is a 2′-0-methylribonucleotide (Inoue et al., 1987, Nucl. Acids Res. 15:6131-6148), or a chimeric RNA-DNA analogue (Inoue et al., 1987, FEBS Lett. 215:327-330).

[0894] Polynucleotides of the invention may be synthesized by standard methods known in the art, e.g. by use of an automated DNA synthesizer (such as are commercially available from Biosearch, Applied Biosystems, etc.). As examples, phosphorothioate oligonucleotides may be synthesized by the method of Stein et al. (1988, Nucl. Acids Res. 16:3209), methylphosphonate oligonucleotides can be prepared by use of controlled pore glass polymer supports (Sarin et al., 1988, Proc. Natl. Acad. Sci. U.S.A. 85:7448-7451), etc.

[0895] While antisense nucleotides complementary to the coding region sequence could be used, those complementary to the transcribed untranslated region are most preferred.

[0896] Potential antagonists according to the invention also include catalytic RNA, or a ribozyme (See, e.g., PCT International Publication WO 90/11364, published Oct. 4, 1990; Sarver et al, Science 247:1222-1225 (1990). While ribozymes that cleave mRNA at site specific recognition sequences can be used to destroy mRNAs, the use of hammerhead ribozymes is preferred. Hammerhead ribozymes cleave mRNAs at locations dictated by flanking regions that form complementary base pairs with the target mRNA. The sole requirement is that the target mRNA have the following sequence of two bases: 5′-UG-3′. The construction and production of hammerhead ribozymes is well known in the art and is described more fully in Haseloff and Gerlach, Nature 334:585-591 (1988). There are numerous potential hammerhead ribozyme cleavage sites within the nucleotide sequence of SEQ ID NO:X. Preferably, the ribozyme is engineered so that the cleavage recognition site is located near the 5′ end of the mRNA; i.e., to increase efficiency and minimize the intracellular accumulation of non-functional mRNA transcripts.

[0897] As in the antisense approach, the ribozymes of the invention can be composed of modified oligonucleotides (e.g., for improved stability, targeting, etc.) and should be delivered to cells which express in vivo. DNA constructs encoding the ribozyme may be introduced into the cell in the same manner as described above for the introduction of antisense encoding DNA. A preferred method of delivery involves using a DNA construct “encoding” the ribozyme under the control of a strong constitutive promoter, such as, for example, pol III or pol II promoter, so that transfected cells will produce sufficient quantities of the ribozyme to destroy endogenous messages and inhibit translation. Since ribozymes unlike antisense molecules, are catalytic, a lower intracellular concentration is required for efficiency.

[0898] Antagonist/agonist compounds may be employed to inhibit the cell growth and proliferation effects of the polypeptides of the present invention on neoplastic cells and tissues, i.e. stimulation of angiogenesis of tumors, and, therefore, retard or prevent abnormal cellular growth and proliferation, for example, in tumor formation or growth.

[0899] The antagonist/agonist may also be employed to prevent hyper-vascular diseases, and prevent the proliferation of epithelial lens cells after extracapsular cataract surgery. Prevention of the mitogenic activity of the polypeptides of the present invention may also be desirous in cases such as restenosis after balloon angioplasty.

[0900] The antagonist/agonist may also be employed to prevent the growth of scar tissue during wound healing.

[0901] The antagonist/agonist may also be employed to treat the diseases described herein.

[0902] Thus, the invention provides a method of treating disorders or diseases, including but not limited to the disorders or diseases listed throughout this application, associated with overexpression of a polynucleotide of the present invention by administering to a patient (a) an antisense molecule directed to the polynucleotide of the present invention, and/or (b) a ribozyme directed to the polynucleotide of the present invention.

Binding Peptides and Other Molecules

[0903] The invention also encompasses screening methods for identifying polypeptides and nonpolypeptides that bind polypeptides of the invention, and the binding molecules identified thereby. These binding molecules are useful, for example, as agonists and antagonists of the polypeptides of the invention. Such agonists and antagonists can be used, in accordance with the invention, in the therapeutic embodiments described in detail, below.

[0904] This method comprises the steps of:
[0905] a. contacting polypeptides of the invention with a plurality of molecules; and
[0906] b. identifying a molecule that binds the polypeptides of the invention.

[0907] The step of contacting the polypeptides of the invention with the plurality of molecules may be effected in a number of ways. For example, one may contemplate immobilizing the polypeptides on a solid support and bringing a solution of the plurality of molecules in contact with the immobilized polypeptides. Such a procedure would be akin to an affinity chromatographic process, with the affinity matrix being comprised of the immobilized polypeptides of the invention. The molecules having a selective affinity for the polypeptides can then be purified by affinity selection. The nature of the solid support, process for attachment of the polypeptides to the solid support, solvent, and conditions of the affinity isolation or selection are largely conventional and well known to those of ordinary skill in the art.

[0908] Alternatively, one may also separate a plurality of polypeptides into substantially separate fractions comprising a subset of or individual polypeptides. For instance, one can separate the plurality of polypeptides by gel electrophoresis, column chromatography, or like method known to those of ordinary skill for the separation of polypeptides. The individual polypeptides can also be produced by a transformed host cell in such a way as to be expressed on or about its outer surface (e.g., a recombinant phage). Individual isolates can then be “probed” by the polypeptides of the invention, optionally in the presence of an inducer should one be required for expression, to determine if any selective affinity interaction takes place between the polypeptides and the individual clone. Prior to contacting the polypeptides with each fraction comprising individual polypeptides, the polypeptides could first be transferred to a solid support for additional convenience. Such a solid support may simply be a piece of filter membrane, such as one made of nitrocellulose or nylon. In this manner, positive clones could be identified from a collection of transformed host cells of an expression library, which harbor a DNA construct encoding a polypeptide having a selective affinity for polypeptides of the invention. Furthermore, the amino acid sequence of the polypeptide having a selective affinity for the polypeptides of the invention can be determined directly by conventional means or the coding sequence of the DNA encoding the polypeptide can frequently be determined more conveniently. The primary sequence can then be deduced from the corresponding DNA sequence. If the amino acid sequence is to be determined from the polypeptide itself, one may use microsequencing techniques. The sequencing technique may include mass spectroscopy.

[0909] In certain situations, it may be desirable to wash away any unbound polypeptides from a mixture of the polypeptides of the invention and the plurality of polypeptides prior to attempting to determine or to detect the presence of a selective affinity interaction. Such a wash step may be particularly desirable when the polypeptides of the invention or the plurality of polypeptides are bound to a solid support.

[0910] The plurality of molecules provided according to this method may be provided by way, of diversity libraries, such as random or combinatorial peptide or nonpeptide libraries which can be screened for molecules that specifically bind polypeptides of the invention. Many libraries are known in the art that can be used, e.g., chemically synthesized libraries, recombinant (e.g., phage display libraries), and in vitro translation-based libraries. Examples of chemically synthesized libraries are described in Fodor et al., 1991, Science 251:767-773; Houghten et al., 1991, Nature 354:84-86; Lam et al., 1991, Nature 354:82-84; Medynski, 1994, Bio/Technology 12:709-710; Gallop et al., 1994, J. Medicinal Chemistry 37(9):1233-1251; Ohlmeyer et al., 1993, Proc. Natl. Acad. Sci. USA 90:10922-10926; Erb et al., 1994, Proc. Natl. Acad. Sci. USA 91:11422-11426; Houghten et al., 1992, Biotechniques 13:412; Jayawickreme et al., 1994, Proc. Natl. Acad. Sci. USA 91:1614-1618; Salmon et al., 1993, Proc. Natl. Acad. Sci. USA 90:11708-11712; PCT Publication No. WO 93/20242; and Brenner and Lerner, 1992, Proc. Natl. Acad. Sci. USA 89:5381-5383.

[0911] Examples of phage display libraries are described in Scott and Smith, 1990, Science 249:386-390; Devlin et al., 1990, Science, 249:404-406; Christian, R. B., et al., 1992, J. Mol. Biol. 227:711-718); Lenstra, 1992, J. Immunol. Meth. 152:149-157; Kay et al., 1993, Gene 128:59-65; and PCT Publication No. WO 94/18318 dated Aug. 18, 1994.

[0912] In vitro translation-based libraries include but are not limited to those described in PCT Publication No. WO 91/05058 dated Apr. 18, 1991; and Mattheakis et al., 1994, Proc. Natl. Acad. Sci. USA 91:9022-9026.

[0913] By way of examples of nonpeptide libraries, a benzodiazepine library (see e.g., Bunin et al., 1994, Proc. Natl. Acad. Sci. USA 91:4708-4712) can be adapted for use. Peptoid libraries (Simon et al., 1992, Proc. Natl. Acad. Sci. USA 89:9367-9371) can also be used. Another example of a library that can be used, in which the amide functionalities in peptides have been permethylated to generate a chemically transformed combinatorial library, is described by Ostresh et al. (1994, Proc. Natl. Acad. Sci. USA 91:11138-11142).

[0914] The variety of non-peptide libraries that are useful in the present invention is great. For example, Ecker and Crooke, 1995, Bio/Technology 13:351-360 list benzodiazepines, hydantoins, piperazinediones, biphenyls, sugar analogs, beta-mercaptoketones, arylacetic acids, acylpiperidines, benzopyrans, cubanes, xanthines, aminimides, and oxazolones as among the chemical species that form the basis of various libraries.

[0915] Non-peptide libraries can be classified broadly into two types: decorated monomers and oligomers. Decorated monomer libraries employ a relatively simple scaffold structure upon which a variety functional groups is added. Often the scaffold will be a molecule with a known useful pharmacological activity. For example, the scaffold might be the benzodiazepine structure.

[0916] Non-peptide oligomer libraries utilize a large number of monomers that are assembled together in ways that create new shapes that depend on the order of the monomers. Among the monomer units that have been used are carbamates, pyrrolinones, and morpholinos. Peptoids, peptide-like oligomers in which the side chain is attached to the alpha amino group rather than the alpha carbon, form the basis of another version of non-peptide oligomer libraries. The first non-peptide oligomer libraries utilized a single type of monomer and thus contained a repeating backbone. Recent libraries have utilized more than one monomer, giving the libraries added flexibility.

[0917] Screening the libraries can be accomplished by any of a variety of commonly known methods. See, e.g., the following references, which disclose screening of peptide libraries: Parmley and Smith, 1989, Adv. Exp. Med. Biol. 251:215-218; Scott and Smith, 1990, Science 249:386-390; Fowlkes et al., 1992; BioTechniques 13:422-427; Oldenburg et al., 1992, Proc. Natl. Acad. Sci. USA 89:5393-5397; Yu et al., 1994, Cell 76:933-945; Staudt et al., 1988, Science 241:577-580; Bock et al., 1992, Nature 355:564-566; Tuerk et al., 1992, Proc. Natl. Acad. Sci. USA 89:6988-6992; Ellington et al., 1992, Nature 355:850-852; U.S. Pat. No. 5,096,815, U.S. Pat. No. 5,223,409, and U.S. Pat. No. 5,198,346, all to Ladner et al.; Rebar and Pabo, 1993, Science 263:671-673; and CT Publication No. WO 94/18318.

[0918] In a specific embodiment, screening to identify a molecule that binds polypeptides of the invention can be carried out by contacting the library members with polypeptides of the invention immobilized on a solid phase and harvesting those library members that bind to the polypeptides of the invention. Examples of such screening methods, termed “panning” techniques are described by way of example in Parmley and Smith, 1988, Gene 73:305-318; Fowlkes et al., 1992, BioTechniques 13:422-427; PCT Publication No. WO 94/18318; and in references cited herein.

[0919] In another embodiment, the two-hybrid system for selecting interacting proteins in yeast (Fields and Song, 1989, Nature 340:245-246; Chien et al., 1991, Proc. Natl. Acad. Sci. USA 88:9578-9582) can be used to identify molecules that specifically bind to polypeptides of the invention.

[0920] Where the binding molecule is a polypeptide, the polypeptide can be conveniently selected from any peptide library, including random peptide libraries, combinatorial peptide libraries, or biased peptide libraries. The term “biased” is used herein to mean that the method of generating the library is manipulated so as to restrict one or more parameters that govern the diversity of the resulting collection of molecules, in this case peptides.

[0921] Thus, a truly random peptide library would generate a collection of peptides in which the probability of finding a particular amino acid at a given position of the peptide is the same for all 20 amino acids. A bias can be introduced into the library, however, by specifying, for example, that a lysine occur every fifth amino acid or that positions 4, 8, and 9 of a decapeptide library be fixed to include only arginine. Clearly, many types of biases can be contemplated, and the present invention is not restricted to any particular bias. Furthermore, the present invention contemplates specific types of peptide libraries, such as phage displayed peptide libraries and those that utilize a DNA construct comprising a lambda phage vector with a DNA insert.

[0922] As mentioned above, in the case of a binding molecule that is a polypeptide, the polypeptide may have about 6 to less than about 60 amino acid residues, preferably about 6 to about 10 amino acid residues, and most preferably, about 6 to about 22 amino acids. In another embodiment, a binding polypeptide has in the range of 15-100 amino acids, or 20-50 amino acids.

[0923] The selected binding polypeptide can be obtained by chemical synthesis or recombinant expression.

Other Activities

[0924] A polypeptide, polynucleotide, agonist, or antagonist of the present invention, as a result of the ability to stimulate vascular endothelial cell growth, may be employed in treatment for stimulating re-vascularization of ischemic tissues due to various disease conditions such as thrombosis, arteriosclerosis, and other cardiovascular conditions. The polypeptide, polynucleotide, agonist, or antagonist of the present invention may also be employed to stimulate angiogenesis and limb regeneration, as discussed above.

[0925] A polypeptide, polynucleotide, agonist, or antagonist of the present invention may also be employed for treating wounds due to injuries, burns, post-operative tissue repair, and ulcers since they are mitogenic to various cells of different origins, such as fibroblast cells and skeletal muscle cells, and therefore, facilitate the repair or replacement of damaged or diseased tissue.

[0926] A polypeptide, polynucleotide, agonist, or antagonist of the present invention may also be employed stimulate neuronal growth and to treat and prevent neuronal damage which occurs in certain neuronal disorders or neuro-degenerative conditions such as Alzheimer's disease, Parkinson's disease, and AIDS-related complex. A polypeptide, polynucleotide, agonist, or antagonist of the present invention may have the ability to stimulate chondrocyte growth, therefore, they may be employed to enhance bone and periodontal regeneration and aid in tissue transplants or bone grafts.

[0927] A polypeptide, polynucleotide, agonist, or antagonist of the present invention may be also be employed to prevent skin aging due to sunburn by stimulating keratinocyte growth.

[0928] A polypeptide, polynucleotide, agonist, or antagonist of the present invention may also be employed for preventing hair loss, since FGF family members activate hair-forming cells and promotes melanocyte growth. Along the same lines, a polypeptide, polynucleotide, agonist, or antagonist of the present invention may be employed to stimulate growth and differentiation of hematopoietic cells and bone marrow cells when used in combination with other cytokines.

[0929] A polypeptide, polynucleotide, agonist, or antagonist of the present invention may also be employed to maintain organs before transplantation or for supporting cell culture of primary tissues. A polypeptide, polynucleotide, agonist, or antagonist of the present invention may also be employed for inducing tissue of mesodermal origin to differentiate in early embryos.

[0930] A polypeptide, polynucleotide, agonist, or antagonist of the present invention may also increase or decrease the differentiation or proliferation of embryonic stem cells, besides, as discussed above, hematopoietic lineage.

[0931] A polypeptide, polynucleotide, agonist, or antagonist of the present invention may also be used to modulate mammalian characteristics, such as body height, weight, hair color, eye color, skin, percentage of adipose tissue, pigmentation, size, and shape (e.g., cosmetic surgery). Similarly, a polypeptide, polynucleotide, agonist, or antagonist of the present invention may be used to modulate mammalian metabolism affecting catabolism, anabolism, processing, utilization, and storage of energy.

[0932] A polypeptide, polynucleotide, agonist, or antagonist of the present invention may be used to change a mammal's mental state or physical state by influencing biorhythms, caricadic rhythms, depression (including depressive disorders), tendency for violence, tolerance for pain, reproductive capabilities (preferably by Activin or Inhibin-like activity), hormonal or endocrine levels, appetite, libido, memory, stress, or other cognitive qualities.

[0933] A polypeptide, polynucleotide, agonist, or antagonist of the present invention may also be used as a food additive or preservative, such as to increase or decrease storage capabilities, fat content, lipid, protein, carbohydrate, vitamins, minerals, cofactors or other nutritional components.

[0934] The above-recited applications have uses in a wide variety of hosts. Such hosts include, but are not limited to, human, murine, rabbit, goat, guinea pig, camel, horse, mouse, rat, hamster, pig, micro-pig, chicken, goat, cow, sheep, dog, cat, non-human primate, and human. In specific embodiments, the host is a mouse, rabbit, goat, guinea pig, chicken, rat, hamster, pig, sheep, dog or cat. In preferred embodiments, the host is a mammal. In most preferred embodiments, the host is a human.

### Other Preferred Embodiments

[0935] Other preferred embodiments of the claimed invention include an isolated nucleic acid molecule comprising a nucleotide sequence which is at least 95% identical to a sequence of at least about 50 contiguous nucleotides in the nucleotide sequence of SEQ ID NO:X or the complementary strand thereto, the nucleotide sequence as defined in column 5 of Table 1B.1 or columns 8 and 9 of Table 2 or the complementary strand thereto, and/or cDNA contained in ATCC Deposit No:Z.

[0936] Also preferred is a nucleic acid molecule wherein said sequence of contiguous nucleotides is included in the nucleotide sequence of the portion of SEQ ID NO:X as defined in column 5, “ORF (From-To)”, in Table 1B.1.

[0937] Also preferred is a nucleic acid molecule wherein said sequence of contiguous nucleotides is included in the nucleotide sequence of the portion of SEQ ID NO:X as defined in columns 8 and 9, “NT From” and “NT To” respectively, in Table 2.

[0938] Also preferred is an isolated nucleic acid molecule comprising a nucleotide sequence which is at least 95% identical to a sequence of at least about 150 contiguous nucleotides in the nucleotide sequence of SEQ ID NO:X or the complementary strand thereto, the nucleotide sequence as defined in column 5 of Table 1B.1 or columns 8 and 9 of Table 2 or the complementary strand thereto, and/or cDNA contained in ATCC Deposit No:Z.

[0939] Further preferred is an isolated nucleic acid molecule comprising a nucleotide sequence which is at least 95% identical to a sequence of at least about 500 contiguous nucleotides in the nucleotide sequence of SEQ ID NO:X or the complementary strand thereto, the nucleotide sequence as defined in column 5 of Table 1B.1 or columns 8 and 9 of Table 2 or the complementary strand thereto, and/or cDNA contained in ATCC Deposit No:Z.

[0940] A further preferred embodiment is a nucleic acid molecule comprising a nucleotide sequence which is at least 95% identical to the nucleotide sequence of the portion of SEQ ID NO:X defined in column 5, “ORF (From-To)”, in Table 1B.1.

[0941] A further preferred embodiment is a nucleic acid molecule comprising a nucleotide sequence which is at least 95% identical to the nucleotide sequence of the portion of SEQ ID NO:X defined in columns 8 and 9, “NT From” and “NT To”, respectively, in Table 2.

[0942] A further preferred embodiment is an isolated nucleic acid molecule comprising a nucleotide sequence which is at least 95% identical to the complete nucleotide sequence of SEQ ID NO:X or the complementary strand thereto, the nucleotide sequence as defined in column 5 of Table 1B.1 or columns 8 and 9 of Table 2 or the complementary strand thereto, and/or cDNA contained in ATCC Deposit No:Z.

[0943] Also preferred is an isolated nucleic acid molecule which hybridizes under stringent hybridization conditions to a nucleic acid molecule comprising a nucleotide sequence of SEQ ID NO:X or the complementary strand thereto, the nucleotide sequence as defined in column 5 of Table 1B.1 or columns 8 and 9 of Table 2 or the complementary strand thereto, and/or cDNA contained in ATCC Deposit No:Z, wherein said nucleic acid molecule which hybridizes does not hybridize under stringent hybridization conditions to a nucleic acid molecule having a nucleotide sequence consisting of only A residues or of only T residues.

[0944] Also preferred is a composition of matter comprising a DNA molecule which comprises the cDNA contained in ATCC Deposit No:Z.

[0945] Also preferred is an isolated nucleic acid molecule comprising a nucleotide sequence which is at least 95% identical to a sequence of at least 50 contiguous nucleotides of the cDNA sequence contained in ATCC Deposit No:Z.

[0946] Also preferred is an isolated nucleic acid molecule, wherein said sequence of at least 50 contiguous nucleotides is included in the nucleotide sequence of an open reading frame sequence encoded by cDNA contained in ATCC Deposit No:Z.

[0947] Also preferred is an isolated nucleic acid molecule comprising a nucleotide sequence which is at least 95% identical to sequence of at least 150 contiguous nucleotides in the nucleotide sequence encoded by cDNA contained in ATCC Deposit No:Z.

[0948] A further preferred embodiment is an isolated nucleic acid molecule comprising a nucleotide sequence which is at least 95% identical to sequence of at least 500 contiguous nucleotides in the nucleotide sequence encoded by cDNA contained in ATCC Deposit No:Z.

[0949] A further preferred embodiment is an isolated nucleic acid molecule comprising a nucleotide sequence which is at least 95% identical to the complete nucleotide sequence encoded by cDNA contained in ATCC Deposit No:Z.

[0950] A further preferred embodiment is a method for detecting in a biological sample a nucleic acid molecule comprising a nucleotide sequence which is at least 95% identical to a sequence of at least 50 contiguous nucleotides in a sequence selected from the group consisting of: a nucleotide sequence of SEQ ID NO:X or the complementary strand thereto; the nucleotide sequence as defined in column 5 of Table 1B.1 or columns 8 and 9 of Table 2 or the complementary strand thereto; and a nucleotide sequence encoded by cDNA contained in ATCC Deposit No:Z; which method comprises a step of comparing a nucleotide sequence of at least one nucleic acid molecule in said sample with a sequence selected from said group and determining whether the sequence of said nucleic acid molecule in said sample is at least 95% identical to said selected sequence.

[0951] Also preferred is the above method wherein said step of comparing sequences comprises determining the extent of nucleic acid hybridization between nucleic acid molecules in said sample and a nucleic acid molecule comprising said sequence selected from said group. Similarly, also preferred is the above method wherein said step of comparing sequences is performed by comparing the nucleotide sequence determined from a nucleic acid molecule in said sample with said sequence selected from said group. The nucleic acid molecules can comprise DNA molecules or RNA molecules.

[0952] A further preferred embodiment is a method for identifying the species, tissue or cell type of a biological sample which method comprises a step of detecting nucleic acid molecules in said sample, if any, comprising a nucleotide sequence that is at least 95% identical to a sequence of at least 50 contiguous nucleotides in a sequence selected from the group consisting of: a nucleotide sequence of SEQ ID NO:X or the complementary strand thereto; the nucleotide sequence as defined in column 5 of Table 1B.1 or columns 8 and 9 of Table 2 or the complementary strand thereto; and a nucleotide sequence of the cDNA contained in ATCC Deposit No:Z.

[0953] The method for identifying the species, tissue or cell type of a biological sample can comprise a step of detecting nucleic acid molecules comprising a nucleotide sequence in a panel of at least two nucleotide sequences, wherein at least one sequence in said panel is at least 95% identical to a sequence of at least 50 contiguous nucleotides in a sequence selected from said group.

[0954] Also preferred is a method for diagnosing in a subject a pathological condition associated with abnormal structure or expression of a nucleotide sequence of SEQ ID NO:X or the complementary strand thereto; the nucleotide sequence as defined in column 5 of Table 1B.1 or columns 8 and 9 of Table 2 or the complementary strand thereto; or the cDNA contained in ATCC Deposit No:Z which encodes a protein, wherein the method comprises a step of detecting in a biological sample obtained from said subject nucleic acid molecules, if any, comprising a nucleotide sequence that is at least 95% identical to a sequence of at least 50 contiguous nucleotides in a sequence selected from the group consisting of: a nucleotide sequence of SEQ ID NO:X or the complementary strand thereto; the nucleotide sequence as defined in column 5 of Table 1B.1 or columns 8 and 9 of Table 2 or the complementary strand thereto; and a nucleotide sequence of cDNA contained in ATCC Deposit No:Z.

[0955] The method for diagnosing a pathological condition can comprise a step of detecting nucleic acid molecules comprising a nucleotide sequence in a panel of at least two nucleotide sequences, wherein at least one sequence in said panel is at least 95% identical to a sequence of at least 50 contiguous nucleotides in a sequence selected from said group.

[0956] Also preferred is a composition of matter comprising isolated nucleic acid molecules wherein the nucleotide sequences of said nucleic acid molecules comprise a panel of at least two nucleotide sequences, wherein at least one sequence in said panel is at least 95% identical to a sequence of at least 50 contiguous nucleotides in a sequence selected from the group consisting of: a nucleotide sequence of SEQ ID NO:X or the complementary strand thereto; the nucleotide sequence as defined in column 5 of Table 1B.1 or columns 8 and 9 of Table 2 or the complementary strand thereto; and a nucleotide sequence encoded by cDNA contained in ATCC Deposit No:Z. The nucleic acid molecules can comprise DNA molecules or RNA molecules.

[0957] Also preferred is a composition of matter comprising isolated nucleic acid molecules wherein the nucleotide sequences of said nucleic acid molecules comprise a DNA microarray or “chip” of at least 1, 2, 3, 4, 5, 6, 7, 8, 9, 10, 15, 20, 25, 30, 40, 50, 100, 150, 200, 250, 300, 500, 1000, 2000, 3000, or 4000 nucleotide sequences, wherein at least one sequence in said DNA microarray or “chip” is at least 95% identical to a sequence of at least 50 contiguous nucleotides in a sequence selected from the group consisting of: a nucleotide sequence of SEQ ID NO:X wherein X is any integer as defined in Table 1A and/or 1B; and a nucleotide sequence encoded by a human cDNA clone identified by a cDNA “Clone ID” in Table 1A and/or 1B.

[0958] Also preferred is an isolated polypeptide comprising an amino acid sequence at least 90% identical to a sequence of at least about 10 contiguous amino acids in the polypeptide sequence of SEQ ID NO:Y; a polypeptide encoded by SEQ ID NO:X or the complementary strand thereto; the polypeptide encoded by the nucleotide sequence as defined in columns 8 and 9 of Table 2; and/or a polypeptide encoded by cDNA contained in ATCC Deposit No:Z.

[0959] Also preferred is an isolated polypeptide comprising an amino acid sequence at least 95% identical to a sequence of at least about 30 contiguous amino acids in the amino acid sequence of SEQ ID NO:Y; a polypeptide encoded by SEQ ID NO:X or the complementary strand thereto; the polypeptide encoded by the nucleotide sequence as defined in columns 8 and 9 of Table 2; and/or a polypeptide encoded by cDNA contained in ATCC Deposit No:Z.

[0960] Further preferred is an isolated polypeptide comprising an amino acid sequence at least 95% identical to a sequence of at least about 100 contiguous amino acids in the amino acid sequence of SEQ ID NO:Y; a polypeptide encoded by SEQ ID NO:X or the complementary strand thereto; the polypeptide encoded by the nucleotide sequence as defined in columns 8 and 9 of Table 2; and/or a polypeptide encoded by cDNA contained in ATCC Deposit No:Z.

[0961] Further preferred is an isolated polypeptide comprising an amino acid sequence at least 95% identical to the complete amino acid sequence of SEQ ID NO:Y; a polypeptide encoded by SEQ ID NO:X or the complementary strand thereto; the polypeptide encoded by the nucleotide sequence as defined in columns 8 and 9 of Table 2; and/or a polypeptide encoded by cDNA contained in ATCC Deposit No:Z.

[0962] Further preferred is an isolated polypeptide comprising an amino acid sequence at least 90% identical to a sequence of at least about 10 contiguous amino acids in the complete amino acid sequence of a polypeptide encoded by contained in ATCC Deposit No:Z

[0963] Also preferred is a polypeptide wherein said sequence of contiguous amino acids is included in the amino acid sequence of a portion of said polypeptide encoded by cDNA contained in ATCC Deposit No:Z; a polypeptide encoded by SEQ ID NO:X or the complementary strand thereto; the polypeptide encoded by the nucleotide sequence as defined in columns 8 and 9 of Table 2; and/or the polypeptide sequence of SEQ ID NO:Y.

[0964] Also preferred is an isolated polypeptide comprising an amino acid sequence at least 95% identical to a sequence of at least about 30 contiguous amino acids in the amino acid sequence of a polypeptide encoded by the cDNA contained in ATCC Deposit No:Z.

[0965] Also preferred is an isolated polypeptide comprising an amino acid sequence at least 95% identical to a sequence of at least about 100 contiguous amino acids in the amino acid sequence of a polypeptide encoded by cDNA contained in ATCC Deposit No:Z.

[0966] Also preferred is an isolated polypeptide comprising an amino acid sequence at least 95% identical to the amino acid sequence of a polypeptide encoded by the cDNA contained in ATCC Deposit No:Z.

[0967] Further preferred is an isolated antibody which binds specifically to a polypeptide comprising an amino acid sequence that is at least 90% identical to a sequence of at least 10 contiguous amino acids in a sequence selected from the group consisting of: a polypeptide sequence of SEQ ID NO:Y; a polypeptide encoded by SEQ ID NO:X or the complementary strand thereto; the polypeptide encoded by the nucleotide sequence as defined in columns 8 and 9 of Table 2; and a polypeptide encoded by the cDNA contained in ATCC Deposit No:Z.

[0968] Further preferred is a method for detecting in a biological sample a polypeptide comprising an amino acid sequence which is at least 90% identical to a sequence of at least 10 contiguous amino acids in a sequence selected from the group consisting of: a polypeptide sequence of SEQ ID NO:Y; a polypeptide encoded by SEQ ID NO:X or the complementary strand thereto; the polypeptide encoded by the nucleotide sequence as defined in columns 8 and 9 of Table 2; and a polypeptide encoded by the cDNA contained in ATCC Deposit No:Z; which method comprises a step of comparing an amino acid sequence of at least one polypeptide molecule in said sample with a sequence selected from said group and determining whether the sequence of said polypeptide molecule in said sample is at least 90% identical to said sequence of at least 10 contiguous amino acids.

[0969] Also preferred is the above method wherein said step of comparing an amino acid sequence of at least one polypeptide molecule in said sample with a sequence selected from said group comprises determining the extent of specific binding of polypeptides in said sample to an antibody which binds specifically to a polypeptide comprising an amino acid sequence that is at least 90% identical to a sequence of at least 10 contiguous amino acids in a sequence selected from the group consisting of: a polypeptide sequence of SEQ ID NO:Y; a polypeptide encoded by SEQ ID NO:X or the complementary strand thereto; the polypeptide encoded by the nucleotide sequence as defined in columns 8 and 9 of Table 2; and a polypeptide encoded by the cDNA contained in ATCC Deposit No:Z.

[0970] Also preferred is the above method wherein said step of comparing sequences is performed by comparing the amino acid sequence determined from a polypeptide molecule in said sample with said sequence selected from said group.

[0971] Also preferred is a method for identifying the species, tissue or cell type of a biological sample which method comprises a step of detecting polypeptide molecules in said sample, if any, comprising an amino acid sequence that is at least 90% identical to a sequence of at least 10 contiguous amino acids in a sequence selected from the group consisting of: polypeptide sequence of SEQ ID NO:Y; a polypeptide encoded by SEQ ID NO:X or the complementary strand thereto; the polypeptide encoded by the nucleotide sequence as defined in columns 8 and 9 of Table 2; and a polypeptide encoded by the cDNA contained in ATCC Deposit No:Z.

[0972] Also preferred is the above method for identifying the species, tissue or cell type of a biological sample, which method comprises a step of detecting polypeptide molecules comprising an amino acid sequence in a panel of at least two amino acid sequences, wherein at least one sequence in said panel is at least 90% identical to a sequence of at least 10 contiguous amino acids in a sequence selected from the above group.

[0973] Also preferred is a method for diagnosing in a subject a pathological condition associated with abnormal structure or expression of a nucleic acid sequence identified in Table 1A, 1B or Table 2 encoding a polypeptide, which method comprises a step of detecting in a biological sample obtained from said subject polypeptide molecules comprising an amino acid sequence in a panel of at least two amino acid sequences, wherein at least one sequence in said panel is at least 90% identical to a sequence of at least 10 contiguous amino acids in a sequence selected from the group consisting of: polypeptide sequence of SEQ ID NO:Y; a polypeptide encoded by SEQ ID NO:X or the complementary strand thereto; the polypeptide encoded by the nucleotide sequence as defined in columns 8 and 9 of Table 2; and a polypeptide encoded by the cDNA contained in ATCC Deposit No:Z.

[0974] In any of these methods, the step of detecting said polypeptide molecules includes using an antibody.

[0975] Also preferred is an isolated nucleic acid molecule comprising a nucleotide sequence which is at least 95% identical to a nucleotide sequence encoding a polypeptide wherein said polypeptide comprises an amino acid sequence that is at least 90% identical to a sequence of at least 10 contiguous amino acids in a sequence selected from the group consisting of: polypeptide sequence of SEQ ID NO:Y; a polypeptide encoded by SEQ ID NO:X or the complementary strand thereto; the polypeptide encoded by the nucleotide sequence as defined in columns 8 and 9 of Table 2; and a polypeptide encoded by the cDNA contained in ATCC Deposit No:Z.

[0976] Also preferred is an isolated nucleic acid molecule, wherein said nucleotide sequence encoding a polypeptide has been optimized for expression of said polypeptide in a prokaryotic host.

[0977] Also preferred is a polypeptide molecule, wherein said polypeptide comprises an amino acid sequence selected from the group consisting of: polypeptide sequence of SEQ ID NO:Y; a polypeptide encoded by SEQ ID NO:X or the complementary strand thereto; the polypeptide encoded by the nucleotide sequence as defined in columns 8 and 9 of Table 2; and a polypeptide encoded by the cDNA contained in ATCC Deposit No:Z.

[0978] Further preferred is a method of making a recombinant vector comprising inserting any of the above isolated nucleic acid molecule into a vector. Also preferred is the recombinant vector produced by this method. Also preferred is a method of making a recombinant host cell comprising introducing the vector into a host cell, as well as the recombinant host cell produced by this method.

[0979] Also preferred is a method of making an isolated polypeptide comprising culturing this recombinant host cell under conditions such that said polypeptide is expressed and recovering said polypeptide. Also preferred is this method of making an isolated polypeptide, wherein said recombinant host cell is a eukaryotic cell and said polypeptide is a human protein comprising an amino acid sequence selected from the group consisting of: polypeptide sequence of SEQ ID NO:Y; a polypeptide encoded by SEQ ID NO:X or the complementary strand thereto; the polypeptide encoded by the nucleotide sequence as defined in columns 8 and 9 of Table 2; and a polypeptide encoded by the cDNA contained in ATCC Deposit No:Z. The isolated polypeptide produced by this method is also preferred.

[0980] Also preferred is a method of treatment of an individual in need of an increased level of a protein activity, which method comprises administering to such an individual a Therapeutic comprising an amount of an isolated polypeptide, polynucleotide, immunogenic fragment or analogue thereof, binding agent, antibody, or antigen binding fragment of the claimed invention effective to increase the level of said protein activity in said individual.

[0981] Also preferred is a method of treatment of an individual in need of a decreased level of a protein activity, which method comprised administering to such an individual a Therapeutic comprising an amount of an isolated polypeptide, polynucleotide, immunogenic fragment or analogue thereof, binding agent, antibody, or antigen binding fragment of the claimed invention effective to decrease the level of said protein activity in said individual.

[0982] Also preferred is a method of treatment of an individual in need of a specific delivery of toxic compositions to diseased cells (e.g., tumors, leukemias or lymphomas), which method comprises administering to such an individual a Therapeutic comprising an amount of an isolated polypeptide of the invention, including, but not limited to a binding agent, or antibody of the claimed invention that are associated with toxin or cytotoxic prodrugs.

[0983] Having generally described the invention, the same will be more readily understood by reference to the following examples, which are provided by way of illustration and are not intended as limiting.

### EXAMPLES

### Example 1

### Isolation of a Selected cDNA Clone from the Deposited Sample

[0984] Each ATCC Deposit No:Z is contained in a plasmid vector. Table 6 identifies the vectors used to construct the cDNA library from which each clone was isolated. In many cases, the vector used to construct the library is a phage vector from which a plasmid has been excised. The following correlates the related plasmid for each phage vector used in constructing the cDNA library. For example, where a particular clone is identified in Table 6 as being isolated in the vector “Lambda Zap,” the corresponding deposited clone is in “pBluescript.”

| Vector Used to Construct Library | Corresponding Deposited Plasmid |
|---|---|
| Lambda Zap | pBluescript (pBS) |
| Uni-Zap XR | pBluescript (pBS) |
| Zap Express | pBK |
| lafmid BA | plafmid BA |
| pSport1 | pSport1 |
| pCMVSport 2.0 | pCMVSport 2.0 |
| pCMVSport 3.0 | pCMVSport 3.0 |
| pCR ® 2.1 | pCR ® 2.1 |

[0985] Vectors Lambda Zap (U.S. Pat. Nos. 5,128,256 and 5,286,636), Uni-Zap XR (U.S. Pat. Nos. 5,128,256 and 5,286,636), Zap Express (U.S. Pat. Nos. 5,128,256 and 5,286,636), pBluescript (pBS) (Short, J. M. et al., Nucleic Acids Res. 16:7583-7600 (1988); Alting-Mees, M. A. and Short, J. M., Nucleic Acids Res. 17:9494 (1989)) and pBK (Alting-Mees, M. A. et al., Strategies 5:58-61 (1992)) are commercially available from Stratagene Cloning Systems, Inc., 11011 N. Torrey Pines Road, La Jolla, Calif., 92037. pBS contains an ampicillin resistance gene and pBK contains a neomycin resistance gene. Both can be transformed into E. coli strain XL-1 Blue, also available from Stratagene. pBS comes in 4 forms SK+, SK−, KS+ and KS. The S and K refers to the orientation of the polylinker to the T7 and T3 primer sequences which flank the polylinker region (“S” is for SacI and “K” is for KpnI which are the first sites on each respective end of the linker). “+” or “−” refer to the orientation of the f1 origin of replication (“ori”), such that in one orientation, single stranded rescue initiated from the f1 ori generates sense strand DNA and in the other, antisense.

[0986] Vectors pSport1, pCMVSport 2.0 and pCMVSport 3.0, were obtained from Life Technologies, Inc., P.O. Box 6009, Gaithersburg, Md. 20897. All Sport vectors contain an ampicillin resistance gene and may be transformed into E. coli strain DH10B, also available from Life Technologies. (See, for instance, Gruber, C. E., et al., Focus 15:59 (1993)). Vector lafmid BA (Bento Soares, Columbia University, NY) contains an ampicillin resistance gene and can be transformed into E. coli strain XL-1 Blue. Vector pCR®2.1, which is available from Invitrogen, 1600 Faraday Avenue, Carlsbad, Calif. 92008, contains an ampicillin resistance gene and may be transformed into E. coli strain DH10B, available from Life Technologies. (See, for instance, Clark, J. M., Nuc. Acids Res. 16:9677-9686 (1988) and Mead, D. et al., Bio/Technology 9: (1991)). Preferably, a polynucleotide of the present invention does not comprise the phage vector sequences identified for the particular clone in Table 6, as well as the corresponding plasmid vector sequences designated above.

[0987] The deposited material in the sample assigned the ATCC Deposit Number cited by reference to Tables 1, 2, 6 and 7 for any given cDNA clone also may contain one or more additional plasmids, each comprising a cDNA clone different from that given clone. Thus, deposits sharing the same ATCC Deposit Number contain at least a plasmid for each ATCC Deposit No:Z.

TABLE 6

| | | | ATCC |
|---|---|---|---|
| Libraries owned by Catalog | Catalog Description | Vector | Deposit |
| HUKA HUKB HUKC HUKD HUKE | Human Uterine Cancer | Lambda ZAP II | LP01 |
| HUKF HUKG | | | |
| HCNA HCNB | Human Colon | Lambda Zap II | LP01 |
| HFFA | Human Fetal Brain, random primed | Lambda Zap II | LP01 |
| HTWA | Resting T-Cell | Lambda ZAP II | LP01 |
| HBQA | Early Stage Human Brain, random | Lambda ZAP II | LP01 |
| | primed | | |
| HLMB HLMF HLMG HLMH HLMI | breast lymph node CDNA library | Lambda ZAP II | LP01 |
| HLMJ HLMM HLMN | | | |
| HCQA HCQB | human colon cancer | Lamda ZAP II | LP01 |
| HMEA HMEC HMED HMEE HMEF | Human Microvascular Endothelial | Lambda ZAP II | LP01 |
| HMEG HMEI HMEJ HMEK HMEL | Cells, fract. A | | |
| HUSA HUSC | Human Umbilical Vein Endothelial | Lambda ZAP II | LP01 |
| | Cells, fract. A | | |
| HLQA HLQB | Hepatocellular Tumor | Lambda ZAP II | LP01 |
| HHGA HHGB HHGC HHGD | Hemangiopericytoma | Lambda ZAP II | LP01 |
| HSDM | Human Striatum Depression, re-rescue | Lambda ZAP II | LP01 |
| HUSH | H Umbilical Vein Endothelial Cells, | Lambda ZAP II | LP01 |
| | frac A, re-excision | | |
| HSGS | Salivary gland, subtracted | Lambda ZAP II | LP01 |
| HFXA HFXB HFXC HFXD HFXE | Brain frontal cortex | Lambda ZAP II | LP01 |
| HFXF HFXG HFXH | | | |
| HPQA HPQB HPQC | PERM TF274 | Lambda ZAP II | LP01 |
| HFXJ HFXK | Brain Frontal Cortex, re-excision | Lambda ZAP II | LP01 |
| HCWA HCWB HCWC HCWD HCWE | CD34 positive cells (Cord Blood) | ZAP Express | LP02 |
| HCWF HCWG HCWH HCWI HCWJ | | | |
| HCWK | | | |
| HCUA HCUB HCUC | CD34 depleted Buffy Coat (Cord | ZAP Express | LP02 |
| | Blood) | | |
| HRSM | A-14 cell line | ZAP Express | LP02 |
| HRSA | A1-CELL LINE | ZAP Express | LP02 |
| HCUD HCUE HCUF HCUG HCUH | CD34 depleted Buffy Coat (Cord | ZAP Express | LP02 |
| HCUI | Blood), re-excision | | |
| HBXE HBXF HBXG | H. Whole Brain #2, re-excision | ZAP Express | LP02 |
| HRLM | L8 cell line | ZAP Express | LP02 |
| HBXA HBXB HBXC HBXD | Human Whole Brain #2 - Oligo dT >1.5 Kb | ZAP Express | LP02 |
| HUDA HUDB HUDC | Testes | ZAP Express | LP02 |
| HHTM HHTN HHTO | H. hypothalamus, frac A; re-excision | ZAP Express | LP02 |
| HHTL | H. hypothalamus, frac A | ZAP Express | LP02 |
| HASA HASD | Human Adult Spleen | Uni-ZAP XR | LP03 |
| HFKC HFKD HFKE HFKF HFKG | Human Fetal Kidney | Uni-ZAP XR | LP03 |
| HE8A HE8B HE8C HE8D HE8E HE8F | Human 8 Week Whole Embryo | Uni-ZAP XR | LP03 |
| HE8M HE8N | | | |
| HGBA HGBD HGBE HGBF HGBG | Human Gall Bladder | Uni-ZAP XR | LP03 |
| HGBH HGBI | | | |
| HLHA HLHB HLHC HLHD HLHE | Human Fetal Lung III | Uni-ZAP XR | LP03 |
| HLHF HLHG HLHH HLHQ | | | |
| HPMA HPMB HPMC HPMD HPME | Human Placenta | Uni-ZAP XR | LP03 |
| HPMF HPMG HPMH | | | |
| HPRA HPRB HPRC HPRD | Human Prostate | Uni-ZAP XR | LP03 |
| HSIA HSIC HSID HSIE | Human Adult Small Intestine | Uni-ZAP XR | LP03 |
| HTEA HTEB HTEC HTED HTEE | Human Testes | Uni-ZAP XR | LP03 |
| HTEF HTEG HTEH HTEI HTEJ HTEK | | | |
| HTPA HTPB HTPC HTPD HTPE | Human Pancreas Tumor | Uni-ZAP XR | LP03 |
| HTTA HTTB HTTC HTTD HTTE | Human Testes Tumor | Uni-ZAP XR | LP03 |
| HTTF | | | |
| HAPA HAPB HAPC HAPM | Human Adult Pulmonary | Uni-ZAP XR | LP03 |
| HETA HETB HETC HETD HETE | Human Endometrial Tumor | Uni-ZAP XR | LP03 |
| HETF HETG HETH HETI | | | |
| HHFB HHFC HHFD HHFE HHFF | Human Fetal Heart | Uni-ZAP XR | LP03 |
| HHFG HHFH HHFI | | | |
| HHPB HHPC HHPD HHPE HHPF | Human Hippocampus | Uni-ZAP XR | LP03 |
| HHPG HHPH | | | |
| HCE1 HCE2 HCE3 HCE4 HCE5 HCEB | Human Cerebellum | Uni-ZAP XR | LP03 |
| HCEC HCED HCEE HCEF HCEG | | | |
| HUVB HUVC HUVD HUVE | Human Umbilical Vein, Endo. remake | Uni-ZAP XR | LP03 |
| HSTA HSTB HSTC HSTD | Human Skin Tumor | Uni-ZAP XR | LP03 |
| HTAA HTAB HTAC HTAD HTAE | Human Activated T-Cells | Uni-ZAP XR | LP03 |
| HFEA HFEB HFEC | Human Fetal Epithelium (Skin) | Uni-ZAP XR | LP03 |
| HJPA HJPB HJPC HJPD | HUMAN JURKAT MEMBRANE | Uni-ZAP XR | LP03 |
| | BOUND POLYSOMES | | |
| HESA | Human epithelioid sarcoma | Uni-Zap XR | LP03 |
| HLTA HLTB HLTC HLTD HLTE | Human T-Cell Lymphoma | Uni-ZAP XR | LP03 |
| HLTF | | | |
| HFTA HFTB HFTC HFTD | Human Fetal Dura Mater | Uni-ZAP XR | LP03 |
| HRDA HRDB HRDC HRDD HRDE | Human Rhabdomyosarcoma | Uni-ZAP XR | LP03 |
| HRDF | | | |
| HCAA HCAB HCAC | Cem cells cyclohexamide treated | Uni-ZAP XR | LP03 |
| HRGA HRGB HRGC HRGD | Raji Cells, cyclohexamide treated | Uni-ZAP XR | LP03 |
| HSUA HSUB HSUC HSUM | Supt Cells, cyclohexamide treated | Uni-ZAP XR | LP03 |
| HT4A HT4C HT4D | Activated T-Cells, 12 hrs. | Uni-ZAP XR | LP03 |
| HE9A HE9B HE9C HE9D HE9E HE9F | Nine Week Old Early Stage Human | Uni-ZAP XR | LP03 |
| HE9G HE9H HE9M HE9N | | | |
| HATA HATB HATC HATD HATE | Human Adrenal Gland Tumor | Uni-ZAP XR | LP03 |
| HT5A | Activated T-Cells, 24 hrs. | Uni-ZAP XR | LP03 |
| HFGA HFGM | Human Fetal Brain | Uni-ZAP XR | LP03 |
| HNEA HNEB HNEC HNED HNEE | Human Neutrophil | Uni-ZAP XR | LP03 |
| HBGB HBGD | Human Primary Breast Cancer | Uni-ZAP XR | LP03 |
| HBNA HBNB | Human Normal Breast | Uni-ZAP XR | LP03 |
| HCAS | Cem Cells, cyclohexamide treated, | Uni-ZAP XR | LP03 |
| | subtra | | |
| HHPS | Human Hippocampus, subtracted | pBS | LP03 |
| HKCS HKCU | Human Colon Cancer, subtracted | pBS | LP03 |
| HRGS | Raji cells, cyclohexamide treated, | pBS | LP03 |
| | subtracted | | |
| HSUT | Supt cells, cyclohexamide treated, | pBS | LP03 |
| | differentially expressed | | |
| HT4S | Activated T-Cells, 12 hrs, subtracted | Uni-ZAP XR | LP03 |
| HCDA HCDB HCDC HCDD HCDE | Human Chondrosarcoma | Uni-ZAP XR | LP03 |
| HOAA HOAB HOAC | Human Osteosarcoma | Uni-ZAP XR | LP03 |
| HTLA HTLB HTLC HTLD HTLE | Human adult testis, large inserts | Uni-ZAP XR | LP03 |
| HTLF | | | |
| HLMA HLMC HLMD | Breast Lymph node cDNA library | Uni-ZAP XR | LP03 |
| H6EA H6EB H6EC | HL-60, PMA 4 H | Uni-ZAP XR | LP03 |
| HTXA HTXB HTXC HTXD HTXE | Activated T-Cell (12 hs)/Thiouridine | Uni-ZAP XR | LP03 |
| HTXF HTXG HTXH | labelledEco | | |
| HNFA HNFB HNFC HNFD HNFE | Human Neutrophil, Activated | Uni-ZAP XR | LP03 |
| HNFF HNFG HNFH HNFJ | | | |
| HTOB HTOC | HUMAN TONSILS, FRACTION 2 | Uni-ZAP XR | LP03 |
| HMGB | Human OB MG63 control fraction I | Uni-ZAP XR | LP03 |
| HOPB | Human OB HOS control fraction I | Uni-ZAP XR | LP03 |
| HORB | Human OB HOS treated (10 nM E2) | Uni-ZAP XR | LP03 |
| | fraction I | | |
| HSVA HSVB HSVC | Human Chronic Synovitis | Uni-ZAP XR | LP03 |
| HROA | HUMAN STOMACH | Uni-ZAP XR | LP03 |
| HBJA HBJB HBJC HBJD HBJE HBJF | HUMAN B CELL LYMPHOMA | Uni-ZAP XR | LP03 |
| HBJG HBJH HBJI HBJJ HBJK | | | |
| HCRA HCRB HCRC | human corpus colosum | Uni-ZAP XR | LP03 |
| HODA HODB HODC HODD | human ovarian cancer | Uni-ZAP XR | LP03 |
| HDSA | Dermatofibrosarcoma Protuberance | Uni-ZAP XR | LP03 |
| HMWA HMWB HMWC HMWD | Bone Marrow Cell Line (RS4; 11) | Uni-ZAP XR | LP03 |
| HMWE HMWF HMWG HMWH | | | |
| HMWI HMWJ | | | |
| HSOA | stomach cancer (human) | Uni-ZAP XR | LP03 |
| HERA | SKIN | Uni-ZAP XR | LP03 |
| HMDA | Brain-medulloblastoma | Uni-ZAP XR | LP03 |
| HGLA HGLB HGLD | Glioblastoma | Uni-ZAP XR | LP03 |
| HEAA | H. Atrophic Endometrium | Uni-ZAP XR | LP03 |
| HBCA HBCB | H. Lymph node breast Cancer | Uni-ZAP XR | LP03 |
| HPWT | Human Prostate BPH, re-excision | Uni-ZAP XR | LP03 |
| HFVG HFVH HFVI | Fetal Liver, subtraction II | pBS | LP03 |
| HNFI | Human Neutrophils, Activated, re- | pBS | LP03 |
| | excision | | |
| HBMB HBMC HBMD | Human Bone Marrow, re-excision | pBS | LP03 |
| HKML HKMM HKMN | H. Kidney Medulla, re-excision | pBS | LP03 |
| HKIX HKIY | H. Kidney Cortex, subtracted | pBS | LP03 |
| HADT | H. Amygdala Depression, subtracted | pBS | LP03 |
| H6AS | Hl-60, untreated, subtracted | Uni-ZAP XR | LP03 |
| H6ES | HL-60, PMA 4 H, subtracted | Uni-ZAP XR | LP03 |
| H6BS | HL-60, RA 4 h, Subtracted | Uni-ZAP XR | LP03 |
| H6CS | HL-60, PMA 1 d, subtracted | Uni-ZAP XR | LP03 |
| HTXJ HTXK | Activated T-cell(12 h)/Thiouridine-re- | Uni-ZAP XR | LP03 |
| | excision | | |
| HMSA HMSB HMSC HMSD HMSE | Monocyte activated | Uni-ZAP XR | LP03 |
| HMSF HMSG HMSH HMSI HMSJ | | | |
| HMSK | | | |
| HAGA HAGB HAGC HAGD HAGE | Human Amygdala | Uni-ZAP XR | LP03 |
| HAGF | | | |
| HSRA HSRB HSRE | STROMAL - OSTEOCLASTOMA | Uni-ZAP XR | LP03 |
| HSRD HSRF HSRG HSRH | Human Osteoclastoma Stromal Cells - | Uni-ZAP XR | LP03 |
| | unamplified | | |
| HSQA HSQB HSQC HSQD HSQE | Stromal cell TF274 | Uni-ZAP XR | LP03 |
| HSQF HSQG | | | |
| HSKA HSKB HSKC HSKD HSKE | Smooth muscle, serum treated | Uni-ZAP XR | LP03 |
| HSKF HSKZ | | | |
| HSLA HSLB HSLC HSLD HSLE | Smooth muscle, control | Uni-ZAP XR | LP03 |
| HSLF HSLG | | | |
| HSDA HSDD HSDE HSDF HSDG | Spinal cord | Uni-ZAP XR | LP03 |
| HSDH | | | |
| HPWS | Prostate-BPH subtracted II | pBS | LP03 |
| HSKW HSKX HSKY | Smooth Muscle - HASTE normalized | pBS | LP03 |
| HFPB HFPC HFPD | H. Frontal cortex, epileptic; re-excision | Uni-ZAP XR | LP03 |
| HSDI HSDJ HSDK | Spinal Cord, re-excision | Uni-ZAP XR | LP03 |
| HSKN HSKO | Smooth Muscle Serum Treated, Norm | pBS | LP03 |
| HSKG HSKH HSKI | Smooth muscle, serum induced, re-exc | pBS | LP03 |
| HFCA HFCB HFCC HFCD HFCE | Human Fetal Brain | Uni-ZAP XR | LP04 |
| HFCF | | | |
| HPTA HPTB HPTD | Human Pituitary | Uni-ZAP XR | LP04 |
| HTHB HTHC HTHD | Human Thymus | Uni-ZAP XR | LP04 |
| HE6B HE6C HE6D HE6E HE6F HE6G | Human Whole Six Week Old Embryo | Uni-ZAP XR | LP04 |
| HE6S | | | |
| HSSA HSSB HSSC HSSD HSSE HSSF | Human Synovial Sarcoma | Uni-ZAP XR | LP04 |
| HSSG HSSH HSSI HSSJ HSSK | | | |
| HE7T | 7 Week Old Early Stage Human, | Uni-ZAP XR | LP04 |
| | subtracted | | |
| HEPA HEPB HEPC | Human Epididymus | Uni-ZAP XR | LP04 |
| HSNA HSNB HSNC HSNM HSNN | Human Synovium | Uni-ZAP XR | LP04 |
| HPFB HPFC HPFD HPFE | Human Prostate Cancer, Stage C | Uni-ZAP XR | LP04 |
| | fraction | | |
| HE2A HE2D HE2E HE2H HE2I HE2M | 12 Week Old Early Stage Human | Uni-ZAP XR | LP04 |
| HE2N HE2O | | | |
| HE2B HE2C HE2F HE2G HE2P HE2Q | 12 Week Old Early Stage Human, II | Uni-ZAP XR | LP04 |
| HPTS HPTT HPTU | Human Pituitary, subtracted | Uni-ZAP XR | LP04 |
| HAUA HAUB HAUC | Amniotic Cells - TNF induced | Uni-ZAP XR | LP04 |
| HAQA HAQB HAQC HAQD | Amniotic Cells - Primary Culture | Uni-ZAP XR | LP04 |
| HWTA HWTB HWTC | wilm's tumor | Uni-ZAP XR | LP04 |
| HBSD | Bone Cancer, re-excision | Uni-ZAP XR | LP04 |
| HSGB | Salivary gland, re-excision | Uni-ZAP XR | LP04 |
| HSJA HSJB HSJC | Smooth muscle-ILb induced | Uni-ZAP XR | LP04 |
| HSXA HSXB HSXC HSXD | Human Substantia Nigra | Uni-ZAP XR | LP04 |
| HSHA HSHB HSHC | Smooth muscle, IL1b induced | Uni-ZAP XR | LP04 |
| HOUA HOUB HOUC HOUD HOUE | Adipocytes | Uni-ZAP XR | LP04 |
| HPWA HPWB HPWC HPWD HPWE | Prostate BPH | Uni-ZAP XR | LP04 |
| HELA HELB HELC HELD HELE | Endothelial cells-control | Uni-ZAP XR | LP04 |
| HELF HELG HELH | | | |
| HEMA HEMB HEMC HEMD HEME | Endothelial-induced | Uni-ZAP XR | LP04 |
| HEMF HEMG HEMH | | | |
| HBIA HBIB HBIC | Human Brain, Striatum | Uni-ZAP XR | LP04 |
| HHSA HHSB HHSC HHSD HHSE | Human Hypothalmus, Schizophrenia | Uni-ZAP XR | LP04 |
| HNGA HNGB HNGC HNGD HNGE | neutrophils control | Uni-ZAP XR | LP04 |
| HNGF HNGG HNGH HNGI HNGJ | | | |
| HNHA HNHB HNHC HNHD HNHE | Neutrophils IL-1 and LPS induced | Uni-ZAP XR | LP04 |
| HNHF HNHG HNHH HNHI HNHJ | | | |
| HSDB HSDC | STRIATUM DEPRESSION | Uni-ZAP XR | LP04 |
| HHPT | Hypothalamus | Uni-ZAP XR | LP04 |
| HSAT HSAU HSAV HSAW HSAX | Anergic T-cell | Uni-ZAP XR | LP04 |
| HSAY HSAZ | | | |
| HBMS HBMT HBMU HBMV HBMW | Bone marrow | Uni-ZAP XR | LP04 |
| HBMX | | | |
| HOEA HOEB HOEC HOED HOEE | Osteoblasts | Uni-ZAP XR | LP04 |
| HOEF HOEJ | | | |
| HAIA HAIB HAIC HAID HAIE HAIF | Epithelial-TNFa and INF induced | Uni-ZAP XR | LP04 |
| HTGA HTGB HTGC HTGD | Apoptotic T-cell | Uni-ZAP XR | LP04 |
| HMCA HMCB HMCC HMCD HMCE | Macrophage-oxLDL | Uni-ZAP XR | LP04 |
| HMAA HMAB HMAC HMAD HMAE | Macrophage (GM-CSF treated) | Uni-ZAP XR | LP04 |
| HMAF HMAG | | | |
| HPHA | Normal Prostate | Uni-ZAP XR | LP04 |
| HPIA HPIB HPIC | LNCAP prostate cell line | Uni-ZAP XR | LP04 |
| HPJA HPJB HPJC | PC3 Prostate cell line | Uni-ZAP XR | LP04 |
| HOSE HOSF HOSG | Human Osteoclastoma, re-excision | Uni-ZAP XR | LP04 |
| HTGE HTGF | Apoptotic T-cell, re-excision | Uni-ZAP XR | LP04 |
| HMAJ HMAK | H Macrophage (GM-CSF treated), re- | Uni-ZAP XR | LP04 |
| | excision | | |
| HACB HACC HACD | Human Adipose Tissue, re-excision | Uni-ZAP XR | LP04 |
| HFPA | H. Frontal Cortex, Epileptic | Uni-ZAP XR | LP04 |
| HFAA HFAB HFAC HFAD HFAE | Alzheimer's, spongy change | Uni-ZAP XR | LP04 |
| HFAM | Frontal Lobe, Dementia | Uni-ZAP XR | LP04 |
| HMIA HMIB HMIC | Human Manic Depression Tissue | Uni-ZAP XR | LP04 |
| HTSA HTSE HTSF HTSG HTSH | Human Thymus | pBS | LP05 |
| HPBA HPBB HPBC HPBD HPBE | Human Pineal Gland | pBS | LP05 |
| HSAA HSAB HSAC | HSA 172 Cells | pBS | LP05 |
| HSBA HSBB HSBC HSBM | HSC172 cells | pBS | LP05 |
| HJAA HJAB HJAC HJAD | Jurkat T-cell G1 phase | pBS | LP05 |
| HJBA HJBB HJBC HJBD | Jurkat T-Cell, S phase | pBS | LP05 |
| HAFA HAFB | Aorta endothelial cells + TNF-a | pBS | LP05 |
| HAWA HAWB HAWC | Human White Adipose | pBS | LP05 |
| HTNA HTNB | Human Thyroid | pBS | LP05 |
| HONA | Normal Ovary, Premenopausal | pBS | LP05 |
| HARA HARB | Human Adult Retina | pBS | LP05 |
| HLJA HLJB | Human Lung | pCMVSport 1 | LP06 |
| HOFM HOFN HOFO | H. Ovarian Tumor, II, OV5232 | pCMVSport 2.0 | LP07 |
| HOGA HOGB HOGC | OV 10-3-95 | pCMVSport 2.0 | LP07 |
| HCGL | CD34+cells, II | pCMVSport 2.0 | LP07 |
| HDLA | Hodgkin's Lymphoma I | pCMVSport 2.0 | LP07 |
| HDTA HDTB HDTC HDTD HDTE | Hodgkin's Lymphoma II | pCMVSport 2.0 | LP07 |
| HKAA HKAB HKAC HKAD HKAE | Keratinocyte | pCMVSport2.0 | LP07 |
| HKAF HKAG HKAH | | | |
| HCIM | CAPFINDER, Crohn's Disease, lib 2 | pCMVSport 2.0 | LP07 |
| HKAL | Keratinocyte, lib 2 | pCMVSport2.0 | LP07 |
| HKAT | Keratinocyte, lib 3 | pCMVSport2.0 | LP07 |
| HNDA | Nasal polyps | pCMVSport2.0 | LP07 |
| HDRA | H. Primary Dendritic Cells, lib 3 | pCMVSport2.0 | LP07 |
| HOHA HOHB HOHC | Human Osteoblasts II | pCMVSport2.0 | LP07 |
| HLDA HLDB HLDC | Liver, Hepatoma | pCMVSport3.0 | LP08 |
| HLDN HLDO HLDP | Human Liver, normal | pCMVSport3.0 | LP08 |
| HMTA | pBMC stimulated w/poly I/C | pCMVSport3.0 | LP08 |
| HNTA | NTERA2, control | pCMVSport3.0 | LP08 |
| HDPA HDPB HDPC HDPD HDPF | Primary Dendritic Cells, lib 1 | pCMVSport3.0 | LP08 |
| HDPG HDPH HDPI HDPJ HDPK | | | |
| HDPM HDPN HDPO HDPP | Primary Dendritic cells, frac 2 | pCMVSport3.0 | LP08 |
| HMUA HMUB HMUC | Myoloid Progenitor Cell Line | pCMVSport3.0 | LP08 |
| HHEA HHEB HHEC HHED | T Cell helper I | pCMVSport3.0 | LP08 |
| HHEM HHEN HHEO HHEP | T cell helper II | pCMVSport3.0 | LP08 |
| HEQA HEQB HEQC | Human endometrial stromal cells | pCMVSport3.0 | LP08 |
| HJMA HJMB | Human endometrial stromal cells - | pCMVSport3.0 | LP08 |
| | treated with progesterone | | |
| HSWA HSWB HSWC | Human endometrial stromal cells - | pCMVSport3.0 | LP08 |
| | treated with estradiol | | |
| HSYA HSYB HSYC | Human Thymus Stromal Cells | pCMVSport3.0 | LP08 |
| HLWA HLWB HLWC | Human Placenta | pCMVSport3.0 | LP08 |
| HRAA HRAB HRAC | Rejected Kidney, lib 4 | pCMVSport3.0 | LP08 |
| HMTM | PCR, pBMC I/C treated | PCRII | LP09 |
| HMJA | H. Meniingima, M6 | pSport 1 | LP10 |
| HMKA HMKB HMKC HMKD HMKE | H. Meningima, M1 | pSport 1 | LP10 |
| HUSG HUSI | Human umbilical vein endothelial cells, | pSport 1 | LP10 |
| | IL-4 induced | | |
| HUSX HUSY | Human Umbilical Vein Endothelial | pSport 1 | LP10 |
| | Cells, uninduced | | |
| HOFA | Ovarian Tumor I, OV5232 | pSport 1 | LP10 |
| HCFA HCFB HCFC HCFD | T-Cell PHA 16 hrs | pSport 1 | LP10 |
| HCFL HCFM HCFN HCFO | T-Cell PHA 24 hrs | pSport 1 | LP10 |
| HADA HADC HADD HADE HADF | Human Adipose | pSport 1 | LP10 |
| HADG | | | |
| HOVA HOVB HOVC | Human Ovary | pSport 1 | LP10 |
| HTWB HTWC HTWD HTWE HTWF | Resting T-Cell Library, II | pSport 1 | LP10 |
| HMMA | Spleen metastic melanoma | pSport 1 | LP10 |
| HLYA HLYB HLYC HLYD HLYE | Spleen, Chronic lymphocytic leukemia | pSport 1 | LP10 |
| HCGA | CD34+ cell, I | pSport 1 | LP10 |
| HEOM HEON | Human Eosinophils | pSport 1 | LP10 |
| HTDA | Human Tonsil, Lib 3 | pSport 1 | LP10 |
| HSPA | Salivary Gland, Lib 2 | pSport 1 | LP10 |
| HCHA HCHB HCHC | Breast Cancer cell line, MDA 36 | pSport 1 | LP10 |
| HCHM HCHN | Breast Cancer Cell line, angiogenic | pSport 1 | LP10 |
| HCIA | Crohn's Disease | pSport 1 | LP10 |
| HDAA HDAB HDAC | HEL cell line | pSport 1 | LP10 |
| HABA | Human Astrocyte | pSport 1 | LP10 |
| HUFA HUFB HUFC | Ulcerative Colitis | pSport 1 | LP10 |
| HNTM | NTERA2 + retinoic acid, 14 days | pSport 1 | LP10 |
| HDQA | Primary Dendritic cells, CapFinder2, | pSport 1 | LP10 |
| | frac 1 | | |
| HDQM | Primary Dendritic Cells, CapFinder, | pSport 1 | LP10 |
| | frac 2 | | |
| HLDX | Human Liver, normal, CapFinder | pSport 1 | LP10 |
| HULA HULB HULC | Human Dermal Endothelial | pSport1 | LP10 |
| | Cells, untreated | | |
| HUMA | Human Dermal Endothelial cells, treated | pSport1 | LP10 |
| HCJA | Human Stromal Endometrial | pSport1 | LP10 |
| | fibroblasts, untreated | | |
| HCJM | Human Stromal endometrial fibroblasts, | pSport1 | LP10 |
| | treated w/ estradiol | | |
| HEDA | Human Stromal endometrial fibroblasts, | pSport1 | LP10 |
| | treated with progesterone | | |
| HFNA | Human ovary tumor cell OV350721 | pSport1 | LP10 |
| HKGA HKGB HKGC HKGD | Merkel Cells | pSport1 | LP10 |
| HISA HISB HISC | Pancreas Islet Cell Tumor | pSport1 | LP10 |
| HLSA | Skin, burned | pSport1 | LP10 |
| HBZA | Prostate, BPH, Lib 2 | pSport 1 | LP10 |
| HBZS | Prostate BPH, Lib 2, subtracted | pSport 1 | LP10 |
| HFIA HFIB HFIC | Synovial Fibroblasts (control) | pSport 1 | LP10 |
| HFIH HFII HFIJ | Synovial hypoxia | pSport 1 | LP10 |
| HFIT HFIU HFIV | Synovial IL-1/TNF stimulated | pSport 1 | LP10 |
| HGCA | Messangial cell, frac 1 | pSport1 | LP10 |
| HMVA HMVB HMVC | Bone Marrow Stromal Cell, untreated | pSport1 | LP10 |
| HFIX HFIY HFIZ | Synovial Fibroblasts (I11/TNF), subt | pSport1 | LP10 |
| HFOX HFOY HFOZ | Synovial hypoxia-RSF subtracted | pSport1 | LP10 |
| HMQA HMQB HMQC HMQD | Human Activated Monocytes | Uni-ZAP XR | LP11 |
| HLIA HLIB HLIC | Human Liver | pCMVSport 1 | LP012 |
| HHBA HHBB HHBC HHBD HHBE | Human Heart | pCMVSport 1 | LP012 |
| HBBA HBBB | Human Brain | pCMVSport 1 | LP012 |
| HLJA HLJB HLJC HLJD HLJE | Human Lung | pCMVSport 1 | LP012 |
| HOGA HOGB HOGC | Ovarian Tumor | pCMVSport 2.0 | LP012 |
| HTJM | Human Tonsils, Lib 2 | pCMVSport 2.0 | LP012 |
| HAMF HAMG | KMH2 | pCMVSport 3.0 | LP012 |
| HAJA HAJB HAJC | L428 | pCMVSport 3.0 | LP012 |
| HWBA HWBB HWBC HWBD HWBE | Dendritic cells, pooled | pCMVSport 3.0 | LP012 |
| HWAA HWAB HWAC HWAD HWAE | Human Bone Marrow, treated | pCMVSport 3.0 | LP012 |
| HYAA HYAB HYAC | B Cell lymphoma | pCMVSport 3.0 | LP012 |
| HWHG HWHH HWHI | Healing groin wound, 6.5 hours post | pCMVSport 3.0 | LP012 |
| | incision | | |
| HWHP HWHQ HWHR | Healing groin wound; 7.5 hours post | pCMVSport 3.0 | LP012 |
| | incision | | |
| HARM | Healing groin wound - zero hr post- | pCMVSport 3.0 | LP012 |
| | incision (control) | | |
| HBIM | Olfactory epithelium; nasalcavity | pCMVSport 3.0 | LP012 |
| HWDA | Healing Abdomen wound; 70&90 min | pCMVSport 3.0 | LP012 |
| | post incision | | |
| HWEA | Healing Abdomen Wound; 15 days post | pCMVSport 3.0 | LP012 |
| | incision | | |
| HWJA | Healing Abdomen Wound; 21&29 days | pCMVSport 3.0 | LP012 |
| HNAL | Human Tongue, frac 2 | pSport1 | LP012 |
| HMJA | H. Meniingima, M6 | pSport1 | LP012 |
| HMKA HMKB HMKC HMKD HMKE | H. Meningima, M1 | pSport1 | LP012 |
| HOFA | Ovarian Tumor I, OV5232 | pSport1 | LP012 |
| HCFA HCFB HCFC HCFD | T-Cell PHA 16 hrs | pSport1 | LP012 |
| HCFL HCFM HCFN HCFO | T-Cell PHA 24 hrs | pSport1 | LP012 |
| HMMA HMMB HMMC | Spleen metastic melanoma | pSport1 | LP012 |
| HTDA | Human Tonsil, Lib 3 | pSport1 | LP012 |
| HDBA | Human Fetal Thymus | pSport1 | LP012 |
| HDUA | Pericardium | pSport1 | LP012 |
| HBZA | Prostate, BPH, Lib 2 | pSport1 | LP012 |
| HWCA | Larynx tumor | pSport1 | LP012 |
| HWKA | Normal lung | pSport1 | LP012 |
| HSMB | Bone marrow stroma, treated | pSport1 | LP012 |
| HBHM | Normal trachea | pSport1 | LP012 |
| HLFC | Human Larynx | pSport1 | LP012 |
| HLRB | Siebben Polyposis | pSport1 | LP012 |
| HNIA | Mammary Gland | pSport1 | LP012 |
| HNJB | Palate carcinoma | pSport1 | LP012 |
| HNKA | Palate normal | pSport1 | LP012 |
| HMZA | Pharynx carcinoma | pSport1 | LP012 |
| HABG | Cheek Carcinoma | pSport1 | LP012 |
| HMZM | Pharynx Carcinoma | pSport1 | LP012 |
| HDRM | Larynx Carcinoma | pSport1 | LP012 |
| HVAA | Pancreas normal PCA4 No | pSport1 | LP012 |
| HICA | Tongue carcinoma | pSport1 | LP012 |
| HUKA HUKB HUKC HUKD HUKE | Human Uterine Cancer | Lambda ZAP II | LP013 |
| HFFA | Human Fetal Brain, random primed | Lambda ZAP II | LP013 |
| HTUA | Activated T-cell labeled with 4-thioluri | Lambda ZAP II | LP013 |
| HBQA | Early Stage Human Brain, random | Lambda ZAP II | LP013 |
| | primed | | |
| HMEB | Human microvascular Endothelial cells, | Lambda ZAP II | LP013 |
| | fract. B | | |
| HUSH | Human Umbilical Vein Endothelial | Lambda ZAP II | LP013 |
| | cells, fract. A, re-excision | | |
| HLQC HLQD | Hepatocellular tumor, re-excision | Lambda ZAP II | LP013 |
| HTWJ HTWK HTWL | Resting T-cell, re-excision | Lambda ZAP II | LP013 |
| HF6S | Human Whole 6 week Old Embryo (II), | pBluescript | LP013 |
| | subt | | |
| HHPS | Human Hippocampus, subtracted | pBluescript | LP013 |
| HL1S | LNCAP, differential expression | pBluescript | LP013 |
| HLHS HLHT | Early Stage Human Lung, Subtracted | pBluescript | LP013 |
| HSUS | Supt cells, cyclohexamide treated, | pBluescript | LP013 |
| | subtracted | | |
| HSUT | Supt cells, cyclohexamide treated, | pBluescript | LP013 |
| | differentially expressed | | |
| HSDS | H. Striatum Depression, subtracted | pBluescript | LP013 |
| HPTZ | Human Pituitary, Subtracted VII | pBluescript | LP013 |
| HSDX | H. Striatum Depression, subt II | pBluescript | LP013 |
| HSDZ | H. Striatum Depression, subt | pBluescript | LP013 |
| HPBA HPBB HPBC HPBD HPBE | Human Pineal Gland | pBluescript SK− | LP013 |
| HRTA | Colorectal Tumor | pBluescript SK− | LP013 |
| HSBA HSBB HSBC HSBM | HSC172 cells | pBluescript SK− | LP013 |
| HJAA HJAB HJAC HJAD | Jurkat T-cell G1 phase | pBluescript SK− | LP013 |
| HJBA HJBB HJBC HJBD | Jurkat T-cell, S1 phase | pBluescript SK− | LP013 |
| HTNA HTNB | Human Thyroid | pBluescript SK− | LP013 |
| HAHA HAHB | Human Adult Heart | Uni-ZAP XR | LP013 |
| HE6A | Whole 6 week Old Embryo | Uni-ZAP XR | LP013 |
| HFCA HFCB HFCC HFCD HFCE | Human Fetal Brain | Uni-ZAP XR | LP013 |
| HFKC HFKD HFKE HFKF HFKG | Human Fetal Kidney | Uni-ZAP XR | LP013 |
| HGBA HGBD HGBE HGBF HGBG | Human Gall Bladder | Uni-ZAP XR | LP013 |
| HPRA HPRB HPRC HPRD | Human Prostate | Uni-ZAP XR | LP013 |
| HTEA HTEB HTEC HIED HTEE | Human Testes | Uni-ZAP XR | LP013 |
| HTTA HTTB HTTC HTTD HTTE | Human Testes Tumor | Uni-ZAP XR | LP013 |
| HYBA HYBB | Human Fetal Bone | Uni-ZAP XR | LP013 |
| HFLA | Human Fetal Liver | Uni-ZAP XR | LP013 |
| HHFB HHFC HHFD HHFE HHFF | Human Fetal Heart | Uni-ZAP XR | LP013 |
| HUVB HUVC HUVD HUVE | Human Umbilical Vein, End. remake | Uni-ZAP XR | LP013 |
| HTHB HTHC HTHD | Human Thymus | Uni-ZAP XR | LP013 |
| HSTA HSTB HSTC HSTD | Human Skin Tumor | Uni-ZAP XR | LP013 |
| HTAA HTAB HTAC HTAD HTAE | Human Activated T-cells | Uni-ZAP XR | LP013 |
| HFEA HFEB HFEC | Human Fetal Epithelium (skin) | Uni-ZAP XR | LP013 |
| HJPA HJPB HJPC HJPD | Human Jurkat Membrane Bound | Uni-ZAP XR | LP013 |
| | Polysomes | | |
| HESA | Human Epithelioid Sarcoma | Uni-ZAP XR | LP013 |
| HALS | Human Adult Liver, Subtracted | Uni-ZAP XR | LP013 |
| HFTA HFTB HFTC HFTD | Human Fetal Dura Mater | Uni-ZAP XR | LP013 |
| HCAA HCAB HCAC | Cem cells, cyclohexamide treated | Uni-ZAP XR | LP013 |
| HRGA HRGB HRGC HRGD | Raji Cells, cyclohexamide treated | Uni-ZAP XR | LP013 |
| HE9A HE9B HE9C HE9D HE9E | Nine Week Old Early Stage Human | Uni-ZAP XR | LP013 |
| HSFA | Human Fibrosarcoma | Uni-ZAP XR | LP013 |
| HATA HATB HATC HATD HATE | Human Adrenal Gland Tumor | Uni-ZAP XR | LP013 |
| HTRA | Human Trachea Tumor | Uni-ZAP XR | LP013 |
| HE2A HE2D HE2E HE2H HE2I | 12 Week Old Early Stage Human | Uni-ZAP XR | LP013 |
| HE2B HE2C HE2F HE2G HE2P | 12 Week Old Early Stage Human, II | Uni-ZAP XR | LP013 |
| HNEA HNEB HNEC HNED HNEE | Human Neutrophil | Uni-ZAP XR | LP013 |
| HBGA | Human Primary Breast Cancer | Uni-ZAP XR | LP013 |
| HPTS HPTT HPTU | Human Pituitary, subtracted | Uni-ZAP XR | LP013 |
| HMQA HMQB HMQC HMQD | Human Activated Monocytes | Uni-ZAP XR | LP013 |
| HOAA HOAB HOAC | Human Osteosarcoma | Uni-ZAP XR | LP013 |
| HTOA HTOD HTOE HTOF HTOG | human tonsils | Uni-ZAP XR | LP013 |
| HMGB | Human OB MG63 control fraction I | Uni-ZAP XR | LP013 |
| HOPB | Human OB HOS control fraction I | Uni-ZAP XR | LP013 |
| HOQB | Human OB HOS treated (1 nM E2) | Uni-ZAP XR | LP013 |
| | fraction I | | |
| HAUA HAUB HAUC | Amniotic Cells - TNF induced | Uni-ZAP XR | LP013 |
| HAQA HAQB HAQC HAQD | Amniotic Cells - Primary Culture | Uni-ZAP XR | LP013 |
| HROA HROC | HUMAN STOMACH | Uni-ZAP XR | LP013 |
| HBJA HBJB HBJC HBJD HBJE | HUMAN B CELL LYMPHOMA | Uni-ZAP XR | LP013 |
| HODA HODB HODC HODD | human ovarian cancer | Uni-ZAP XR | LP013 |
| HCPA | Corpus Callosum | Uni-ZAP XR | LP013 |
| HSOA | stomach cancer (human) | Uni-ZAP XR | LP013 |
| HERA | SKIN | Uni-ZAP XR | LP013 |
| HMDA | Brain-medulloblastoma | Uni-ZAP XR | LP013 |
| HGLA HGLB HGLD | Glioblastoma | Uni-ZAP XR | LP013 |
| HWTA HWTB HWTC | wilm's tumor | Uni-ZAP XR | LP013 |
| HEAA | H. Atrophic Endometrium | Uni-ZAP XR | LP013 |
| HAPN HAPO HAPP HAPQ HAPR | Human Adult Pulmonary; re-excision | Uni-ZAP XR | LP013 |
| HLTG HLTH | Human T-cell lymphoma; re-excision | Uni-ZAP XR | LP013 |
| HAHC HAHD HAHE | Human Adult Heart; re-excision | Uni-ZAP XR | LP013 |
| HAGA HAGB HAGC HAGD HAGE | Human Amygdala | Uni-ZAP XR | LP013 |
| HSJA HSJB HSJC | Smooth muscle-ILb induced | Uni-ZAP XR | LP013 |
| HSHA HSHB HSHC | Smooth muscle, IL1b induced | Uni-ZAP XR | LP013 |
| HPWA HPWB HPWC HPWD HPWE | Prostate BPH | Uni-ZAP XR | LP013 |
| HPIA HPIB HPIC | LNCAP prostate cell line | Uni-ZAP XR | LP013 |
| HPJA HPJB HPJC | PC3 Prostate cell line | Uni-ZAP XR | LP013 |
| HBTA | Bone Marrow Stroma, TNF&LPS ind | Uni-ZAP XR | LP013 |
| HMCF HMCG HMCH HMCI HMCJ | Macrophage-oxLDL; re-excision | Uni-ZAP XR | LP013 |
| HAGG HAGH HAGI | Human Amygdala; re-excision | Uni-ZAP XR | LP013 |
| HACA | H. Adipose Tissue | Uni-ZAP XR | LP013 |
| HKFB | K562 + PMA (36 hrs), re-excision | ZAP Express | LP013 |
| HCWT HCWU HCWV | CD34 positive cells (cord blood), re-ex | ZAP Express | LP013 |
| HBWA | Whole brain | ZAP Express | LP013 |
| HBXA HBXB HBXC HBXD | Human Whole Brain #2 - Oligo dT >1.5 Kb | ZAP Express | LP013 |
| HAVM | Temporal cortex-Alzheizmer | pT-Adv | LP014 |
| HAVT | Hippocampus, Alzheimer Subtracted | pT-Adv | LP014 |
| HHAS | CHME Cell Line | Uni-ZAP XR | LP014 |
| HAJR | Larynx normal | pSport 1 | LP014 |
| HWLE HWLF HWLG HWLH | Colon Normal | pSport 1 | LP014 |
| HCRM HCRN HCRO | Colon Carcinoma | pSport 1 | LP014 |
| HWLI HWLJ HWLK | Colon Normal | pSport 1 | LP014 |
| HWLQ HWLR HWLS HWLT | Colon Tumor | pSport 1 | LP014 |
| HBFM | Gastroenemius Muscle | pSport 1 | LP014 |
| HBOD HBOE | Quadriceps Muscle | pSport 1 | LP014 |
| HBKD HBKE | Soleus Muscle | pSport 1 | LP014 |
| HCCM | Pancreatic Langerhans | pSport 1 | LP014 |
| HWGA | Larynx carcinoma | pSport 1 | LP014 |
| HWGM HWGN | Larynx carcinoma | pSport 1 | LP014 |
| HWLA HWLB HWLC | Normal colon | pSport 1 | LP014 |
| HWLM HWLN | Colon Tumor | pSport 1 | LP014 |
| HVAM HVAN HVAO | Pancreas Tumor | pSport 1 | LP014 |
| HWGQ | Larynx carcinoma | pSport 1 | LP014 |
| HAQM HAQN | Salivary Gland | pSport 1 | LP014 |
| HASM | Stomach; normal | pSport 1 | LP014 |
| HBCM | Uterus; normal | pSport 1 | LP014 |
| HCDM | Testis; normal | pSport 1 | LP014 |
| HDJM | Brain; normal | pSport 1 | LP014 |
| HEFM | Adrenal Gland, normal | pSport 1 | LP014 |
| HBAA | Rectum normal | pSport 1 | LP014 |
| HFDM | Rectum tumour | pSport 1 | LP014 |
| HGAM | Colon, normal | pSport 1 | LP014 |
| HHMM | Colon, tumour | pSport 1 | LP014 |
| HCLB HCLC | Human Lung Cancer | Lambda Zap II | LP015 |
| HRLA | L1 Cell line | ZAP Express | LP015 |
| HHAM | Hypothalamus, Alzheimer's | pCMVSport 3.0 | LP015 |
| HKBA | Ku 812F Basophils Line | pSport 1 | LP015 |
| HS2S | Saos2, Dexamethosome Treated | pSport 1 | LP016 |
| HA5A | Lung Carcinoma A549 TNFalpha | pSport 1 | LP016 |
| | activated | | |
| HTFM | TF-1 Cell Line GM-CSF Treated | pSport 1 | LP016 |
| HYAS | Thyroid Tumour | pSport 1 | LP016 |
| HUTS | Larynx Normal | pSport 1 | LP016 |
| HXOA | Larynx Tumor | pSport 1 | LP016 |
| HEAH | Ea.hy.926 cell line | pSport 1 | LP016 |
| HINA | Adenocarcinoma Human | pSport 1 | LP016 |
| HRMA | Lung Mesothelium | pSport 1 | LP016 |
| HLCL | Human Pre-Differentiated Adipocytes | Uni-Zap XR | LP017 |
| HS2A | Saos2 Cells | pSport 1 | LP020 |
| HS2I | Saos2 Cells; Vitamin D3 Treated | pSport 1 | LP020 |
| HUCM | CHME Cell Line, untreated | pSport 1 | LP020 |
| HEPN | Aryepiglottis Normal | pSport 1 | LP020 |
| HPSN | Sinus Piniformis Tumour | pSport 1 | LP020 |
| HNSA | Stomach Normal | pSport 1 | LP020 |
| HNSM | Stomach Tumour | pSport 1 | LP020 |
| HNLA | Liver Normal Met5No | pSport 1 | LP020 |
| HUTA | Liver Tumour Met 5 Tu | pSport 1 | LP020 |
| HOCN | Colon Normal | pSport 1 | LP020 |
| HOCT | Colon Tumor | pSport 1 | LP020 |
| HTNT | Tongue Tumour | pSport 1 | LP020 |
| HLXN | Larynx Normal | pSport 1 | LP020 |
| HLXT | Larynx Tumour | pSport 1 | LP020 |
| HTYN | Thymus | pSport 1 | LP020 |
| HPLN | Placenta | pSport 1 | LP020 |
| HTNG | Tongue Normal | pSport 1 | LP020 |
| HZAA | Thyroid Normal (SDCA2 No) | pSport 1 | LP020 |
| HWES | Thyroid Thyroiditis | pSport 1 | LP020 |
| HFHD | Ficolled Human Stromal Cells, 5Fu | pTrip1Ex2 | LP021 |
| | treated | | |
| HFHM, HFHN | Ficolled Human Stromal Cells, | pTrip1Ex2 | LP021 |
| | Untreated | | |
| HPCI | Hep G2 Cells, lambda library | lambda Zap-CMV XR | LP021 |
| HBCA, HBCB, HBCC | H. Lymph node breast Cancer | Uni-ZAP XR | LP021 |
| HCOK | Chondrocytes | pSPORT1 | LP022 |
| HDCA, HDCB, HDCC | Dendritic Cells From CD34 Cells | pSPORT1 | LP022 |
| HDMA, HDMB | CD40 activated monocyte dendritic | pSPORT1 | LP022 |
| | cells | | |
| HDDM, HDDN, HDDO | LPS activated derived dendritic cells | pSPORT1 | LP022 |
| HPCR | Hep G2 Cells, PCR library | lambda Zap-CMV XR | LP022 |
| HAAA, HAAB, HAAC | Lung, Cancer (4005313A3): Invasive | pSPORT1 | LP022 |
| | Poorly Differentiated Lung | | |
| | Adenocarcinoma | | |
| HIPA, HIPB, HIPC | Lung, Cancer (4005163 B7): Invasive, | pSPORT1 | LP022 |
| | Poorly Diff. Adenocarcinoma, | | |
| | Metastatic | | |
| HOOH, HOOI | Ovary, Cancer: (4004562 B6) Papillary | pSPORT1 | LP022 |
| | Serous Cystic Neoplasm, Low | | |
| | Malignant Pot | | |
| HIDA | Lung, Normal: (4005313 B1) | pSPORT1 | LP022 |
| HUJA, HUJB, HUJC, HUJD, HUJE | B-Cells | pCMVSport 3.0 | LP022 |
| HNOA, HNOB, HNOC, HNOD | Ovary, Normal: (9805C040R) | pSPORT1 | LP022 |
| HNLM | Lung, Normal: (4005313 B1) | pSPORT1 | LP022 |
| HSCL | Stromal Cells | pSPORT1 | LP022 |
| HAAX | Lung, Cancer: (4005313 A3) Invasive | pSPORT1 | LP022 |
| | Poorly-differentiated Metastatic lung | | |
| | adenocarcinoma | | |
| HUUA, HUUB, HUUC, HUUD | B-cells (unstimulated) | pTriplEx2 | LP022 |
| HWWA, HWWB, HWWC, HWWD, HWWE, | B-cells (stimulated) | pSPORT1 | LP022 |
| HWWF, HWWG | | | |
| HCCC | Colon, Cancer: (9808C064R) | pCMVSport 3.0 | LP023 |
| HPDO HPDP HPDQ HPDR HPD | Ovary, Cancer (9809C332): Poorly | pSport 1 | LP023 |
| | differentiated adenocarcinoma | | |
| HPCO HPCP HPCQ HPCT | Ovary, Cancer (15395A1F): Grade II | pSport 1 | LP023 |
| | Papillary Carcinoma | | |
| HOCM HOCO HOCP HOCQ | Ovary, Cancer: (15799A1F) Poorly | pSport 1 | LP023 |
| | differentiated carcinoma | | |
| HCBM HCBN HCBO | Breast, Cancer: (4004943 A5) | pSport 1 | LP023 |
| HNBT HNBU HNBV | Breast, Normal: (4005522B2) | pSport 1 | LP023 |
| HBCP HBCQ | Breast, Cancer: (4005522 A2) | pSport 1 | LP023 |
| HBCJ | Breast, Cancer: (9806C012R) | pSport 1 | LP023 |
| HSAM HSAN | Stromal cells 3.88 | pSport 1 | LP023 |
| HVCA HVCB HVCC HVCD | Ovary, Cancer: (4004332 A2) | pSport 1 | LP023 |
| HSCK HSEN HSEO | Stromal cells (HBM3.18) | pSport 1 | LP023 |
| HSCP HSCQ | stromal cell clone 2.5 | pSport 1 | LP023 |
| HUXA | Breast Cancer: (4005385 A2) | pSport 1 | LP023 |
| HCOM HCON HCOO HCOP HCOQ | Ovary, Cancer (4004650 A3): Well- | pSport 1 | LP023 |
| | Differentiated Micropapillary Serous | | |
| | Carcinoma | | |
| HBNM | Breast, Cancer: (9802C020E) | pSport 1 | LP023 |
| HVVA HVVB HVVC HVVD HVVE | Human Bone Marrow, treated | pSport 1 | LP023 |

[0988] Two nonlimiting examples are provided below for isolating a particular clone from the deposited sample of plasmid cDNAs cited for that clone in Table 6. First, a plasmid is directly isolated by screening the clones using a polynucleotide probe corresponding to the nucleotide sequence of SEQ ID NO:X.

[0989] Particularly, a specific polynucleotide with 30-40 nucleotides is synthesized using an Applied Biosystems DNA synthesizer according to the sequence reported. The oligonucleotide is labeled, for instance, with ³²P-γ-ATP using T4 polynucleotide kinase and purified according to routine methods. (E.g., Maniatis et al., Molecular Cloning: A Laboratory Manual, Cold Spring Harbor Press, Cold Spring, N.Y. (1982)). The plasmid mixture is transformed into a suitable host, as indicated above (such as XL-1 Blue (Stratagene)) using techniques known to those of skill in the art, such as those provided by the vector supplier or in related publications or patents cited above. The transformants are plated on 1.5% agar plates (containing the appropriate selection agent, e.g., ampicillin) to a density of about 150 transformants (colonies) per plate. These plates are screened using Nylon membranes according to routine methods for bacterial colony screening (e.g., Sambrook et al., Molecular Cloning: A Laboratory Manual, 2nd Edit., (1989), Cold Spring Harbor Laboratory Press, pages 1.93 to 1.104), or other techniques known to those of skill in the art.

[0990] Alternatively, two primers of 17-20 nucleotides derived from both ends of the nucleotide sequence of SEQ ID NO:X are synthesized and used to amplify the desired cDNA using the deposited cDNA plasmid as a template. The polymerase chain reaction is carried out under routine conditions, for instance, in 25 μl of reaction mixture with 0.5 ug of the above cDNA template. A convenient reaction mixture is 1.5-5 mM MgCl₂, 0.01% (w/v) gelatin, 20 μM each of dATP, dCTP, dGTP, dTTP, 25 pmol of each primer and 0.25 Unit of Taq polymerase. Thirty five cycles of PCR (denaturation at 94° C. for 1 min; annealing at 55° C. for 1 min; elongation at 72° C. for 1 min) are performed with a Perkin-Elmer Cetus automated thermal cycler. The amplified product is analyzed by agarose gel electrophoresis and the DNA band with expected molecular weight is excised and purified. The PCR product is verified to be the selected sequence by subcloning and sequencing the DNA product.

[0991] Several methods are available for the identification of the 5′ or 3′ non-coding portions of a gene which may not be present in the deposited clone. These methods include but are not limited to, filter probing, clone enrichment using specific probes, and protocols similar or identical to 5′ and 3′ “RACE” protocols which are well known in the art. For instance, a method similar to 5′ RACE is available for generating the missing 5′ end of a desired full-length transcript. (Fromont-Racine et al., Nucleic Acids Res. 21(7):1683-1684 (1993)).

[0992] Briefly, a specific RNA oligonucleotide is ligated to the 5′ ends of a population of RNA presumably containing full-length gene RNA transcripts. A primer set containing a primer specific to the ligated RNA oligonucleotide and a primer specific to a known sequence of the gene of interest is used to PCR amplify the 5′ portion of the desired full-length gene. This amplified product may then be sequenced and used to generate the full length gene.

[0993] This above method starts with total RNA isolated from the desired source, although poly-A+ RNA can be used. The RNA preparation can then be treated with phosphatase if necessary to eliminate 5′ phosphate groups on degraded or damaged RNA which may interfere with the later RNA ligase step. The phosphatase should then be inactivated and the RNA treated with tobacco acid pyrophosphatase in order to remove the cap structure present at the 5′ ends of messenger RNAs. This reaction leaves a 5′ phosphate group at the 5′ end of the cap cleaved RNA which can then be ligated to an RNA oligonucleotide using T4 RNA ligase.

[0994] This modified RNA preparation is used as a template for first strand cDNA synthesis using a gene specific oligonucleotide. The first strand synthesis reaction is used as a template for PCR amplification of the desired 5′ end using a primer specific to the ligated RNA oligonucleotide and a primer specific to the known sequence of the gene of interest. The resultant product is then sequenced and analyzed to confirm that the 5′ end sequence belongs to the desired gene.

### Example 2

### Isolation of Genomic Clones Corresponding to a Polynucleotide

[0995] A human genomic P1 library (Genomic Systems, Inc.) is screened by PCR using primers selected for the sequence corresponding to SEQ ID NO:X according to the method described in Example 1. (See also, Sambrook.)

### Example 3

### Tissue Specific Expression Analysis

[0996] The Human Genome Sciences, Inc. (HGS) database is derived from sequencing tissue and/or disease specific cDNA libraries. Libraries generated from a particular tissue are selected and the specific tissue expression pattern of EST groups or assembled contigs within these libraries is determined by comparison of the expression patterns of those groups or contigs within the entire database. ESTs and assembled contigs which show tissue specific expression are selected.

[0997] The original clone from which the specific EST sequence was generated, or in the case of an assembled contig, the clone from which the 5′ most EST sequence was generated, is obtained from the catalogued library of clones and the insert amplified by PCR using methods known in the art. The PCR product is denatured and then transferred in 96 or 384 well format to a nylon membrane (Schleicher and Scheull) generating an array filter of tissue specific clones. Housekeeping genes, maize genes, and known tissue specific genes are included on the filters. These targets can be used in signal normalization and to validate assay sensitivity. Additional targets are included to monitor probe length and specificity of hybridization.

[0998] Radioactively labeled hybridization probes are generated by first strand cDNA synthesis per the manufacturer's instructions (Life Technologies) from mRNA/RNA samples prepared from the specific tissue being analyzed (e.g., prostate, prostate cancer, ovarian, ovarian cancer, etc.). The hybridization probes are purified by gel exclusion chromatography, quantitated, and hybridized with the array filters in hybridization bottles at 65° C. overnight. The filters are washed under stringent conditions and signals are captured using a Fuji phosphorimager.

[0999] Data is extracted using AIS software and following background subtraction, signal normalization is performed. This includes a normalization of filter-wide expression levels between different experimental runs. Genes that are differentially expressed in the tissue of interest are identified.

### Example 4

### Chromosomal Mapping of the Polynucleotides

[1000] An oligonucleotide primer set is designed according to the sequence at the 5′ end of SEQ ID NO:X. This primer preferably spans about 100 nucleotides. This primer set is then used in a polymerase chain reaction under the following set of conditions: 30 seconds, 95° C.; 1 minute, 56° C.; 1 minute, 70° C. This cycle is repeated 32 times followed by one 5 minute cycle at 70° C. Human, mouse, and hamster DNA is used as template in addition to a somatic cell hybrid panel containing individual chromosomes or chromosome fragments (Bios, Inc). The reactions are analyzed on either 8% polyacrylamide gels or 3.5% agarose gels. Chromosome mapping is determined by the presence of an approximately 100 bp PCR fragment in the particular somatic cell hybrid.

### Example 5

### Bacterial Expression of a Polypeptide

[1001] A polynucleotide encoding a polypeptide of the present invention is amplified using PCR oligonucleotide primers corresponding to the 5′ and 3′ ends of the DNA sequence, as outlined in Example 1, to synthesize insertion fragments. The primers used to amplify the cDNA insert should preferably contain restriction sites, such as BamHI and XbaI, at the 5′ end of the primers in order to clone the amplified product into the expression vector. For example, BamHI and XbaI correspond to the restriction enzyme sites on the bacterial expression vector pQE-9. (Qiagen, Inc., Chatsworth, Calif.). This plasmid vector encodes antibiotic resistance (Amp^{r}), a bacterial origin of replication (ori), an IPTG-regulatable promoter/operator (P/O), a ribosome binding site (RBS), a 6-histidine tag (6-His), and restriction enzyme cloning sites.

[1002] The pQE-9 vector is digested with BamHI and XbaI and the amplified fragment is ligated into the pQE-9 vector maintaining the reading frame initiated at the bacterial RBS. The ligation mixture is then used to transform the E. coli strain M15/rep4 (Qiagen, Inc.) which contains multiple copies of the plasmid pREP4, which expresses the lacI repressor and also confers kanamycin resistance (Kan^{r}). Transformants are identified by their ability to grow on LB plates and ampicillin/kanamycin resistant colonies are selected. Plasmid DNA is isolated and confirmed by restriction analysis.

[1003] Clones containing the desired constructs are grown overnight (O/N) in liquid culture in LB media supplemented with both Amp (100 ug/ml) and Kan (25 ug/ml). The O/N culture is used to inoculate a large culture at a ratio of 1:100 to 1:250. The cells are grown to an optical density 600 (O.D.⁶⁰⁰) of between 0.4 and 0.6. IPTG (Isopropyl-B-D-thiogalacto pyranoside) is then added to a final concentration of 1 mM. IPTG induces by inactivating the lacI repressor, clearing the P/O leading to increased gene expression.

[1004] Cells are grown for an extra 3 to 4 hours. Cells are then harvested by centrifugation (20 mins at 6000×g). The cell pellet is solubilized in the chaotropic agent 6 Molar Guanidine HCl by stirring for 3-4 hours at 4° C. The cell debris is removed by centrifugation, and the supernatant containing the polypeptide is loaded onto a nickel-nitrilo-tri-acetic acid (“Ni-NTA”) affinity resin column (available from QIAGEN, Inc., supra). Proteins with a 6×His tag bind to the Ni-NTA resin with high affinity and can be purified in a simple one-step procedure (for details see: The QIAexpressionist (1995) QIAGEN, Inc., supra).

[1005] Briefly, the supernatant is loaded onto the column in 6 M guanidine-HCl, pH 8. The column is first washed with 10 volumes of 6 M guanidine-HCl, pH 8, then washed with 10 volumes of 6 M guanidine-HCl pH 6, and finally the polypeptide is eluted with 6 M guanidine-HCl, pH 5.

[1006] The purified protein is then renatured by dialyzing it against phosphate-buffered saline (PBS) or 50 mM Na-acetate, pH 6 buffer plus 200 mM NaCl. Alternatively, the protein can be successfully refolded while immobilized on the Ni-NTA column. The recommended conditions are as follows: renature using a linear 6M-1M urea gradient in 500 mM NaCl, 20% glycerol, 20 mM Tris/HCl pH 7.4, containing protease inhibitors. The renaturation should be performed over a period of 1.5 hours or more. After renaturation the proteins are eluted by the addition of 250 mM immidazole. Immidazole is removed by a final dialyzing step against PBS or 50 mM sodium acetate pH 6 buffer plus 200 mM NaCl. The purified protein is stored at 4° C. or frozen at −80° C.

[1007] In addition to the above expression vector, the present invention further includes an expression vector, called pHE4a (ATCC Accession Number 209645, deposited on Feb. 25, 1998) which contains phage operator and promoter elements operatively linked to a polynucleotide of the present invention, called pHE4a. (ATCC Accession Number 209645, deposited on Feb. 25, 1998.) This vector contains: 1) a neomycinphosphotransferase gene as a selection marker, 2) an E. coli origin of replication, 3) a T5 phage promoter sequence, 4) two lac operator sequences, 5) a Shine-Delgarno sequence, and 6) the lactose operon repressor gene (lacIq). The origin of replication (oriC) is derived from pUC19 (LTI, Gaithersburg, Md.). The promoter and operator sequences are made synthetically.

[1008] DNA can be inserted into the pHE4a by restricting the vector with NdeI and XbaI, BamHI, XhoI, or Asp718, running the restricted product on a gel, and isolating the larger fragment (the stuffer fragment should be about 310 base pairs). The DNA insert is generated according to the PCR protocol described in Example 1, using PCR primers having restriction sites for NdeI (5′ primer) and XbaI, BamHI, XhoI, or Asp718 (3′ primer). The PCR insert is gel purified and restricted with compatible enzymes. The insert and vector are ligated according to standard protocols.

[1009] The engineered vector could easily be substituted in the above protocol to express protein in a bacterial system.

### Example 6

### Purification of a Polypeptide from an Inclusion Body

[1010] The following alternative method can be used to purify a polypeptide expressed in E coli when it is present in the form of inclusion bodies. Unless otherwise specified, all of the following steps are conducted at 4-10° C.

[1011] Upon completion of the production phase of the E. coli fermentation, the cell culture is cooled to 4-10° C. and the cells harvested by continuous centrifugation at 15,000 rpm (Heraeus Sepatech). On the basis of the expected yield of protein per unit weight of cell paste and the amount of purified protein required, an appropriate amount of cell paste, by weight, is suspended in a buffer solution containing 100 mM Tris, 50 mM EDTA, pH 7.4. The cells are dispersed to a homogeneous suspension using a high shear mixer.

[1012] The cells are then lysed by passing the solution through a microfluidizer (Microfuidics, Corp. or APV Gaulin, Inc.) twice at 4000-6000 psi. The homogenate is then mixed with NaCl solution to a final concentration of 0.5 M NaCl, followed by centrifugation at 7000×g for 15 min. The resultant pellet is washed again using 0.5M NaCl, 100 mM Tris, 50 mM EDTA, pH 7.4.

[1013] The resulting washed inclusion bodies are solubilized with 1.5 M guanidine hydrochloride (GuHCl) for 2-4 hours. After 7000×g centrifugation for 15 min., the pellet is discarded and the polypeptide containing supernatant is incubated at 4° C. overnight to allow further GuHCl extraction.

[1014] Following high speed centrifugation (30,000×g) to remove insoluble particles, the GuHCl solubilized protein is refolded by quickly mixing the GuHCl extract with 20 volumes of buffer containing 50 mM sodium, pH 4.5, 150 mM NaCl, 2 mM EDTA by vigorous stirring. The refolded diluted protein solution is kept at 4° C. without mixing for 12 hours prior to further purification steps.

[1015] To clarify the refolded polypeptide solution, a previously prepared tangential filtration unit equipped with 0.16 μm membrane filter with appropriate surface area (e.g., Filtron), equilibrated with 40 mM sodium acetate, pH 6.0 is employed. The filtered sample is loaded onto a cation exchange resin (e.g., Poros HS-50, Perseptive Biosystems). The column is washed with 40 mM sodium acetate, pH 6.0 and eluted with 250 mM, 500 mM, 1000 mM, and 1500 mM NaCl in the same buffer, in a stepwise manner. The absorbance at 280 nm of the effluent is continuously monitored. Fractions are collected and further analyzed by SDS-PAGE.

[1016] Fractions containing the polypeptide are then pooled and mixed with 4 volumes of water. The diluted sample is then loaded onto a previously prepared set of tandem columns of strong anion (Poros HQ-50, Perseptive Biosystems) and weak anion (Poros CM-20, Perseptive Biosystems) exchange resins. The columns are equilibrated with 40 mM sodium acetate, pH 6.0. Both columns are washed with 40 mM sodium acetate, pH 6.0, 200 mM NaCl. The CM-20 column is then eluted using a 10 column volume linear gradient ranging from 0.2 M NaCl, 50 mM sodium acetate, pH 6.0 to 1.0 M NaCl, 50 mM sodium acetate, pH 6.5. Fractions are collected under constant A₂₈₀ monitoring of the effluent. Fractions containing the polypeptide (determined, for instance, by 16% SDS-PAGE) are then pooled.

[1017] The resultant polypeptide should exhibit greater than 95% purity after the above refolding and purification steps. No major contaminant bands should be observed from Commassie blue stained 16% SDS-PAGE gel when 5 μg of purified protein is loaded. The purified protein can also be tested for endotoxin/LPS contamination, and typically the LPS content is less than 0.1 ng/ml according to LAL assays.

### Example 7

### Cloning and Expression of a Polypeptide in a Baculovirus Expression System

[1018] In this example, the plasmid shuttle vector pA2 is used to insert a polynucleotide into a baculovirus to express a polypeptide. This expression vector contains the strong polyhedrin promoter of the Autographa californica nuclear polyhedrosis virus (AcMNPV) followed by convenient restriction sites such as BamHI, Xba I and Asp718. The polyadenylation site of the simian virus 40 (“SV40”) is used for efficient polyadenylation. For easy selection of recombinant virus, the plasmid contains the beta-galactosidase gene from E. coli under control of a weak Drosophila promoter in the same orientation, followed by the polyadenylation signal of the polyhedrin gene. The inserted genes are flanked on both sides by viral sequences for cell-mediated homologous recombination with wild-type viral DNA to generate a viable virus that express the cloned polynucleotide.

[1019] Many other baculovirus vectors can be used in place of the vector above, such as pAc373, pVL941, and pAcIM1, as one skilled in the art would readily appreciate, as long as the construct provides appropriately located signals for transcription, translation, secretion and the like, including a signal peptide and an in-frame AUG as required. Such vectors are described, for instance, in Luckow et al., Virology 170:31-39 (1989).

[1020] Specifically, the cDNA sequence contained in the deposited clone, including the AUG initiation codon, is amplified using the PCR protocol described in Example 1. If a naturally occurring signal sequence is used to produce the polypeptide of the present invention, the pA2 vector does not need a second signal peptide. Alternatively, the vector can be modified (pA2 GP) to include a baculovirus leader sequence, using the standard methods described in Summers et al., “A Manual of Methods for Baculovirus Vectors and Insect Cell Culture Procedures,” Texas Agricultural Experimental Station Bulletin No. 1555 (1987).

[1021] The amplified fragment is isolated from a 1% agarose gel using a commercially available kit (“Geneclean,” BIO 101 Inc., La Jolla, Calif.). The fragment then is digested with appropriate restriction enzymes and again purified on a 1% agarose gel.

[1022] The plasmid is digested with the corresponding restriction enzymes and optionally, can be dephosphorylated using calf intestinal phosphatase, using routine procedures known in the art. The DNA is then isolated from a 1% agarose gel using a commercially available kit (“Geneclean” BIO 101 Inc., La Jolla, Calif.).

[1023] The fragment and the dephosphorylated plasmid are ligated together with T4 DNA ligase. E. coli HB101 or other suitable E. coli hosts such as XL-1 Blue (Stratagene Cloning Systems, La Jolla, Calif.) cells are transformed with the ligation mixture and spread on culture plates. Bacteria containing the plasmid are identified by digesting DNA from individual colonies and analyzing the digestion product by gel electrophoresis. The sequence of the cloned fragment is confirmed by DNA sequencing.

[1024] Five μg of a plasmid containing the polynucleotide is co-transfected with 1.0 μg of a commercially available linearized baculovirus DNA (“BaculoGold™ baculovirus DNA, Pharmingen, San Diego, Calif.), using the lipofection method described by Felgner et al., Proc. Natl. Acad. Sci. USA 84:7413-7417 (1987). One μg of BaculoGold™ virus DNA and 5 μg of the plasmid are mixed in a sterile well of a microtiter plate containing 50 μl of serum-free Grace's medium (Life Technologies Inc., Gaithersburg, Md.). Afterwards, 10 μl Lipofectin plus 90 μl Grace's medium are added, mixed and incubated for 15 minutes at room temperature. Then the transfection mixture is added drop-wise to Sf9 insect cells (ATCC CRL 1711) seeded in a 35 mm tissue culture plate with 1 ml Grace's medium without serum. The plate is then incubated for 5 hours at 27° C. The transfection solution is then removed from the plate and 1 ml of Grace's insect medium supplemented with 10% fetal calf serum is added. Cultivation is then continued at 27° C. for four days.

[1025] After four days the supernatant is collected and a plaque assay is performed, as described by Summers and Smith, supra. An agarose gel with “Blue Gal” (Life Technologies Inc., Gaithersburg) is used to allow easy identification and isolation of gal-expressing clones, which produce blue-stained plaques. (A detailed description of a “plaque assay” of this type can also be found in the user's guide for insect cell culture and baculovirology distributed by Life Technologies Inc., Gaithersburg, page 9-10.) After appropriate incubation, blue stained plaques are picked with the tip of a micropipettor (e.g., Eppendorf). The agar containing the recombinant viruses is then resuspended in a microcentrifuge tube containing 200 μl of Grace's medium and the suspension containing the recombinant baculovirus is used to infect Sf9 cells seeded in 35 mm dishes. Four days later the supernatants of these culture dishes are harvested and then they are stored at 4° C.

[1026] To verify the expression of the polypeptide, Sf9 cells are grown in Grace's medium supplemented with 10% heat-inactivated FBS. The cells are infected with the recombinant baculovirus containing the polynucleotide at a multiplicity of infection (“MOI”) of about 2. If radiolabeled proteins are desired, 6 hours later the medium is removed and is replaced with SF900 II medium minus methionine and cysteine (available from Life Technologies Inc., Rockville, Md.). After 42 hours, 5 μCi of ³⁵S-methionine and 5 μCi ³⁵S-cysteine (available from Amersham) are added. The cells are further incubated for 16 hours and then are harvested by centrifugation. The proteins in the supernatant as well as the intracellular proteins are analyzed by SDS-PAGE followed by autoradiography (if radiolabeled).

[1027] Microsequencing of the amino acid sequence of the amino terminus of purified protein may be used to determine the amino terminal sequence of the produced protein.

### Example 8

### Expression of a Polypeptide in Mammalian Cells

[1028] The polypeptide of the present invention can be expressed in a mammalian cell. A typical mammalian expression vector contains a promoter element, which mediates the initiation of transcription of mRNA, a protein coding sequence, and signals required for the termination of transcription and polyadenylation of the transcript. Additional elements include enhancers, Kozak sequences and intervening sequences flanked by donor and acceptor sites for RNA splicing. Highly efficient transcription is achieved with the early and late promoters from SV40, the long terminal repeats (LTRs) from Retroviruses, e.g., RSV, HTLVI, HIVI and the early promoter of the cytomegalovirus (CMV). However, cellular elements can also be used (e.g., the human actin promoter).

[1029] Suitable expression vectors for use in practicing the present invention include, for example, vectors such as pSVL and pMSG (Pharmacia, Uppsala, Sweden), pRSVcat (ATCC 37152), pSV2dhfr (ATCC 37146), pBC12MI (ATCC 67109), pCMVSport 2.0, and pCMVSport 3.0. Mammalian host cells that could be used include, human Hela, 293, H9 and Jurkat cells, mouse NIH3T3 and C127 cells, Cos 1, Cos 7 and CV1, quail QC1-3 cells, mouse L cells and Chinese hamster ovary (CHO) cells.

[1030] Alternatively, the polypeptide can be expressed in stable cell lines containing the polynucleotide integrated into a chromosome. The co-transfection with a selectable marker such as DHFR, gpt, neomycin, or hygromycin allows the identification and isolation of the transfected cells.

[1031] The transfected gene can also be amplified to express large amounts of the encoded protein. The DHFR (dihydrofolate reductase) marker is useful in developing cell lines that carry several hundred or even several thousand copies of the gene of interest. (See, e.g., Alt, F. W., et al., J. Biol. Chem. 253:1357-1370 (1978); Hamlin, J. L. and Ma, C., Biochem. et Biophys. Acta, 1097:107-143 (1990); Page, M. J. and Sydenham, M. A., Biotechnology 9:64-68 (1991)). Another useful selection marker is the enzyme glutamine synthase (GS) (Murphy et al., Biochem J. 227:277-279 (1991); Bebbington et al., Bio/Technology 10:169-175 (1992). Using these markers, the mammalian cells are grown in selective medium and the cells with the highest resistance are selected. These cell lines contain the amplified gene(s) integrated into a chromosome. Chinese hamster ovary (CHO) and NSO cells are often used for the production of proteins.

[1032] Derivatives of the plasmid pSV2-dhfr (ATCC Accession No. 37146), the expression vectors pC4 (ATCC Accession No. 209646) and pC6 (ATCC Accession No. 209647) contain the strong promoter (LTR) of the Rous Sarcoma Virus (Cullen et al., Molecular and Cellular Biology, 438-447 (March, 1985)) plus a fragment of the CMV-enhancer (Boshart et al., Cell 41:521-530 (1985)). Multiple cloning sites, e.g., with the restriction enzyme cleavage sites BamHI, XbaI and Asp718, facilitate the cloning of the gene of interest. The vectors also contain the 3′ intron, the polyadenylation and termination signal of the rat preproinsulin gene, and the mouse DHFR gene under control of the SV40 early promoter.

[1033] Specifically, the plasmid pC6, for example, is digested with appropriate restriction enzymes and then dephosphorylated using calf intestinal phosphates by procedures known in the art. The vector is then isolated from a 1% agarose gel.

[1034] A polynucleotide of the present invention is amplified according to the protocol outlined in Example 1. If a naturally occurring signal sequence is used to produce the polypeptide of the present invention, the vector does not need a second signal peptide. Alternatively, if a naturally occurring signal sequence is not used, the vector can be modified to include a heterologous signal sequence. (See, e.g., International Publication No. WO 96/34891.)

[1035] The amplified fragment is isolated from a 1% agarose gel using a commercially available kit (“Geneclean,” BIO 101 Inc., La Jolla, Calif.). The fragment then is digested with appropriate restriction enzymes and again purified on a 1% agarose gel.

[1036] The amplified fragment is then digested with the same restriction enzyme and purified on a 1% agarose gel. The isolated fragment and the dephosphorylated vector are then ligated with T4 DNA ligase. E. coli HB101 or XL-1 Blue cells are then transformed and bacteria are identified that contain the fragment inserted into plasmid pC6 using, for instance, restriction enzyme analysis.

[1037] Chinese hamster ovary cells lacking an active DHFR gene is used for transfection. Five μg of the expression plasmid pC6 or pC4 is cotransfected with 0.5 μg of the plasmid pSVneo using lipofectin (Felgner et al., supra). The plasmid pSV2-neo contains a dominant selectable marker, the neo gene from Tn5 encoding an enzyme that confers resistance to a group of antibiotics including G418. The cells are seeded in alpha minus MEM supplemented with 1 mg/ml G418. After 2 days, the cells are trypsinized and seeded in hybridoma cloning plates (Greiner, Germany) in alpha minus MEM supplemented with 10, 25, or 50 ng/ml of methotrexate plus 1 mg/ml G418. After about 10-14 days single clones are trypsinized and then seeded in 6-well petri dishes or 10 ml flasks using different concentrations of methotrexate (50 nM, 100 nM, 200 nM, 400 nM, 800 nM). Clones growing at the highest concentrations of methotrexate are then transferred to new 6-well plates containing even higher concentrations of methotrexate (1 μM, 2 μM, 5 μM, 10 mM, 20 mM). The same procedure is repeated until clones are obtained which grow at a concentration of 100-200 μM. Expression of the desired gene product is analyzed, for instance, by SDS-PAGE and Western blot or by reversed phase HPLC analysis.

### Example 9

### Protein Fusions

[1038] The polypeptides of the present invention are preferably fused to other proteins. These fusion proteins can be used for a variety of applications. For example, fusion of the present polypeptides to His-tag, HA-tag, protein A, IgG domains, and maltose binding protein facilitates purification. (See Example 5; see also EP A 394,827; Traunecker, et al., Nature 331:84-86 (1988)). Similarly, fusion to IgG-1, IgG-3, and albumin increases the halflife time in vivo. Nuclear localization signals fused to the polypeptides of the present invention can target the protein to a specific subcellular localization, while covalent heterodimer or homodimers can increase or decrease the activity of a fusion protein. Fusion proteins can also create chimeric molecules having more than one function. Finally, fusion proteins can increase solubility and/or stability of the fused protein compared to the non-fused protein. All of the types of fusion proteins described above can be made by modifying the following protocol, which outlines the fusion of a polypeptide to an IgG molecule, or the protocol described in Example 5.

[1039] Briefly, the human Fc portion of the IgG molecule can be PCR amplified, using primers that span the 5′ and 3′ ends of the sequence described below. These primers also should have convenient restriction enzyme sites that will facilitate cloning into an expression vector, preferably a mammalian expression vector.

[1040] For example, if pC4 (ATCC Accession No. 209646) is used, the human Fc portion can be ligated into the BamHI cloning site. Note that the 3′ BamHI site should be destroyed. Next, the vector containing the human Fc portion is re-restricted with BamHI, linearizing the vector, and a polynucleotide of the present invention, isolated by the PCR protocol described in Example 1, is ligated into this BamHI site. Note that the polynucleotide is cloned without a stop codon, otherwise a fusion protein will not be produced.

[1041] If the naturally occurring signal sequence is used to produce the polypeptide of the present invention, pC4 does not need a second signal peptide. Alternatively, if the naturally occurring signal sequence is not used, the vector can be modified to include a heterologous signal sequence. (See, e.g., International Publication No. WO 96/34891.)

[1042] Human IgG Fc Region:

(SEQ ID NO: 1)

GGGATCCGGAGCCCAAATCTTCTGACAAAACTCACACATGCCCACCGTGC
CCAGCACCTGAATTCGAGGGTGCACCGTCAGTCTTCCTCTTCCCCCCAAA
AACCCAAGGACACCCTCATGATCTCCCGGACTCCTGAGGTCACATGCGTG
GTGGTGGACGTAAGCCACGAAGACCCTGAGGTCAAGTTCAACTGGTACGT
GGACGGCGTGGAGGTGCATAATGCCAAGACAAAGCCGCGGGAGGAGCAGT
ACAACAGCACGTACCGTGTGGTCAGCGTCCTCACCGTCCTGCACCAGGAC
TGGCTGAATGGCAAGGAGTACAAGTGCAAGGTCTCCAACAAAGCCCTCCC
AACCCCCATCGAGAAAACCATCTCCAAAGCCAAAGGGCAGCCCCGAGAAC
CACAGGTGTACACCCTGCCCCCATCCCGGGATGAGCTGACCAAGAACCAG
GTCAGCCTGACCTGCCTGGTCAAAGGCTTCTATCCAAGCGACATCGCCGT
GGAGTGGGAGAGCAATGGGCAGCCGGAGAACAACTACAAGACCACGCCTC
CCGTGCTGGACTCCGACGGCTCCTTCTTCCTCTACAGCAAGCTCACCGTG
GACAAGAGCAGGTGGCAGCAGGGGAACGTCTTCTCATGCTCCGTGATGCA
TGAGGCTCTGCACAACCACTACACGCAGAAGAGCCTCTCCCTGTCTCCGG
GTAAATGAGTGCGACGGCCGCGACTCTAGAGGAT

### Example 10

### Production of an Antibody from a Polypeptide

a) Hybridoma Technology

[1043] The antibodies of the present invention can be prepared by a variety of methods. (See, Current Protocols, Chapter 2.) As one example of such methods, cells expressing a polypeptide of the present invention are administered to an animal to induce the production of sera containing polyclonal antibodies. In a preferred method, a preparation of a polypeptide of the present invention is prepared and purified to render it substantially free of natural contaminants. Such a preparation is then introduced into an animal in order to produce polyclonal antisera of greater specific activity.

[1044] Monoclonal antibodies specific for a polypeptide of the present invention are prepared using hybridoma technology (Kohler et al., Nature 256:495 (1975); Kohler et al., Eur. J. Immunol. 6:511 (1976); Kohler et al., Eur. J. Immunol. 6:292 (1976); Hammerling et al., in: Monoclonal Antibodies and T-Cell Hybridomas, Elsevier, N.Y., pp. 563-681 (1981)). In general, an animal (preferably a mouse) is immunized with a polypeptide of the present invention or, more preferably, with a secreted polypeptide-expressing cell. Such polypeptide-expressing cells are cultured in any suitable tissue culture medium, preferably in Earle's modified Eagle's medium supplemented with 10% fetal bovine serum (inactivated at about 56° C.), and supplemented with about 10 g/l of nonessential amino acids, about 1,000 U/ml of penicillin, and about 100 μg/ml of streptomycin.

[1045] The splenocytes of such mice are extracted and fused with a suitable myeloma cell line. Any suitable myeloma cell line may be employed in accordance with the present invention; however, it is preferable to employ the parent myeloma cell line (SP2O), available from the ATCC. After fusion, the resulting hybridoma cells are selectively maintained in HAT medium, and then cloned by limiting dilution as described by Wands et al. (Gastroenterology 80:225-232 (1981)). The hybridoma cells obtained through such a selection are then assayed to identify clones which secrete antibodies capable of binding the polypeptide of the present invention.

[1046] Alternatively, additional antibodies capable of binding to a polypeptide of the present invention can be produced in a two-step procedure using anti-idiotypic antibodies. Such a method makes use of the fact that antibodies are themselves antigens, and therefore, it is possible to obtain an antibody which binds to a second antibody. In accordance with this method, protein specific antibodies are used to immunize an animal, preferably a mouse. The splenocytes of such an animal are then used to produce hybridoma cells, and the hybridoma cells are screened to identify clones which produce an antibody whose ability to bind to the polypeptide-specific antibody can be blocked by said polypeptide. Such antibodies comprise anti-idiotypic antibodies to the polypeptide-specific antibody and are used to immunize an animal to induce formation of further polypeptide-specific antibodies.

[1047] For in vivo use of antibodies in humans, an antibody is “humanized”. Such antibodies can be produced using genetic constructs derived from hybridoma cells producing the monoclonal antibodies described above. Methods for producing chimeric and humanized antibodies are known in the art and are discussed herein. (See, for review, Morrison, Science 229:1202 (1985); Oi et al., BioTechniques 4:214 (1986); Cabilly et al., U.S. Pat. No. 4,816,567; Taniguchi et al., EP 171496; Morrison et al., EP 173494; Neuberger et al., WO 8601533; Robinson et al., International Publication No. WO 8702671; Boulianne et al., Nature 312:643 (1984); Neuberger et al., Nature 314:268 (1985)).

b) Isolation of Antibody Fragments Directed Against a Polypeptide of the Present Invention from a Library of scFvs

[1048] Naturally occurring V-genes isolated from human PBLs are constructed into a library of antibody fragments which contain reactivities against a polypeptide of the present invention to which the donor may or may not have been exposed (see e.g., U.S. Pat. No. 5,885,793 incorporated herein by reference in its entirety).

[1049] Rescue of the Library. A library of scFvs is constructed from the RNA of human PBLs as described in International Publication No. WO 92/01047. To rescue phage displaying antibody fragments, approximately 10⁹ E. coli harboring the phagemid are used to inoculate 50 ml of 2×TY containing 1% glucose and 100 μg/ml of ampicillin (2×TY-AMP-GLU) and grown to an O.D. of 0.8 with shaking. Five ml of this culture is used to inoculate 50 ml of 2×TY-AMP-GLU, 2×108 TU of delta gene 3 helper (M13 delta gene III, see International Publication No. WO 92/01047) are added and the culture incubated at 37° C. for 45 minutes without shaking and then at 37° C. for 45 minutes with shaking. The culture is centrifuged at 4000 r.p.m. for 10 min. and the pellet resuspended in 2 liters of 2×TY containing 100 μg/ml ampicillin and 50 ug/ml kanamycin and grown overnight. Phage are prepared as described in International Publication No. WO 92/01047.

[1050] M13 delta gene III is prepared as follows: M13 delta gene III helper phage does not encode gene III protein, hence the phage(mid) displaying antibody fragments have a greater avidity of binding to antigen. Infectious M13 delta gene III particles are made by growing the helper phage in cells harboring a pUC19 derivative supplying the wild type gene III protein during phage morphogenesis. The culture is incubated for 1 hour at 37° C. without shaking and then for a further hour at 37° C. with shaking. Cells are spun down (IEC-Centra 8,400 r.p.m. for 10 min), resuspended in 300 ml 2×TY broth containing 100 μg ampicillin/ml and 25 μg kanamycin/ml (2×TY-AMP-KAN) and grown overnight, shaking at 37° C. Phage particles are purified and concentrated from the culture medium by two PEG-precipitations (Sambrook et al., 1990), resuspended in 2 ml PBS and passed through a 0.45 μm filter (Minisart NML; Sartorius) to give a final concentration of approximately 10¹³ transducing units/ml (ampicillin-resistant clones).

[1051] Panning of the Library. Immunotubes (Nunc) are coated overnight in PBS with 4 ml of either 100 μg/ml or 10 μg/ml of a polypeptide of the present invention. Tubes are blocked with 2% Marvel-PBS for 2 hours at 37° C. and then washed 3 times in PBS. Approximately 10¹³ TU of phage is applied to the tube and incubated for 30 minutes at room temperature tumbling on an over and under turntable and then left to stand for another 1.5 hours. Tubes are washed 10 times with PBS 0.1% Tween-20 and 10 times with PBS. Phage are eluted by adding 1 ml of 100 mM triethylamine and rotating 15 minutes on an under and over turntable after which the solution is immediately neutralized with 0.5 ml of 1.0M Tris-HCl, pH 7.4. Phage are then used to infect 10 ml of mid-log E. coli TG1 by incubating eluted phage with bacteria for 30 minutes at 37° C. The E. coli are then plated on TYE plates containing 1% glucose and 100 μg/ml ampicillin. The resulting bacterial library is then rescued with delta gene 3 helper phage as described above to prepare phage for a subsequent round of selection. This process is then repeated for a total of 4 rounds of affinity purification with tube-washing increased to 20 times with PBS, 0.1% Tween-20 and 20 times with PBS for rounds 3 and 4.

[1052] Characterization of Binders. Eluted phage from the 3rd and 4th rounds of selection are used to infect E. coli HB 2151 and soluble scFv is produced (Marks, et al., 1991) from single colonies for assay. ELISAs are performed with microtitre plates coated with either 10 pg/ml of the polypeptide of the present invention in 50 mM bicarbonate pH 9.6. Clones positive in ELISA are further characterized by PCR fingerprinting (see, e.g., International Publication No. WO 92/01047) and then by sequencing. These ELISA positive clones may also be further characterized by techniques known in the art, such as, for example, epitope mapping, binding affinity, receptor signal transduction, ability to block or competitively inhibit antibody/antigen binding, and competitive agonistic or antagonistic activity.

### Example 11

### Method of Determining Alterations in a Gene Corresponding to a Polynucleotide

[1053] RNA isolated from entire families or individual patients presenting with a phenotype of interest (such as a disease) is isolated. cDNA is then generated from these RNA samples using protocols known in the art. (See, Sambrook.) The cDNA is then used as a template for PCR, employing primers surrounding regions of interest in SEQ ID NO:X; and/or the nucleotide sequence of the cDNA contained in ATCC Deposit No:Z. Suggested PCR conditions consist of 35 cycles at 95 degrees C. for 30 seconds; 60-120 seconds at 52-58 degrees C.; and 60-120 seconds at 70 degrees C., using buffer solutions described in Sidransky et al., Science 252:706 (1991).

[1054] PCR products are then sequenced using primers labeled at their 5′ end with T4 polynucleotide kinase, employing SequiTherm Polymerase (Epicentre Technologies). The intron-exon boundaries of selected exons is also determined and genomic PCR products analyzed to confirm the results. PCR products harboring suspected mutations are then cloned and sequenced to validate the results of the direct sequencing.

[1055] PCR products are cloned into T-tailed vectors as described in Holton et al., Nucleic Acids Research, 19:1156 (1991) and sequenced with T7 polymerase (United States Biochemical). Affected individuals are identified by mutations not present in unaffected individuals.

[1056] Genomic rearrangements are also observed as a method of determining alterations in a gene corresponding to a polynucleotide. Genomic clones isolated according to Example 2 are nick-translated with digoxigenindeoxy-uridine 5′-triphosphate (Boehringer Manheim), and FISH performed as described in Johnson et al., Methods Cell Biol. 35:73-99 (1991). Hybridization with the labeled probe is carried out using a vast excess of human cot-1 DNA for specific hybridization to the corresponding genomic locus.

[1057] Chromosomes are counterstained with 4,6-diamino-2-phenylidole and propidium iodide, producing a combination of C- and R-bands. Aligned images for precise mapping are obtained using a triple-band filter set (Chroma Technology, Brattleboro, Vt.) in combination with a cooled charge-coupled device camera (Photometrics, Tucson, Ariz.) and variable excitation wavelength filters. (Johnson et al., Genet. Anal. Tech. Appl., 8:75 (1991)). Image collection, analysis and chromosomal fractional length measurements are performed using the ISee Graphical Program System. (Inovision Corporation, Durham, N.C.) Chromosome alterations of the genomic region hybridized by the probe are identified as insertions, deletions, and translocations. These alterations are used as a diagnostic marker for an associated disease.

### Example 12

### Method of Detecting Abnormal Levels of a Polypeptide in a Biological Sample

[1058] A polypeptide of the present invention can be detected in a biological sample, and if an increased or decreased level of the polypeptide is detected, this polypeptide is a marker for a particular phenotype. Methods of detection are numerous, and thus, it is understood that one skilled in the art can modify the following assay to fit their particular needs.

[1059] For example, antibody-sandwich ELISAs are used to detect polypeptides in a sample, preferably a biological sample. Wells of a microtiter plate are coated with specific antibodies, at a final concentration of 0.2 to 10 ug/ml. The antibodies are either monoclonal or polyclonal and are produced by the method described in Example 10. The wells are blocked so that non-specific binding of the polypeptide to the well is reduced.

[1060] The coated wells are then incubated for >2 hours at RT with a sample containing the polypeptide. Preferably, serial dilutions of the sample should be used to validate results. The plates are then washed three times with deionized or distilled water to remove unbound polypeptide.

[1061] Next, 50 ul of specific antibody-alkaline phosphatase conjugate, at a concentration of 25-400 ng, is added and incubated for 2 hours at room temperature. The plates are again washed three times with deionized or distilled water to remove unbound conjugate.

[1062] Add 75 ul of 4-methylumbelliferyl phosphate (MUP) or p-nitrophenyl phosphate (NPP) substrate solution to each well and incubate 1 hour at room temperature. Measure the reaction by a microtiter plate reader. Prepare a standard curve, using serial dilutions of a control sample, and plot polypeptide concentration on the X-axis (log scale) and fluorescence or absorbance of the Y-axis (linear scale). Interpolate the concentration of the polypeptide in the sample using the standard curve.

### Example 13

### Formulation

[1063] The invention also provides methods of treatment and/or prevention of diseases or disorders (such as, for example, any one or more of the diseases or disorders disclosed herein) by administration to a subject of an effective amount of a Therapeutic. By therapeutic is meant polynucleotides or polypeptides of the invention (including fragments and variants), agonists or antagonists thereof, and/or antibodies thereto, in combination with a pharmaceutically acceptable carrier type (e.g., a sterile carrier).

[1064] The Therapeutic will be formulated and dosed in a fashion consistent with good medical practice, taking into account the clinical condition of the individual patient (especially the side effects of treatment with the Therapeutic alone), the site of delivery, the method of administration, the scheduling of administration, and other factors known to practitioners. The “effective amount” for purposes herein is thus determined by such considerations.

[1065] As a general proposition, the total pharmaceutically effective amount of the Therapeutic administered parenterally per dose will be in the range of about 1 ug/kg/day to 10 mg/kg/day of patient body weight, although, as noted above, this will be subject to therapeutic discretion. More preferably, this dose is at least 0.01 mg/kg/day, and most preferably for humans between about 0.01 and 1 mg/kg/day for the hormone. If given continuously, the Therapeutic is typically administered at a dose rate of about 1 ug/kg/hour to about 50 ug/kg/hour, either by 1-4 injections per day or by continuous subcutaneous infusions, for example, using a mini-pump. An intravenous bag solution may also be employed. The length of treatment needed to observe changes and the interval following treatment for responses to occur appears to vary depending on the desired effect.

[1066] Therapeutics can be are administered orally, rectally, parenterally, intracistemally, intravaginally, intraperitoneally, topically (as by powders, ointments, gels, drops or transdermal patch), bucally, or as an oral or nasal spray. “Pharmaceutically acceptable carrier” refers to a non-toxic solid, semisolid or liquid filler, diluent, encapsulating material or formulation auxiliary of any. The term “parenteral” as used herein refers to modes of administration which include intravenous, intramuscular, intraperitoneal, intrasternal, subcutaneous and intraarticular injection and infusion.

[1067] Therapeutics of the invention are also suitably administered by sustained-release systems. Suitable examples of sustained-release Therapeutics are administered orally, rectally, parenterally, intracistemally, intravaginally, intraperitoneally, topically (as by powders, ointments, gels, drops or transdermal patch), bucally, or as an oral or nasal spray. “Pharmaceutically acceptable carrier” refers to a non-toxic solid, semisolid or liquid filler, diluent, encapsulating material or formulation auxiliary of any type. The term “parenteral” as used herein refers to modes of administration which include intravenous, intramuscular, intraperitoneal, intrasternal, subcutaneous and intraarticular injection and infusion.

[1068] Therapeutics of the invention are also suitably administered by sustained-release systems. Suitable examples of sustained-release Therapeutics include suitable polymeric materials (such as, for example, semi-permeable polymer matrices in the form of shaped articles, e.g., films, or mirocapsules), suitable hydrophobic materials (for example as an emulsion in an acceptable oil) or ion exchange resins, and sparingly soluble derivatives (such as, for example, a sparingly soluble salt).

[1069] Sustained-release matrices include polylactides (U.S. Pat. No. 3,773,919, EP 58,481), copolymers of L-glutamic acid and gamma-ethyl-L-glutamate (Sidman et al., Biopolymers 22:547-556 (1983)), poly(2-hydroxyethyl methacrylate) (Langer et al., J. Biomed. Mater. Res. 15:167-277 (1981), and Langer, Chem. Tech. 12:98-105 (1982)), ethylene vinyl acetate (Langer et al., Id.) or poly-D-(−)-3-hydroxybutyric acid (EP 133,988).

[1070] In a preferred embodiment, polypeptide, polynucleotide, and antibody compositions of the invention are formulated in a biodegradable, polymeric drug delivery system, for example as described in U.S. Pat. Nos. 4,938,763; 5,278,201; 5,278,202; 5,324,519; 5,340,849; and 5,487,897 and in International Publication Numbers WO01/35929, WO00/24374, and WO00/06117 which are hereby incorporated by reference in their entirety. In specific preferred embodiments the polypeptide, polynucleotide, and antibody compositions of the invention are formulated using the ATRIGEL® Biodegradable System of Atrix Laboratories, Inc. (Fort Collins, Colorado).

[1071] Examples of biodegradable polymers which can be used in the formulation of polypeptide, polynucleotide, and antibody compositions, include but are not limited to, polylactides, polyglycolides, polycaprolactones, polyanhydrides, polyamides, polyurethanes, polyesteramides, polyorthoesters, polydioxanones, polyacetals, polyketals, polycarbonates, polyorthocarbonates, polyphosphazenes, polyhydroxybutyrates, polyhydroxyvalerates, polyalkylene oxalates, polyalkylene succinates, poly(malic acid), poly(amino acids), poly(methyl vinyl ether), poly(maleic anhydride), polyvinylpyrrolidone, polyethylene glycol, polyhydroxycellulose, chitin, chitosan, and copolymers, terpolymers, or combinations or mixtures of the above materials. The preferred polymers are those that have a lower degree of crystallization and are more hydrophobic. These polymers and copolymers are more soluble in the biocompatible solvents than the highly crystalline polymers such as polyglycolide and chitin which also have a high degree of hydrogen-bonding. Preferred materials with the desired solubility parameters are the polylactides, polycaprolactones, and copolymers of these with glycolide in which there are more amorphous regions to enhance solubility. In specific preferred embodiments, the biodegradable polymers which can be used in the formulation of polypeptide, polynucleotide, and antibody compositions are poly(lactide-co-glycolides). Polymer properties such as molecular weight, hydrophobicity, and lactide/glycolide ratio may be modified to obtain the desired polypeptide, polynucleotide, or antibody release profile (See, e.g., Ravivarapu et al., Journal of Pharmaceutical Sciences 89:732-741 (2000), which is hereby incorporated by reference in its entirety).

[1072] It is also preferred that the solvent for the biodegradable polymer be non-toxic, water miscible, and otherwise biocompatible. Examples of such solvents include, but are not limited to, N-methyl-2-pyrrolidone, 2-pyrrolidone, C2 to C6 alkanols, C1 to C15 alchohols, dils, triols, and tetraols such as ethanol, glycerine propylene glycol, butanol; C3 to C15 alkyl ketones such as acetone, diethyl ketone and methyl ethyl ketone; C3 to C15 esters such as methyl acetate, ethyl acetate, ethyl lactate; alkyl ketones such as methyl ethyl ketone, C1 to C15 amides such as dimethylformamide, dimethylacetamide and caprolactam; C3 to C20 ethers such as tetrahydrofuran, or solketal; tweens, triacetin, propylene carbonate, decylmethylsulfoxide, dimethyl sulfoxide, oleic acid, 1-dodecylazacycloheptan-2-one, Other preferred solvents are benzyl alchohol, benzyl benzoate, dipropylene glycol, tributyrin, ethyl oleate, glycerin, glycofural, isopropyl myristate, isopropyl palmitate, oleic acid, polyethylene glycol, propylene carbonate, and triethyl citrate. The most preferred solvents are N-methyl-2-pyrrolidone, 2-pyrrolidone, dimethyl sulfoxide, triacetin, and propylene carbonate because of the solvating ability and their compatibility.

[1073] Additionally, formulations comprising polypeptide, polynucleotide, and antibody compositions and a biodegradable polymer may also include release-rate modification agents and/or pore-forming agents. Examples of release-rate modification agents include, but are not limited to, fatty acids, triglycerides, other like hydrophobic compounds, organic solvents, plasticizing compounds and hydrophilic compounds. Suitable release rate modification agents include, for example, esters of mono-, di-, and tricarboxylic acids, such as 2-ethoxyethyl acetate, methyl acetate, ethyl acetate, diethyl phthalate, dimethyl phthalate, dibutyl phthalate, dimethyl adipate, dimethyl succinate, dimethyl oxalate, dimethyl citrate, triethyl citrate, acetyl tributyl citrate, acetyl triethyl citrate, glycerol triacetate, di(n-butyl)sebecate, and the like; polyhydroxy alcohols, such as propylene glycol, polyethylene glycol, glycerin, sorbitol, and the like; fatty acids; triesters of glycerol, such as triglycerides, epoxidized soybean oil, and other epoxidized vegetable oils; sterols, such as cholesterol; alcohols, such as C.sub.6-C.sub.12 alkanols, 2-ethoxyethanol. The release rate modification agent may be used singly or in combination with other such agents. Suitable combinations of release rate modification agents include, but are not limited to, glycerin/propylene glycol, sorbitol/glycerine, ethylene oxide/propylene oxide, butylene glycol/adipic acid, and the like. Preferred release rate modification agents include, but are not limited to, dimethyl citrate, triethyl citrate, ethyl heptanoate, glycerin, and hexanediol. Suitable pore-forming agents that may be used in the polymer composition include, but are not limited to, sugars such as sucrose and dextrose, salts such as sodium chloride and sodium carbonate, polymers such as hydroxylpropylcellulose, carboxymethylcellulose, polyethylene glycol, and polyvinylpyrrolidone. Solid crystals that will provide a defined pore size, such as salt or sugar, are preferred.

[1074] In specific preferred embodiments the polypeptide, polynucleotide, and antibody compositions of the invention are formulated using the BEMA™ BioErodible Mucoadhesive System, MCA™ MucoCutaneous Absorption System, SMP™ Solvent MicroParticle System, or BCP™ BioCompatible Polymer System of Atrix Laboratories, Inc. (Fort Collins, Colorado).

[1075] Sustained-release Therapeutics also include liposomally entrapped Therapeutics of the invention (see generally, Langer, Science 249:1527-1533 (1990); Treat et al., in Liposomes in the Therapy of Infectious Disease and Cancer, Lopez-Berestein and Fidler (eds.), Liss, New York, pp. 317-327 and 353-365 (1989)). Liposomes containing the Therapeutic are prepared by methods known per se: DE 3,218,121; Epstein et al., Proc. Natl. Acad. Sci. (USA) 82:3688-3692 (1985); Hwang et al., Proc. Natl. Acad. Sci. (USA) 77:4030-4034 (1980); EP 52,322; EP 36,676; EP 88,046; EP 143,949; EP 142,641; Japanese Pat. Appl. 83-118008; U.S. Pat. Nos. 4,485,045 and 4,544,545; and EP 102,324. Ordinarily, the liposomes are of the small (about 200-800 Angstroms) unilamellar type in which the lipid content is greater than about 30 mol. percent cholesterol, the selected proportion being adjusted for the optimal Therapeutic.

[1076] In yet an additional embodiment, the Therapeutics of the invention are delivered by way of a pump (see Langer, supra; Sefton, CRC Crit. Ref. Biomed. Eng. 14:201 (1987); Buchwald et al., Surgery 88:507 (1980); Saudek et al., N. Engl. J. Med. 321:574 (1989)).

[1077] Other controlled release systems are discussed in the review by Langer (Science 249:1527-1533 (1990)).

[1078] For parenteral administration, in one embodiment, the Therapeutic is formulated generally by mixing it at the desired degree of purity, in a unit dosage injectable form (solution, suspension, or emulsion), with a pharmaceutically acceptable carrier, i.e., one that is non-toxic to recipients at the dosages and concentrations employed and is compatible with other ingredients of the formulation. For example, the formulation preferably does not include oxidizing agents and other compounds that are known to be deleterious to the Therapeutic.

[1079] Generally, the formulations are prepared by contacting the Therapeutic uniformly and intimately with liquid carriers or finely divided solid carriers or both. Then, if necessary, the product is shaped into the desired formulation. Preferably the carrier is a parenteral carrier, more preferably a solution that is isotonic with the blood of the recipient. Examples of such carrier vehicles include water, saline, Ringer's solution, and dextrose solution. Non-aqueous vehicles such as fixed oils and ethyl oleate are also useful herein, as well as liposomes.

[1080] The carrier suitably contains minor amounts of additives such as substances that enhance isotonicity and chemical stability. Such materials are non-toxic to recipients at the dosages and concentrations employed, and include buffers such as phosphate, citrate, succinate, acetic acid, and other organic acids or their salts; antioxidants such as ascorbic acid; low molecular weight (less than about ten residues) polypeptides, e.g., polyarginine or tripeptides; proteins, such as serum albumin, gelatin, or immunoglobulins; hydrophilic polymers such as polyvinylpyrrolidone; amino acids, such as glycine, glutamic acid, aspartic acid, or arginine; monosaccharides, disaccharides, and other carbohydrates including cellulose or its derivatives, glucose, manose, or dextrins; chelating agents such as EDTA; sugar alcohols such as mannitol or sorbitol; counterions such as sodium; and/or nonionic surfactants such as polysorbates, poloxamers, or PEG.

[1081] The Therapeutic is typically formulated in such vehicles at a concentration of about 0.1 mg/ml to 100 mg/ml, preferably 1-10 mg/ml, at a pH of about 3 to 8. It will be understood that the use of certain of the foregoing excipients, carriers, or stabilizers will result in the formation of polypeptide salts.

[1082] Any pharmaceutical used for therapeutic administration can be sterile. Sterility is readily accomplished by filtration through sterile filtration membranes (e.g., 0.2 micron membranes). Therapeutics generally are placed into a container having a sterile access port, for example, an intravenous solution bag or vial having a stopper pierceable by a hypodermic injection needle.

[1083] Therapeutics ordinarily will be stored in unit or multi-dose containers, for example, sealed ampoules or vials, as an aqueous solution or as a lyophilized formulation for reconstitution. As an example of a lyophilized formulation, 10-ml vials are filled with 5 ml of sterile-filtered 1% (w/v) aqueous Therapeutic solution, and the resulting mixture is lyophilized. The infusion solution is prepared by reconstituting the lyophilized Therapeutic using bacteriostatic Water-for-Injection.

[1084] The invention also provides a pharmaceutical pack or kit comprising one or more containers filled with one or more of the ingredients of the Therapeutics of the invention. Associated with such container(s) can be a notice in the form prescribed by a governmental agency regulating the manufacture, use or sale of pharmaceuticals or biological products, which notice reflects approval by the agency of manufacture, use or sale for human administration. In addition, the Therapeutics may be employed in conjunction with other therapeutic compounds.

[1085] The Therapeutics of the invention may be administered alone or in combination with adjuvants. Adjuvants that may be administered with the Therapeutics of the invention include, but are not limited to, alum, alum plus deoxycholate (ImmunoAg), MTP-PE (Biocine Corp.), QS21 (Genentech, Inc.), BCG (e.g., THERACYS®), MPL and nonviable prepartions of Corynebacterium parvum. In a specific embodiment, Therapeutics of the invention are administered in combination with alum. In another specific embodiment, Therapeutics of the invention are administered in combination with QS-21. Further adjuvants that may be administered with the Therapeutics of the invention include, but are not limited to, Monophosphoryl lipid immunomodulator, AdjuVax 100a, QS-21, QS-18, CRL1005, Aluminum salts, MF-59, and Virosomal adjuvant technology. Vaccines that may be administered with the Therapeutics of the invention include, but are not limited to, vaccines directed toward protection against MMR (measles, mumps, rubella), polio, varicella, tetanus/diptheria, hepatitis A, hepatitis B, haemophilus influenzae B, whooping cough, pneumonia, influenza, Lyme's Disease, rotavirus, cholera, yellow fever, Japanese encephalitis, poliomyelitis, rabies, typhoid fever, and pertussis. Combinations may be administered either concomitantly, e.g., as an admixture, separately but simultaneously or concurrently; or sequentially. This includes presentations in which the combined agents are administered together as a therapeutic mixture, and also procedures in which the combined agents are administered separately but simultaneously, e.g., as through separate intravenous lines into the same individual. Administration “in combination” further includes the separate administration of one of the compounds or agents given first, followed by the second.

[1086] The Therapeutics of the invention may be administered alone or in combination with other therapeutic agents. Therapeutic agents that may be administered in combination with the Therapeutics of the invention, include but not limited to, chemotherapeutic agents, antibiotics, steroidal and non-steroidal anti-inflammatories, conventional immunotherapeutic agents, and/or therapeutic treatments described below. Combinations may be administered either concomitantly, e.g., as an admixture, separately but simultaneously or concurrently; or sequentially. This includes presentations in which the combined agents are administered together as a therapeutic mixture, and also procedures in which the combined agents are administered separately but simultaneously, e.g., as through separate intravenous lines into the same individual. Administration “in combination” further includes the separate administration of one of the compounds or agents given first, followed by the second.

[1087] In one embodiment, the Therapeutics of the invention are administered in combination with an anticoagulant. Anticoagulants that may be administered with the compositions of the invention include, but are not limited to, heparin, low molecular weight heparin, warfarin sodium (e.g., COUMADIN®), dicumarol, 4-hydroxycoumarin, anisindione (e.g., MIRADON™), acenocoumarol (e.g., nicoumalone, SINTHROME™), indan-1,3-dione, phenprocoumon (e.g., MARCUMAR™), ethyl biscoumacetate (e.g., TROMEXAN™), and aspirin. In a specific embodiment, compositions of the invention are administered in combination with heparin and/or warfarin. In another specific embodiment, compositions of the invention are administered in combination with warfarin. In another specific embodiment, compositions of the invention are administered in combination with warfarin and aspirin. In another specific embodiment, compositions of the invention are administered in combination with heparin. In another specific embodiment, compositions of the invention are administered in combination with heparin and aspirin.

[1088] In another embodiment, the Therapeutics of the invention are administered in combination with thrombolytic drugs. Thrombolytic drugs that may be administered with the compositions of the invention include, but are not limited to, plasminogen, lys-plasminogen, alpha2-antiplasmin, streptokinae (e.g., KABIKINASE™), antiresplace (e.g., EMINASE™), tissue plasminogen activator (t-PA, altevase, ACTIVASE™), urokinase (e.g., ABBOKINASE™), sauruplase, (Prourokinase, single chain urokinase), and aminocaproic acid (e.g., AMICAR™). In a specific embodiment, compositions of the invention are administered in combination with tissue plasminogen activator and aspirin.

[1089] In another embodiment, the Therapeutics of the invention are administered in combination with antiplatelet drugs. Antiplatelet drugs that may be administered with the compositions of the invention include, but are not limited to, aspirin, dipyridamole (e.g., PERSANTINE™), and ticlopidine (e.g., TICLID™).

[1090] In specific embodiments, the use of anti-coagulants, thrombolytic and/or antiplatelet drugs in combination with Therapeutics of the invention is contemplated for the prevention, diagnosis, and/or treatment of thrombosis, arterial thrombosis, venous thrombosis, thromboembolism, pulmonary embolism, atherosclerosis, myocardial infarction, transient ischemic attack, unstable angina. In specific embodiments, the use of anticoagulants, thrombolytic drugs and/or antiplatelet drugs in combination with Therapeutics of the invention is contemplated for the prevention of occulsion of saphenous grafts, for reducing the risk of periprocedural thrombosis as might accompany angioplasty procedures, for reducing the risk of stroke in patients with atrial fibrillation including nonrheumatic atrial fibrillation, for reducing the risk of embolism associated with mechanical heart valves and or mitral valves disease. Other uses for the therapeutics of the invention, alone or in combination with antiplatelet, anticoagulant, and/or thrombolytic drugs, include, but are not limited to, the prevention of occlusions in extracorporeal devices (e.g., intravascular canulas, vascular access shunts in hemodialysis patients, hemodialysis machines, and cardiopulmonary bypass machines).

[1091] In certain embodiments, Therapeutics of the invention are administered in combination with antiretroviral agents, nucleoside/nucleotide reverse transcriptase inhibitors (NRTIs), non-nucleoside reverse transcriptase inhibitors (NNRTIs), and/or protease inhibitors (PIs). NRTIs that may be administered in combination with the Therapeutics of the invention, include, but are not limited to, RETROVIR™ (zidovudine/AZT), VIDEX™ (didanosine/ddI), HIVID™ (zalcitabine/ddC), ZERIT™ (stavudine/d4T), EPIVIR™ (lamivudine/3TC), and COMBIVIR™ (zidovudine/lamivudine). NNRTIs that may be administered in combination with the Therapeutics of the invention, include, but are not limited to, VIRAMUNE™ (nevirapine), RESCRIPTOR™ (delavirdine), and SUSTIVA™ (efavirenz). Protease inhibitors that may be administered in combination with the Therapeutics of the invention, include, but are not limited to, CRIXIVAN™ (indinavir), NORVIR™ (ritonavir), INVIRSE™ (saquinavir), and VIRACEPT™ (nelfinavir). In a specific embodiment, antiretroviral agents, nucleoside reverse transcriptase inhibitors, non-nucleoside reverse transcriptase inhibitors, and/or protease inhibitors may be used in any combination with Therapeutics of the invention to treat AIDS and/or to prevent or treat HIV infection.

[1092] Additional NRTIs include LODENOSINE™ (F-ddA; an acid-stable adenosine NRTI; Triangle/Abbott; COVIRACIL™ (emtricitabine/FTC; structurally related to lamivudine (3TC) but with 3- to 10-fold greater activity in vitro; Triangle/Abbott); dOTC (BCH-10652, also structurally related to lamivudine but retains activity against a substantial proportion of lamivudine-resistant isolates; Biochem Pharma); Adefovir (refused approval for anti-HIV therapy by FDA; Gilead Sciences); PREVEON® (Adefovir Dipivoxil, the active prodrug of adefovir; its active form is PMEA-pp); TENOFOVIR™ (bis-POC PMPA, a PMPA prodrug; Gilead); DAPD/DXG (active metabolite of DAPD; Triangle/Abbott); D-D4FC (related to 3TC, with activity against AZT/3TC-resistant virus); GW420867X (Glaxo Wellcome); ZIAGEN™ (abacavir/159U89; Glaxo Wellcome Inc.); CS-87 (3′azido-2′,3′-dideoxyuridine; WO 99/66936); and S-acyl-2-thioethyl (SATE)-bearing prodrug forms of β-L-FD4C and β-L-FddC (WO 98/17281).

[1093] Additional NNRTIs include COACTINON™ (Emivirine/MKC-442, potent NNRTI of the HEPT class; Triangle/Abbott); CAPRAVIRINE™ (AG-1549/S-1153, a next generation NNRTI with activity against viruses containing the K103N mutation; Agouron); PNU-142721 (has 20- to 50-fold greater activity than its predecessor delavirdine and is active against K103N mutants; Pharmacia & Upjohn); DPC-961 and DPC-963 (second-generation derivatives of efavirenz, designed to be active against viruses with the K103N mutation; DuPont); GW-420867X (has 25-fold greater activity than HBY097 and is active against K103N mutants; Glaxo Wellcome); CALANOLIDE A (naturally occurring agent from the latex tree; active against viruses containing either or both the Y181C and K103N mutations); and Propolis (WO 99/49830).

[1094] Additional protease inhibitors include LOPINAVIR™ (ABT378/r; Abbott Laboratories); BMS-232632 (an azapeptide; Bristol-Myres Squibb); TIPRANAVIR™ (PNU-140690, a non-peptic dihydropyrone; Pharmacia & Upjohn); PD-178390, (a nonpeptidic dihydropyrone; Parke-Davis); BMS 232632 (an azapeptide; Bristol-Myers Squibb); L-756,423 (an indinavir analog; Merck); DMP-450 (a cyclic urea compound; Avid & DuPont); AG-1776 (a peptidomimetic with in vitro activity against protease inhibitor-resistant viruses; Agouron); VX-175/GW-433908 (phosphate prodrug of amprenavir; Vertex & Glaxo Welcome); CGP61755 (Ciba); and AGENERASE™ (amprenavir; Glaxo Wellcome Inc.).

[1095] Additional antiretroviral agents include fusion inhibitors/gp41 binders. Fusion inhibitors/gp41 binders include T-20 (a peptide from residues 643-678 of the HIV gp41 transmembrane protein ectodomain which binds to gp41 in its resting state and prevents transformation to the fusogenic state; Trimeris) and T-1249 (a second-generation fusion inhibitor; Trimeris).

[1096] Additional antiretroviral agents include fusion inhibitors/chemokine receptor antagonists. Fusion inhibitors/chemokine receptor antagonists include CXCR4 antagonists such as AMD 3100 (a bicyclam), SDF-1 and its analogs, and ALX40-4C (a cationic peptide), T22 (an 18 amino acid peptide; Trimeris) and the T22 analogs T134 and T140; CCR5 antagonists such as RANTES (9-68), AOP-RANTES, NNY-RANTES, and TAK-779; and CCR5/CXCR4 antagonists such as NSC 651016 (a distamycin analog). Also included are CCR2B, CCR3, and CCR6 antagonists. Chemokine recpetor agonists such as RANTES, SDF-1, MIP-1α, MIP-1β, etc., may also inhibit fusion.

[1097] Additional antiretroviral agents include integrase inhibitors. Integrase inhibitors include dicaffeoylquinic (DFQA) acids; L-chicoric acid (a dicaffeoyltartaric (DCTA) acid); quinalizarin (QLC) and related anthraquinones; ZINTEVIR™ (AR 177, an oligonucleotide that probably acts at cell surface rather than being a true integrase inhibitor; Arondex); and naphthols such as those disclosed in WO 98/50347.

[1098] Additional antiretroviral agents include hydroxyurea-like compunds such as BCX-34 (a purine nucleoside phosphorylase inhibitor; Biocryst); ribonucleotide reductase inhibitors such as DIDOX™ (Molecules for Health); inosine monophosphate dehydrogenase (IMPDH) inhibitors sucha as VX-497 (Vertex); and mycopholic acids such as CellCept (mycophenolate mofetil; Roche).

[1099] Additional antiretroviral agents include inhibitors of viral integrase, inhibitors of viral genome nuclear translocation such as arylene bis(methylketone) compounds; inhibitors of HIV entry such as AOP-RANTES, NNY-RANTES, RANTES-IgG fusion protein, soluble complexes of RANTES and glycosaminoglycans (GAG), and AMD-3100; nucleocapsid zinc finger inhibitors such as dithiane compounds; targets of HIV Tat and Rev; and pharmacoenhancers such as ABT-378.

[1100] Other antiretroviral therapies and adjunct therapies include cytokines and lymphokines such as MIP-1α, MIP-1β, SDF-1α, IL-2, PROLEUKIN™ (aldesleukin/L2-7001; Chiron), IL-4, IL-10, IL-12, and IL-13; interferons such as IFN-α2a; antagonists of TNFs, NFκB, GM-CSF, M-CSF, and IL-10; agents that modulate immune activation such as cyclosporin and prednisone; vaccines such as Remune™ (HIV Immunogen), APL 400-003 (Apollon), recombinant gp120 and fragments, bivalent (B/E) recombinant envelope glycoprotein, rgp120CM235, MN rgp120, SF-2 rgp120, gp120/soluble CD4 complex, Delta JR-FL protein, branched synthetic peptide derived from discontinuous gp120 C3/C4 domain, fusion-competent immunogens, and Gag, Pol, Nef, and Tat vaccines; gene-based therapies such as genetic suppressor elements (GSEs; WO 98/54366), and intrakines (genetically modified CC chemokines targetted to the ER to block surface expression of newly synthesized CCR5 (Yang et al., PNAS 94:11567-72 (1997); Chen et al., Nat. Med. 3:1110-16 (1997)); antibodies such as the anti-CXCR4 antibody 12G5, the anti-CCR5 antibodies 2D7, 5C7, PA8, PA9, PA10, PA11, PA12, and PA14, the anti-CD4 antibodies Q4120 and RPA-T4, the anti-CCR3 antibody 7B11, the anti-gp120 antibodies 17b, 48d, 447-52D, 257-D, 268-D and 50.1, anti-Tat antibodies, anti-TNF-α antibodies, and monoclonal antibody 33A; aryl hydrocarbon (AH) receptor agonists and antagonists such as TCDD, 3,3′,4,4′,5-pentachlorobiphenyl, 3,3′,4,4′-tetrachlorobiphenyl, and α-naphthoflavone (WO 98/30213); and antioxidants such as γ-L-glutamyl-L-cysteine ethyl ester (γ-GCE; WO 99/56764).

[1101] In a further embodiment, the Therapeutics of the invention are administered in combination with an antiviral agent. Antiviral agents that may be administered with the Therapeutics of the invention include, but are not limited to, acyclovir, ribavirin, amantadine, and remantidine.

[1102] In other embodiments, Therapeutics of the invention may be administered in combination with anti-opportunistic infection agents. Anti-opportunistic agents that may be administered in combination with the Therapeutics of the invention, include, but are not limited to, TRIMETHOPRIM-SULFAMETHOXAZOLE™, DAPSONE™, PENTAMIDINE™, ATOVAQUONE™, ISONIAZID™, RIFAMPIN™, PYRAZINAMIDE™, ETHAMBUTOL™, RIFABUTIN™, CLARITHROMYCIN™, AZITHROMYCIN™, GANCICLOVIR™, FOSCARNET™, CIDOFOVIR™, FLUCONAZOLE™, ITRACONAZOLE™, KETOCONAZOLE™, ACYCLOVIR™, FAMCICOLVIR™, PYRIMETHAMINE™, LEUCOVORIN™, NEUPOGEN™ (filgrastim/G-CSF), and LEUKINE™ (sargramostim/GM-CSF). In a specific embodiment, Therapeutics of the invention are used in any combination with TRIMETHOPRIM-SULFAMETHOXAZOLE™, DAPSONE™, PENTAMIDINE™, and/or ATOVAQUONE™ to prophylactically treat or prevent an opportunistic Pneumocystis carinii pneumonia infection. In another specific embodiment, Therapeutics of the invention are used in any combination with ISONIAZID™, RIFAMPIN™, PYRAZINAMIDE™, and/or ETHAMBUTOL™ to prophylactically treat or prevent an opportunistic Mycobacterium avium complex infection. In another specific embodiment, Therapeutics of the invention are used in any combination with RIFABUTIN™, CLARITHROMYCIN™, and/or AZITHROMYCIN™ to prophylactically treat or prevent an opportunistic Mycobacterium tuberculosis infection. In another specific embodiment, Therapeutics of the invention are used in any combination with GANCICLOVIR™, FOSCARNET™, and/or CIDOFOVIR™ to prophylactically treat or prevent an opportunistic cytomegalovirus infection. In another specific embodiment, Therapeutics of the invention are used in any combination with FLUCONAZOLE™, ITRACONAZOLE™, and/or KETOCONAZOLE™ to prophylactically treat or prevent an opportunistic fungal infection. In another specific embodiment, Therapeutics of the invention are used in any combination with ACYCLOVIR™ and/or FAMCICOLVIR™ to prophylactically treat or prevent an opportunistic herpes simplex virus type I and/or type II infection. In another specific embodiment, Therapeutics of the invention are used in any combination with PYRIMETHAMINE™ and/or LEUCOVORIN™ to prophylactically treat or prevent an opportunistic Toxoplasma gondii infection. In another specific embodiment, Therapeutics of the invention are used in any combination with LEUCOVORIN™ and/or NEUPOGEN™ to prophylactically treat or prevent an opportunistic bacterial infection.

[1103] In a further embodiment, the Therapeutics of the invention are administered in combination with an antibiotic agent. Antibiotic agents that may be administered with the Therapeutics of the invention include, but are not limited to, amoxicillin, beta-lactamases, aminoglycosides, beta-lactam (glycopeptide), beta-lactamases, Clindamycin, chloramphenicol, cephalosporins, ciprofloxacin, erythromycin, fluoroquinolones, macrolides, metronidazole, penicillins, quinolones, rapamycin, rifampin, streptomycin, sulfonamide, tetracyclines, trimethoprim, trimethoprim-sulfamethoxazole, and vancomycin.

[1104] In other embodiments, the Therapeutics of the invention are administered in combination with immunestimulants. Immunostimulants that may be administered in combination with the Therapeutics of the invention include, but are not limited to, levamisole (e.g., ERGAMISOL™), isoprinosine (e.g. INOSIPLEX™), interferons (e.g. interferon alpha), and interleukins (e.g., IL-2).

[1105] In other embodiments, Therapeutics of the invention are administered in combination with immunosuppressive agents. Immunosuppressive agents that may be administered in combination with the Therapeutics of the invention include, but are not limited to, steroids, cyclosporine, cyclosporine analogs, cyclophosphamide methylprednisone, prednisone, azathioprine, FK-506, 15-deoxyspergualin, and other immunosuppressive agents that act by suppressing the function of responding T cells. Other immunosuppressive agents that may be administered in combination with the Therapeutics of the invention include, but are not limited to, prednisolone, methotrexate, thalidomide, methoxsalen, rapamycin, leflunomide, mizoribine (BREDININ™), brequinar, deoxyspergualin, and azaspirane (SKF 105685), ORTHOCLONE OKT® 3 (muromonab-CD3), SANDIMMUNE™, NEORAL™, SANGDYA™ (cyclosporine), PROGRAF® (FK506, tacrolimus), CELLCEPT® (mycophenolate motefil, of which the active metabolite is mycophenolic acid), IMURAN™ (azathioprine), glucocorticosteroids, adrenocortical steroids such as DELTASONE™ (prednisone) and HYDELTRASOL™ (prednisolone), FOLEX™ and MEXATE™ (methotrxate), OXSORALEN-ULTRA™ (methoxsalen) and RAPAMUNE™ (sirolimus). In a specific embodiment, immunosuppressants may be used to prevent rejection of organ or bone marrow transplantation.

[1106] In an additional embodiment, Therapeutics of the invention are administered alone or in combination with one or more intravenous immune globulin preparations. Intravenous immune globulin preparations that may be administered with the Therapeutics of the invention include, but not limited to, GAMMAR™, IVEEGAM™, SANDOGLOBULIN™, GAMMAGARD S/D™, ATGAM™ (antithymocyte glubulin), and GAMIMUNE™. In a specific embodiment, Therapeutics of the invention are administered in combination with intravenous immune globulin preparations in transplantation therapy (e.g., bone marrow transplant).

[1107] In certain embodiments, the Therapeutics of the invention are administered alone or in combination with an anti-inflammatory agent. Anti-inflammatory agents that may be administered with the Therapeutics of the invention include, but are not limited to, corticosteroids (e.g. betamethasone, budesonide, cortisone, dexamethasone, hydrocortisone, methylprednisolone, prednisolone, prednisone, and triamcinolone), nonsteroidal anti-inflammatory drugs (e.g., diclofenac, diflunisal, etodolac, fenoprofen, floctafenine, flurbiprofen, ibuprofen, indomethacin, ketoprofen, meclofenamate, mefenamic acid, meloxicam, nabumetone, naproxen, oxaprozin, phenylbutazone, piroxicam, sulindac, tenoxicam, tiaprofenic acid, and tolmetin.), as well as antihistamines, aminoarylcarboxylic acid derivatives, arylacetic acid derivatives, arylbutyric acid derivatives, arylcarboxylic acids, arylpropionic acid derivatives, pyrazoles, pyrazolones, salicylic acid derivatives, thiazinecarboxamides, e-acetamidocaproic acid, S-adenosylmethionine, 3-amino-4-hydroxybutyric acid, amixetrine, bendazac, benzydamine, bucolome, difenpiramide, ditazol, emorfazone, guaiazulene, nabumetone, nimesulide, orgotein, oxaceprol, paranyline, perisoxal, pifoxime, proquazone, proxazole, and tenidap.

[1108] In an additional embodiment, the compositions of the invention are administered alone or in combination with an anti-angiogenic agent. Anti-angiogenic agents that may be administered with the compositions of the invention include, but are not limited to, Angiostatin (Entremed, Rockville, Md.), Troponin-1 (Boston Life Sciences, Boston, Mass.), anti-Invasive Factor, retinoic acid and derivatives thereof, paclitaxel (Taxol), Suramin, Tissue Inhibitor of Metalloproteinase-1, Tissue Inhibitor of Metalloproteinase-2, VEGI, Plasminogen Activator Inhibitor-1, Plasminogen Activator Inhibitor-2, and various forms of the lighter “d group” transition metals.

[1109] Lighter “d group” transition metals include, for example, vanadium, molybdenum, tungsten, titanium, niobium, and tantalum species. Such transition metal species may form transition metal complexes. Suitable complexes of the above-mentioned transition metal species include oxo transition metal complexes.

[1110] Representative examples of vanadium complexes include oxo vanadium complexes such as vanadate and vanadyl complexes. Suitable vanadate complexes include metavanadate and orthovanadate complexes such as, for example, ammonium metavanadate, sodium metavanadate, and sodium orthovanadate. Suitable vanadyl complexes include, for example, vanadyl acetylacetonate and vanadyl sulfate including vanadyl sulfate hydrates such as vanadyl sulfate mono- and trihydrates.

[1111] Representative examples of tungsten and molybdenum complexes also include oxo complexes. Suitable oxo tungsten complexes include tungstate and tungsten oxide complexes. Suitable tungstate complexes include ammonium tungstate, calcium tungstate, sodium tungstate dihydrate, and tungstic acid. Suitable tungsten oxides include tungsten (IV) oxide and tungsten (VI) oxide. Suitable oxo molybdenum complexes include molybdate, molybdenum oxide, and molybdenyl complexes. Suitable molybdate complexes include ammonium molybdate and its hydrates, sodium molybdate and its hydrates, and potassium molybdate and its hydrates. Suitable molybdenum oxides include molybdenum (VI) oxide, molybdenum (VI) oxide, and molybdic acid. Suitable molybdenyl complexes include, for example, molybdenyl acetylacetonate. Other suitable tungsten and molybdenum complexes include hydroxo derivatives derived from, for example, glycerol, tartaric acid, and sugars.

[1112] A wide variety of other anti-angiogenic factors may also be utilized within the context of the present invention. Representative examples include, but are not limited to, platelet factor 4; protamine sulphate; sulphated chitin derivatives (prepared from queen crab shells), (Murata et al., Cancer Res. 51:22-26, (1991)); Sulphated Polysaccharide Peptidoglycan Complex (SP-PG) (the function of this compound may be enhanced by the presence of steroids such as estrogen, and tamoxifen citrate); Staurosporine; modulators of matrix metabolism, including for example, proline analogs, cishydroxyproline, d,L-3,4-dehydroproline, Thiaproline, alpha,alpha-dipyridyl, aminopropionitrile fumarate; 4-propyl-5-(4-pyridinyl)-2(3H)-oxazolone; Methotrexate; Mitoxantrone; Heparin; Interferons; 2 Macroglobulin-serum; ChIMP-3 (Pavloff et al., J. Bio. Chem. 267:17321-17326, (1992)); Chymostatin (Tomkinson et al., Biochem J. 286:475-480, (1992)); Cyclodextrin Tetradecasulfate; Eponemycin; Camptothecin; Fumagillin (Ingber et al., Nature 348:555-557, (1990)); Gold Sodium Thiomalate (“GST”; Matsubara and Ziff, J. Clin. Invest. 79:1440-1446, (1987)); anticollagenase-serum; alpha2-antiplasmin (Holmes et al., J. Biol. Chem. 262(4):1659-1664, (1987)); Bisantrene (National Cancer Institute); Lobenzarit disodium (N-(2)-carboxyphenyl-4-chloroanthronilic acid disodium or “CCA”; (Takeuchi et al., Agents Actions 36:312-316, (1992)); and metalloproteinase inhibitors such as BB94.

[1113] Additional anti-angiogenic factors that may also be utilized within the context of the present invention include Thalidomide, (Celgene, Warren, N.J.); Angiostatic steroid; AGM-1470 (H. Brem and J. Folkman J Pediatr. Surg. 28:445-51 (1993)); an integrin alpha v beta 3 antagonist (C. Storgard et al., J Clin. Invest. 103:47-54 (1999)); carboxynaminolmidazole; Carboxyamidotriazole (CAI) (National Cancer Institute, Bethesda, Md.); Conbretastatin A-4 (CA4P) (OXiGENE, Boston, Mass.); Squalamine (Magainin Pharmaceuticals, Plymouth Meeting, Pa.); TNP-470, (Tap Pharmaceuticals, Deerfield, Ill.); ZD-0101 AstraZeneca (London, UK); APRA (CT2584); Benefin, Byrostatin-1 (SC339555); CGP-41251 (PKC 412); CM101; Dexrazoxane (ICRF187); DMXAA; Endostatin; Flavopridiol; Genestein; GTE; ImmTher; Iressa (ZD1839); Octreotide (Somatostatin); Panretin; Penacillamine; Photopoint; PI-88; Prinomastat (AG-3340) Purlytin; Suradista (FCE26644); Tamoxifen (Nolvadex); Tazarotene; Tetrathiomolybdate; Xeloda (Capecitabine); and 5-Fluorouracil.

[1114] Anti-angiogenic agents that may be administed in combination with the compounds of the invention may work through a variety of mechanisms including, but not limited to, inhibiting proteolysis of the extracellular matrix, blocking the function of endothelial cell-extracellular matrix adhesion molecules, by antagonizing the function of angiogenesis inducers such as growth factors, and inhibiting integrin receptors expressed on proliferating endothelial cells. Examples of anti-angiogenic inhibitors that interfere with extracellular matrix proteolysis and which may be administered in combination with the compositons of the invention include, but are not lmited to, AG-3340 (Agouron, La Jolla, Calif.), BAY-12-9566 (Bayer, West Haven, Conn.), BMS-275291 (Bristol Myers Squibb, Princeton, N.J.), CGS-27032A (Novartis, East Hanover, N.J.), Marimastat (British Biotech, Oxford, UK), and Metastat (Aeterna, St-Foy, Quebec). Examples of anti-angiogenic inhibitors that act by blocking the function of endothelial cell-extracellular matrix adhesion molecules and which may be administered in combination with the compositons of the invention include, but are not lmited to, EMD-121974 (Merck KcgaA Darmstadt, Germany) and Vitaxin (Ixsys, La Jolla, Calif./Medimmune, Gaithersburg, Md.). Examples of anti-angiogenic agents that act by directly antagonizing or inhibiting angiogenesis inducers and which may be administered in combination with the compositons of the invention include, but are not lmited to, Angiozyme (Ribozyme, Boulder, Colo.), Anti-VEGF antibody (Genentech, S. San Francisco, Calif.), PTK-787/ZK-225846 (Novartis, Basel, Switzerland), SU-101 (Sugen, S. San Francisco, Calif.), SU-5416 (Sugen/Pharmacia Upjohn, Bridgewater, N.J.), and SU-6668 (Sugen). Other anti-angiogenic agents act to indirectly inhibit angiogenesis. Examples of indirect inhibitors of angiogenesis which may be administered in combination with the compositons of the invention include, but are not limited to, IM-862 (Cytran, Kirkland, Wash.), Interferon-alpha, IL-12 (Roche, Nutley, N.J.), and Pentosan polysulfate (Georgetown University, Washington, D.C.).

[1115] In particular embodiments, the use of compositions of the invention in combination with anti-angiogenic agents is contemplated for the treatment, prevention, and/or amelioration of an autoimmune disease, such as for example, an autoimmune disease described herein.

[1116] In a particular embodiment, the use of compositions of the invention in combination with anti-angiogenic agents is contemplated for the treatment, prevention, and/or amelioration of arthritis. In a more particular embodiment, the use of compositions of the invention in combination with anti-angiogenic agents is contemplated for the treatment, prevention, and/or amelioration of rheumatoid arthritis.

[1117] In another embodiment, the polynucleotides encoding a polypeptide of the present invention are administered in combination with an angiogenic protein, or polynucleotides encoding an angiogenic protein. Examples of angiogenic proteins that may be administered with the compositions of the invention include, but are not limited to, acidic and basic fibroblast growth factors, VEGF-1, VEGF-2, VEGF-3, epidermal growth factor alpha and beta, platelet-derived endothelial cell growth factor, platelet-derived growth factor, tumor necrosis factor alpha, hepatocyte growth factor, insulin-like growth factor, colony stimulating factor, macrophage colony stimulating factor, granulocyte/macrophage colony stimulating factor, and nitric oxide synthase.

[1118] In additional embodiments, compositions of the invention are administered in combination with a chemotherapeutic agent. Chemotherapeutic agents that may be administered with the Therapeutics of the invention include, but are not limited to alkylating agents such as nitrogen mustards (for example, Mechlorethamine, cyclophosphamide, Cyclophosphamide Ifosfamide, Melphalan (L-sarcolysin), and Chlorambucil), ethylenimines and methylmelamines (for example, Hexamethylmelamine and Thiotepa), alkyl sulfonates (for example, Busulfan), nitrosoureas (for example, Carmustine (BCNU), Lomustine (CCNU), Semustine (methyl-CCNU), and Streptozocin (streptozotocin)), triazenes (for example, Dacarbazine (DTIC; dimethyltriazenoimidazolecarboxamide)), folic acid analogs (for example, Methotrexate (amethopterin)), pyrimidine analogs (for example, Fluorouacil (5-fluorouracil; 5-FU), Floxuridine (fluorodeoxyuridine; FudR), and Cytarabine (cytosine arabinoside)), purine analogs and related inhibitors (for example, Mercaptopurine (6-mercaptopurine; 6-MP), Thioguanine (6-thioguanine; TG), and Pentostatin (2′-deoxycoformycin)), vinca alkaloids (for example, Vinblastine (VLB, vinblastine sulfate)) and Vincristine (vincristine sulfate)), epipodophyllotoxins (for example, Etoposide and Teniposide), antibiotics (for example, Dactinomycin (actinomycin D), Daunorubicin (daunomycin; rubidomycin), Doxorubicin, Bleomycin, Plicamycin (mithramycin), and Mitomycin (mitomycin C), enzymes (for example, L-Asparaginase), biological response modifiers (for example, Interferon-alpha and interferon-alpha-2b), platinum coordination compounds (for example, Cisplatin (cis-DDP) and Carboplatin), anthracenedione (Mitoxantrone), substituted ureas (for example, Hydroxyurea), methylhydrazine derivatives (for example, Procarbazine (N-methylhydrazine; MIH), adrenocorticosteroids (for example, Prednisone), progestins (for example, Hydroxyprogesterone caproate, Medroxyprogesterone, Medroxyprogesterone acetate, and Megestrol acetate), estrogens (for example, Diethylstilbestrol (DES), Diethylstilbestrol diphosphate, Estradiol, and Ethinyl estradiol), antiestrogens (for example, Tamoxifen), androgens (Testosterone proprionate, and Fluoxymesterone), antiandrogens (for example, Flutamide), gonadotropin-releasing horomone analogs (for example, Leuprolide), other hormones and hormone analogs (for example, methyltestosterone, estramustine, estramustine phosphate sodium, chlorotrianisene, and testolactone), and others (for example, dicarbazine, glutamic acid, and mitotane).

[1119] In one embodiment, the compositions of the invention are administered in combination with one or more of the following drugs: infliximab (also known as Remicade™ Centocor, Inc.), Trocade (Roche, RO-32-3555), Leflunomide (also known as Arava™ from Hoechst Marion Roussel), Kineret™ (an IL-1 Receptor antagonist also known as Anakinra from Amgen, Inc.)

[1120] In a specific embodiment, compositions of the invention are administered in combination with CHOP (cyclophosphamide, doxorubicin, vincristine, and prednisone) or combination of one or more of the components of CHOP. In one embodiment, the compositions of the invention are administered in combination with anti-CD20 antibodies, human monoclonal anti-CD20 antibodies. In another embodiment, the compositions of the invention are administered in combination with anti-CD20 antibodies and CHOP, or anti-CD20 antibodies and any combination of one or more of the components of CHOP, particularly cyclophosphamide and/or prednisone. In a specific embodiment, compositions of the invention are administered in combination with Rituximab. In a further embodiment, compositions of the invention are administered with Rituximab and CHOP, or Rituximab and any combination of one or more of the components of CHOP, particularly cyclophosphamide and/or prednisone. In a specific embodiment, compositions of the invention are administered in combination with tositumomab. In a further embodiment, compositions of the invention are administered with tositumomab and CHOP, or tositumomab and any combination of one or more of the components of CHOP, particularly cyclophosphamide and/or prednisone. The anti-CD20 antibodies may optionally be associated with radioisotopes, toxins or cytotoxic prodrugs.

[1121] In another specific embodiment, the compositions of the invention are administered in combination Zevalin™. In a further embodiment, compositions of the invention are administered with Zevalin™ and CHOP, or Zevalin™ and any combination of one or more of the components of CHOP, particularly cyclophosphamide and/or prednisone. Zevalin™ may be associated with one or more radisotopes. Particularly preferred isotopes are ⁹⁰Y and ¹¹¹In.

[1122] In an additional embodiment, the Therapeutics of the invention are administered in combination with cytokines. Cytokines that may be administered with the Therapeutics of the invention include, but are not limited to, IL2, IL3, IL4, IL5, IL6, IL7, IL10, IL12, IL13, IL15, anti-CD40, CD40L, IFN-gamma and TNF-alpha. In another embodiment, Therapeutics of the invention may be administered with any interleukin, including, but not limited to, IL-1alpha, IL-1beta, IL-2, IL-3, IL-4, IL-5, IL-6, IL-7, IL-8, IL-9, IL-10, IL-11, IL-12, IL-13, IL-14, IL-15, IL-16, IL-17, IL-18, IL-19, IL-20, and IL-21.

[1123] In one embodiment, the Therapeutics of the invention are administered in combination with members of the TNF family. TNF, TNF-related or TNF-like molecules that may be administered with the Therapeutics of the invention include, but are not limited to, soluble forms of TNF-alpha, lymphotoxin-alpha (LT-alpha, also known as TNF-beta), LT-beta (found in complex heterotrimer LT-alpha2-beta), OPGL, FasL, CD27L, CD30L, CD40L, 4-1BBL, DcR3, OX40L, TNF-gamma (International Publication No. WO 96/14328), AIM-I (International Publication No. WO 97/33899), endokine-alpha (International Publication No. WO 98/07880), OPG, and neutrokine-alpha (International Publication No. WO 98/18921, OX40, and nerve growth factor (NGF), and soluble forms of Fas, CD30, CD27, CD40 and 4-IBB, TR2 (International Publication No. WO 96/34095), DR3 (International Publication No. WO 97/33904), DR4 (International Publication No. WO 98/32856), TR5 (International Publication No. WO 98/30693), TRANK, TR9 (International Publication No. WO 98/56892), TR10 (International Publication No. WO 98/54202), 312C2 (International Publication No. WO 98/06842), and TR12, and soluble forms CD154, CD70, and CD153.

[1124] In an additional embodiment, the Therapeutics of the invention are administered in combination with angiogenic proteins. Angiogenic proteins that may be administered with the Therapeutics of the invention include, but are not limited to, Glioma Derived Growth Factor (GDGF), as disclosed in European Patent Number EP-399816; Platelet Derived Growth Factor-A (PDGF-A), as disclosed in European Patent Number EP-682110; Platelet Derived Growth Factor-B (PDGF-B), as disclosed in European Patent Number EP-282317; Placental Growth Factor (PIGF), as disclosed in International Publication Number WO 92/06194; Placental Growth Factor-2 (PIGF-2), as disclosed in Hauser et al., Growth Factors, 4:259-268 (1993); Vascular Endothelial Growth Factor (VEGF), as disclosed in International Publication Number WO 90/13649; Vascular Endothelial Growth Factor-A (VEGF-A), as disclosed in European Patent Number EP-506477; Vascular Endothelial Growth Factor-2 (VEGF-2), as disclosed in International Publication Number WO 96/39515; Vascular Endothelial Growth Factor B (VEGF-3); Vascular Endothelial Growth Factor B-186 (VEGF-B186), as disclosed in International Publication Number WO 96/26736; Vascular Endothelial Growth Factor-D (VEGF-D), as disclosed in International Publication Number WO 98/02543; Vascular Endothelial Growth Factor-D (VEGF-D), as disclosed in International Publication Number WO 98/07832; and Vascular Endothelial Growth Factor-E (VEGF-E), as disclosed in German Patent Number DE19639601. The above mentioned references are herein incorporated by reference in their entireties.

[1125] In an additional embodiment, the Therapeutics of the invention are administered in combination with Fibroblast Growth Factors. Fibroblast Growth Factors that may be administered with the Therapeutics of the invention include, but are not limited to, FGF-1, FGF-2, FGF-3, FGF-4, FGF-5, FGF-6, FGF-7, FGF-8, FGF-9, FGF-10, FGF-11, FGF-12, FGF-13, FGF-14, and FGF-15.

[1126] In an additional embodiment, the Therapeutics of the invention are administered in combination with hematopoietic growth factors. Hematopoietic growth factors that may be administered with the Therapeutics of the invention include, but are not limited to, granulocyte macrophage colony stimulating factor (GM-CSF) (sargramostim, LEUKINE™, PROKINE™), granulocyte colony stimulating factor (G-CSF) (filgrastim, NEUPOGEN™), macrophage colony stimulating factor (M-CSF, CSF-1) erythropoietin (epoetin alfa, EPOGEN™, PROCRIT™), stem cell factor (SCF, c-kit ligand, steel factor), megakaryocyte colony stimulating factor, PIXY321 (a GMCSF/IL-3 fusion protein), interleukins, especially any one or more of IL-1 through IL-12, interferon-gamma, or thrombopoietin.

[1127] In certain embodiments, Therapeutics of the present invention are administered in combination with adrenergic blockers, such as, for example, acebutolol, atenolol, betaxolol, bisoprolol, carteolol, labetalol, metoprolol, nadolol, oxprenolol, penbutolol, pindolol, propranolol, sotalol, and timolol.

[1128] In another embodiment, the Therapeutics of the invention are administered in combination with an antiarrhythmic drug (e.g., adenosine, amidoarone, bretylium, digitalis, digoxin, digitoxin, diliazem, disopyramide, esmolol, flecainide, lidocaine, mexiletine, moricizine, phenytoin, procainamide, N-acetyl procainamide, propafenone, propranolol, quinidine, sotalol, tocainide, and verapamil).

[1129] In another embodiment, the Therapeutics of the invention are administered in combination with diuretic agents, such as carbonic anhydrase-inhibiting agents (e.g., acetazolamide, dichlorphenamide, and methazolamide), osmotic diuretics (e.g., glycerin, isosorbide, mannitol, and urea), diuretics that inhibit Na⁺—K⁺-2Cl⁻ symport (e.g., furosemide, bumetanide, azosemide, piretanide, tripamide, ethacrynic acid, muzolimine, and torsemide), thiazide and thiazide-like diuretics (e.g., bendroflumethiazide, benzthiazide, chlorothiazide, hydrochlorothiazide, hydroflumethiazide, methyclothiazide, polythiazide, trichormethiazide, chlorthalidone, indapamide, metolazone, and quinethazone), potassium sparing diuretics (e.g., amiloride and triamterene), and mineralcorticoid receptor antagonists (e.g., spironolactone, canrenone, and potassium canrenoate).

[1130] In one embodiment, the Therapeutics of the invention are administered in combination with treatments for endocrine and/or hormone imbalance disorders. Treatments for endocrine and/or hormone imbalance disorders include, but are not limited to, ¹²⁷I, radioactive isotopes of iodine such as ¹³¹I and ¹²³I; recombinant growth hormone, such as HUMATROPE™ (recombinant somatropin); growth hormone analogs such as PROTROPIN™ (somatrem); dopamine agonists such as PARLODEL™ (bromocriptine); somatostatin analogs such as SANDOSTATIN™ (octreotide); gonadotropin preparations such as PREGNYL™, A.P.L.™ and PROFASI™ (chorionic gonadotropin (CG)), PERGONAL™ (menotropins), and METRODIN™ (urofollitropin (uFSH)); synthetic human gonadotropin releasing hormone preparations such as FACTREL™ and LUTREPULSE™ (gonadorelin hydrochloride); synthetic gonadotropin agonists such as LUPRON™ (leuprolide acetate), SUPPRELIN™ (histrelin acetate), SYNAREL™(nafarelin acetate), and ZOLADEX™ (goserelin acetate); synthetic preparations of thyrotropin-releasing hormone such as RELEFACT TRH™ and THYPINONE™ (protirelin); recombinant human TSH such as THYROGEN™; synthetic preparations of the sodium salts of the natural isomers of thyroid hormones such as L-T₄™, SYNTHROID™ and LEVOTHROID™ (levothyroxine sodium), L-T₃™, CYTOMEL™ and TRIOSTAT™ (liothyroine sodium), and THYROLAR™ (liotrix); antithyroid compounds such as 6-n-propylthiouracil (propylthiouracil), 1-methyl-2-mercaptoimidazole and TAPAZOLE™ (methimazole), NEO-MERCAZOLE™ (carbimazole); beta-adrenergic receptor antagonists such as propranolol and esmolol; Ca²⁺ channel blockers; dexamethasone and iodinated radiological contrast agents such as TELEPAQUE™ (iopanoic acid) and ORAGRAFIN™ (sodium ipodate).

[1131] Additional treatments for endocrine and/or hormone imbalance disorders include, but are not limited to, estrogens or congugated estrogens such as ESTRACE™ (estradiol), ESTINYL™ (ethinyl estradiol), PREMARIN™, ESTRATAB™, ORTHO-EST™, OGEN™ and estropipate (estrone), ESTROVIS™ (quinestrol), ESTRADERM™ (estradiol), DELESTROGEN™ and VALERGEN™ (estradiol valerate), DEPO-ESTRADIOL CYPIONATE™ and ESTROJECT LA™ (estradiol cypionate); antiestrogens such as NOLVADEX™ (tamoxifen), SEROPHENE™ and CLOMID™ (clomiphene); progestins such as DURALUTIN™ (hydroxyprogesterone caproate), MPA™ and DEPO-PROVERA™ (medroxyprogesterone acetate), PROVERA™ and CYCRIN™ (MPA), MEGACE™ (megestrol acetate), NORLUTIN™ (norethindrone), and NORLUTATE™ and AYGESTIN™ (norethindrone acetate); progesterone implants such as NORPLANT SYSTEM™ (subdermal implants of norgestrel); antiprogestins such as RU 486™ (mifepristone); hormonal contraceptives such as ENOVID™ (norethynodrel plus mestranol), PROGESTASERT™ (intrauterine device that releases progesterone), LOESTRIN™, BREVICON™, MODICON™, GENORA™, NELONA™, NORINYL™, OVACON-35™ and OVACON-50™ (ethinyl estradiol/norethindrone), LEVLEN™, NORDETTE™, TRI-LEVLEN™ and TRIPHASIL-21™ (ethinyl estradiol/levonorgestrel) LO/OVRAL™ and OVRAL™ (ethinyl estradiol/norgestrel), DEMULEN™ (ethinyl estradiol/ethynodiol diacetate), NORINYL™, ORTHO-NOVUM™, NORETHIN™, GENORA™, and NELOVA™ (norethindrone/mestranol), DESOGEN™ and ORTHO-CEPT™ (ethinyl estradiol/desogestrel), ORTHO-CYCLEN™ and ORTHO-TRICYCLEN™ (ethinyl estradiol/norgestimate), MICRONOR™ and NOR-QD™ (norethindrone), and OVRETTE™ (norgestrel).

[1132] Additional treatments for endocrine and/or hormone imbalance disorders include, but are not limited to, testosterone esters such as methenolone acetate and testosterone undecanoate; parenteral and oral androgens such as TESTOJECT-50™ (testosterone), TESTEX™ (testosterone propionate), DELATESTRYL™ (testosterone enanthate), DEPO-TESTOSTERONE™ (testosterone cypionate), DANOCRINE™ (danazol), HALOTESTIN™ (fluoxymesterone), ORETON METHYL™, TESTRED™ and VIRILON™ (methyltestosterone), and OXANDRN™ (oxandrolone); testosterone transdermal systems such as TESTODERM™; androgen receptor antagonist and 5-alpha-reductase inhibitors such as ANDROCUR™ (cyproterone acetate), EULEXIN™ (flutamide), and PROSCAR™ (finasteride); adrenocorticotropic hormone preparations such as CORTROSYN™ (cosyntropin); adrenocortical steroids and their synthetic analogs such as ACLOVATE™ (alclometasone dipropionate), CYCLOCORT™ (amcinonide), BECLOVENT™ and VANCERIL™ (beclomethasone dipropionate), CELESTONE™ (betamethasone), BENISONE™ and UTICORT™ (betamethasone benzoate), DIPROSONE™ (betamethasone dipropionate), CELESTONE PHOSPHATE™ (betamethasone sodium phosphate), CELESTONE SOLUSPAN™ (betamethasone sodium phosphate and acetate), BETA-VAL™ and VALISONE™ (betamethasone valerate), TEMOVATE™ (clobetasol propionate), CLODERM™ (clocortolone pivalate), CORTEF™ and HYDROCORTONE™ (cortisol (hydrocortisone)), HYDROCORTONE ACETATE™ (cortisol (hydrocortisone) acetate), LOCOID™ (cortisol (hydrocortisone) butyrate), HYDROCORTONE PHOSPHATE™ (cortisol (hydrocortisone) sodium phosphate), A-HYDROCORT™ and SOLU CORTEF™ (cortisol (hydrocortisone) sodium succinate), WESTCORT™ (cortisol (hydrocortisone) valerate), CORTISONE ACETATE™ (cortisone acetate), DESOWEN™ and TRIDESILON™ (desonide), TOPICORT™ (desoximetasone), DECADRON™ (dexamethasone), DECADRON LA™ (dexamethasone acetate), DECADRON PHOSPHATE™ and HEXADROL PHOSPHATE™ (dexamethasone sodium phosphate), FLORONE™ and MAXIFLOR™ (diflorasone diacetate), FLORINEF ACETATE™ (fludrocortisone acetate), AEROBID™ and NASALIDE™ (flunisolide), FLUONID™ and SYNALAR™ (fluocinolone acetonide), LIDEX™ (fluocinonide), FLUOR-OP™ and FML™ (fluorometholone), CORDRAN™ (flurandrenolide), HALOG™ (halcinonide), HMS LIZUIFILM™ (medrysone), MEDROL™ (methylprednisolone), DEPO-MEDROL™ and MEDROL ACETATE™ (methylprednisone acetate), A-METHAPRED™ and SOLUMEDROL™ (methylprednisolone sodium succinate), ELOCON™ (mometasone furoate), HALDRONE™ (paramethasone acetate), DELTA-CORTEF™ (prednisolone), ECONOPRED™ (prednisolone acetate), HYDELTRASOL™ (prednisolone sodium phosphate), HYDELTRA-T.B.A™ (prednisolone tebutate), DELTASONE™ (prednisone), ARISTOCORT™ and KENACORT™ (triamcinolone), KENALOG™ (triamcinolone acetonide), ARISTOCORT™ and KENACORT DIACETATE™ (triamcinolone diacetate), and ARISTOSPAN™ (triamcinolone hexacetonide); inhibitors of biosynthesis and action of adrenocortical steroids such as CYTADREN™ (aminoglutethimide), NIZORAL™ (ketoconazole), MODRASTANE™ (trilostane), and METOPIRONE™ (metyrapone); bovine, porcine or human insulin or mixtures thereof, insulin analogs; recombinant human insulin such as HUMULIN™ and NOVOLIN™; oral hypoglycemic agents such as ORAMIDE™ and ORINASE™ (tolbutamide), DIABINESE™ (chlorpropamide), TOLAMIDE™ and TOLINASE™ (tolazamide), DYMELOR™ (acetohexamide), glibenclamide, MICRONASE™, DIBETA™ and GLYNASE™ (glyburide), GLUCOTROL™ (glipizide), and DIAMICRON™ (gliclazide), GLUCOPHAGE™ (metformin), ciglitazone, pioglitazone, and alpha-glucosidase inhibitors; bovine or porcine glucagon; somatostatins such as SANDOSTATIN™ (octreotide); and diazoxides such as PROGLYCEM™ (diazoxide).

[1133] In one embodiment, the Therapeutics of the invention are administered in combination with treatments for uterine motility disorders. Treatments for uterine motility disorders include, but are not limited to, estrogen drugs such as conjugated estrogens (e.g., PREMARIN® and ESTRATAB®), estradiols (e.g., CLIMARA® and ALORA®), estropipate, and chlorotrianisene; progestin drugs (e.g., AMEN® (medroxyprogesterone), MICRONOR® (norethidrone acetate), PROMETRIUM® progesterone, and megestrol acetate); and estrogen/progesterone combination therapies such as, for example, conjugated estrogens/medroxyprogesterone (e.g., PREMPRO™ and PREMPHASE®) and norethindrone acetate/ethinyl estsradiol (e.g., FEMHRT™).

[1134] In an additional embodiment, the Therapeutics of the invention are administered in combination with drugs effective in treating iron deficiency and hypochromic anemias, including but not limited to, ferrous sulfate (iron sulfate, FEOSOL™), ferrous fumarate (e.g., FEOSTAT™), ferrous gluconate (e.g., FERGON™), polysaccharide-iron complex (e.g., NIFEREX™), iron dextran injection (e.g., INFED™), cupric sulfate, pyroxidine, riboflavin, Vitamin B₁₂, cyancobalamin injection (e.g., REDISOL™, RUBRAMIN PC™), hydroxocobalamin, folic acid (e.g., FOLVITE™), leucovorin (folinic acid, 5-CHOH4PteGlu, citrovorum factor) or WELLCOVORIN (Calcium salt of leucovorin), transferrin or ferritin.

[1135] In certain embodiments, the Therapeutics of the invention are administered in combination with agents used to treat psychiatric disorders. Psychiatric drugs that may be administered with the Therapeutics of the invention include, but are not limited to, antipsychotic agents (e.g., chlorpromazine, chlorprothixene, clozapine, fluphenazine, haloperidol, loxapine, mesoridazine, molindone, olanzapine, perphenazine, pimozide, quetiapine, risperidone, thioridazine, thiothixene, trifluoperazine, and triflupromazine), antimanic agents (e.g., carbamazepine, divalproex sodium, lithium carbonate, and lithium citrate), antidepressants (e.g., amitriptyline, amoxapine, bupropion, citalopram, clomipramine, desipramine, doxepin, fluvoxamine, fluoxetine, imipramine, isocarboxazid, maprotiline, mirtazapine, nefazodone, nortriptyline, paroxetine, phenelzine, protriptyline, sertraline, tranylcypromine, trazodone, trimipramine, and venlafaxine), antianxiety agents (e.g., alprazolam, buspirone, chlordiazepoxide, clorazepate, diazepam, halazepam, lorazepam, oxazepam, and prazepam), and stimulants (e.g., d-amphetamine, methylphenidate, and pemoline).

[1136] In other embodiments, the Therapeutics of the invention are administered in combination with agents used to treat neurological disorders. Neurological agents that may be administered with the Therapeutics of the invention include, but are not limited to, antiepileptic agents (e.g., carbamazepine, clonazepam, ethosuximide, phenobarbital, phenytoin, primidone, valproic acid, divalproex sodium, felbamate, gabapentin, lamotrigine, levetiracetam, oxcarbazepine, tiagabine, topiramate, zonisamide, diazepam, lorazepam, and clonazepam), antiparkinsonian agents (e.g., levodopa/carbidopa, selegiline, amantidine, bromocriptine, pergolide, ropinirole, pramipexole, benztropine; biperiden; ethopropazine; procyclidine; trihexyphenidyl, tolcapone), and ALS therapeutics, (e.g. riluzole).

[1137] In another embodiment, Therapeutics of the invention are administered in combination with vasodilating agents and/or calcium channel blocking agents. Vasodilating agents that may be administered with the Therapeutics of the invention include, but are not limited to, Angiotensin Converting Enzyme (ACE) inhibitors (e.g., papaverine, isoxsuprine, benazepril, captopril, cilazapril, enalapril, enalaprilat, fosinopril, lisinopril, moexipril, perindopril, quinapril, ramipril, spirapril, trandolapril, and nylidrin), and nitrates (e.g., isosorbide dinitrate, isosorbide mononitrate, and nitroglycerin). Examples of calcium channel blocking agents that may be administered in combination with the Therapeutics of the invention include, but are not limited to amlodipine, bepridil, diltiazem, felodipine, flunarizine, isradipine, nicardipine, nifedipine, nimodipine, and verapamil.

[1138] In certain embodiments, the Therapeutics of the invention are administered in combination with treatments for gastrointestinal disorders. Treatments for gastrointestinal disorders that may be administered with the Therapeutic of the invention include, but are not limited to, H₂ histamine receptor antagonists (e.g., TAGAMET™ (cimetidine), ZANTAC™ (ranitidine), PEPCID™ (famotidine), and AXID™ (nizatidine)); inhibitors of H⁺, K⁺ ATPase (e.g., PREVACID™ (lansoprazole) and PRILOSEC™ (omeprazole)); Bismuth compounds (e.g., PEPTO-BISMOL™ (bismuth subsalicylate) and DE-NOL™ (bismuth subcitrate)); various antacids; sucralfate; prostaglandin analogs (e.g. CYTOTEC™ (misoprostol)); muscarinic cholinergic antagonists; laxatives (e.g., surfactant laxatives, stimulant laxatives, saline and osmotic laxatives); antidiarrheal agents (e.g., LOMOTIL™ (diphenoxylate), MOTOFEN™ (diphenoxin), and IMODIUM™ (loperamide hydrochloride)), synthetic analogs of somatostatin such as SANDOSTATIN™ (octreotide), antiemetic agents (e.g., ZOFRAN™ (ondansetron), KYTRIL™ (granisetron hydrochloride), tropisetron, dolasetron, metoclopramide, chlorpromazine, perphenazine, prochlorperazine, promethazine, thiethylperazine, triflupromazine, domperidone, haloperidol, droperidol, trimethobenzamide, dexamethasone, methylprednisolone, dronabinol, and nabilone); D2 antagonists (e.g., metoclopramide, trimethobenzamide and chlorpromazine); bile salts; chenodeoxycholic acid; ursodeoxycholic acid; and pancreatic enzyme preparations such as pancreatin and pancrelipase.

[1139] In additional embodiments, the Therapeutics of the invention are administered in combination with other therapeutic or prophylactic regimens, such as, for example, radiation therapy.

### Example 14

### Method of Treating Decreased Levels of the Polypeptide

[1140] The present invention relates to a method for treating an individual in need of an increased level of a polypeptide of the invention in the body comprising administering to such an individual a composition comprising a therapeutically effective amount of an agonist of the invention (including polypeptides of the invention). Moreover, it will be appreciated that conditions caused by a decrease in the standard or normal expression level of a polypeptide of the present invention in an individual can be treated by administering the agonist or antagonist of the present invention. Thus, the invention also provides a method of treatment of an individual in need of an increased level of the polypeptide comprising administering to such an individual a Therapeutic comprising an amount of the agonist or antagonist to increase the activity level of the polypeptide in such an individual.

[1141] For example, a patient with decreased levels of a polypeptide receives a daily dose 0.1-100 ug/kg of the agonist or antagonist for six consecutive days. The exact details of the dosing scheme, based on administration and formulation, are provided in Example 13.

### Example 15

### Method of Treating Increased Levels of the Polypeptide

[1142] The present invention also relates to a method of treating an individual in need of a decreased level of a polypeptide of the invention in the body comprising administering to such an individual a composition comprising a therapeutically effective amount of an antagonist of the invention (including polypeptides and antibodies of the invention).

[1143] In one example, antisense technology is used to inhibit production of a polypeptide of the present invention. This technology is one example of a method of decreasing levels of a polypeptide, due to a variety of etiologies, such as cancer.

[1144] For example, a patient diagnosed with abnormally increased levels of a polypeptide is administered intravenously antisense polynucleotides at 0.5, 1.0, 1.5, 2.0 and 3.0 mg/kg day for 21 days. This treatment is repeated after a 7-day rest period if the treatment was well tolerated. The antisense polynucleotides of the present invention can be formulated using techniques and formulations described herein (e.g. see Example 13), or otherwise known in the art.

### Example 16

### Method of Treatment Using Gene Therapy—Ex Vivo

[1145] One method of gene therapy transplants fibroblasts, which are capable of expressing a polypeptide, onto a patient. Generally, fibroblasts are obtained from a subject by skin biopsy. The resulting tissue is placed in tissue-culture medium and separated into small pieces. Small chunks of the tissue are placed on a wet surface of a tissue culture flask, approximately ten pieces are placed in each flask. The flask is turned upside down, closed tight and left at room temperature over night. After 24 hours at room temperature, the flask is inverted and the chunks of tissue remain fixed to the bottom of the flask and fresh media (e.g., Ham's F12 media, with 10% FBS, penicillin and streptomycin) is added. The flasks are then incubated at 37 degree C. for approximately one week.

[1146] At this time, fresh media is added and subsequently changed every several days. After an additional two weeks in culture, a monolayer of fibroblasts emerge. The monolayer is trypsinized and scaled into larger flasks.

[1147] pMV-7 (Kirschmeier, P. T. et al., DNA, 7:219-25 (1988)), flanked by the long terminal repeats of the Moloney murine sarcoma virus, is digested with EcoRI and HindIII and subsequently treated with calf intestinal phosphatase. The linear vector is fractionated on agarose gel and purified, using glass beads.

[1148] The cDNA encoding a polypeptide of the present invention can be amplified using PCR primers which correspond to the 5′ and 3′ end sequences respectively as set forth in Example 1 using primers and having appropriate restriction sites and initiation/stop codons, if necessary. Preferably, the 5′ primer contains an EcoRI site and the 3′ primer includes a HindIII site. Equal quantities of the Moloney murine sarcoma virus linear backbone and the amplified EcoRI and HindIII fragment are added together, in the presence of T4 DNA ligase. The resulting mixture is maintained under conditions appropriate for ligation of the two fragments. The ligation mixture is then used to transform bacteria HB101, which are then plated onto agar containing kanamycin for the purpose of confirming that the vector has the gene of interest properly inserted.

[1149] The amphotropic pA317 or GP+am12 packaging cells are grown in tissue culture to confluent density in Dulbecco's Modified Eagles Medium (DMEM) with 10% calf serum (CS), penicillin and streptomycin. The MSV vector containing the gene is then added to the media and the packaging cells transduced with the vector. The packaging cells now produce infectious viral particles containing the gene (the packaging cells are now referred to as producer cells).

[1150] Fresh media is added to the transduced producer cells, and subsequently, the media is harvested from a 10 cm plate of confluent producer cells. The spent media, containing the infectious viral particles, is filtered through a millipore filter to remove detached producer cells and this media is then used to infect fibroblast cells. Media is removed from a sub-confluent plate of fibroblasts and quickly replaced with the media from the producer cells. This media is removed and replaced with fresh media. If the titer of virus is high, then virtually all fibroblasts will be infected and no selection is required. If the titer is very low, then it is necessary to use a retroviral vector that has a selectable marker, such as neo or his. Once the fibroblasts have been efficiently infected, the fibroblasts are analyzed to determine whether protein is produced.

[1151] The engineered fibroblasts are then transplanted onto the host, either alone or after having been grown to confluence on cytodex 3 microcarrier beads.

### Example 17

### Gene Therapy Using Endogenous Genes Corresponding to Polynucleotides of the Invention

[1152] Another method of gene therapy according to the present invention involves operably associating the endogenous polynucleotide sequence of the invention with a promoter via homologous recombination as described, for example, in U.S. Pat. No. 5,641,670, issued Jun. 24, 1997; International Publication NO: WO 96/29411, published Sep. 26, 1996; International Publication NO: WO 94/12650, published Aug. 4, 1994; Koller et al., Proc. Natl. Acad. Sci. USA, 86:8932-8935 (1989); and Zijlstra et al., Nature, 342:435-438 (1989). This method involves the activation of a gene which is present in the target cells, but which is not expressed in the cells, or is expressed at a lower level than desired.

[1153] Polynucleotide constructs are made which contain a promoter and targeting sequences, which are homologous to the 5′ non-coding sequence of endogenous polynucleotide sequence, flanking the promoter. The targeting sequence will be sufficiently near the 5′ end of the polynucleotide sequence so the promoter will be operably linked to the endogenous sequence upon homologous recombination. The promoter and the targeting sequences can be amplified using PCR. Preferably, the amplified promoter contains distinct restriction enzyme sites on the 5′ and 3′ ends. Preferably, the 3′ end of the first targeting sequence contains the same restriction enzyme site as the 5′ end of the amplified promoter and the 5′ end of the second targeting sequence contains the same restriction site as the 3′ end of the amplified promoter.

[1154] The amplified promoter and the amplified targeting sequences are digested with the appropriate restriction enzymes and subsequently treated with calf intestinal phosphatase. The digested promoter and digested targeting sequences are added together in the presence of T4 DNA ligase. The resulting mixture is maintained under conditions appropriate for ligation of the two fragments. The construct is size fractionated on an agarose gel, then purified by phenol extraction and ethanol precipitation.

[1155] In this Example, the polynucleotide constructs are administered as naked polynucleotides via electroporation. However, the polynucleotide constructs may also be administered with transfection-facilitating agents, such as liposomes, viral sequences, viral particles, precipitating agents, etc. Such methods of delivery are known in the art.

[1156] Once the cells are transfected, homologous recombination will take place which results in the promoter being operably linked to the endogenous polynucleotide sequence. This results in the expression of polynucleotide corresponding to the polynucleotide in the cell. Expression may be detected by immunological staining, or any other method known in the art.

[1157] Fibroblasts are obtained from a subject by skin biopsy. The resulting tissue is placed in DMEM+10% fetal calf serum. Exponentially growing or early stationary phase fibroblasts are trypsinized and rinsed from the plastic surface with nutrient medium. An aliquot of the cell suspension is removed for counting, and the remaining cells are subjected to centrifugation. The supernatant is aspirated and the pellet is resuspended in 5 ml of electroporation buffer (20 mM HEPES pH 7.3, 137 mM NaCl, 5 mM KCl, 0.7 mM Na₂ HPO₄, 6 mM dextrose). The cells are recentrifuged, the supernatant aspirated, and the cells resuspended in electroporation buffer containing 1 mg/ml acetylated bovine serum albumin. The final cell suspension contains approximately 3×10⁶ cells/ml. Electroporation should be performed immediately following resuspension.

[1158] Plasmid DNA is prepared according to standard techniques. For example, to construct a plasmid for targeting to the locus corresponding to the polynucleotide of the invention, plasmid pUC18 (MBI Fermentas, Amherst, N.Y.) is digested with HindIII. The CMV promoter is amplified by PCR with an XbaI site on the 5′ end and a BamHI site on the 3′ end. Two non-coding sequences are amplified via PCR: one non-coding sequence (fragment 1) is amplified with a HindIII site at the 5′ end and an Xba site at the 3′end; the other non-coding sequence (fragment 2) is, amplified with a BamHI site at the 5′end and a HindIII site at the 3′end. The CMV promoter and the fragments (1 and 2) are digested with the appropriate enzymes (CMV promoter—XbaI and BamHI; fragment 1—XbaI; fragment 2—BamHI) and ligated together. The resulting ligation product is digested with HindIII, and ligated with the HindIII-digested pUC18 plasmid.

[1159] Plasmid DNA is added to a sterile cuvette with a 0.4 cm electrode gap (Bio-Rad). The final DNA concentration is generally at least 120 μg/ml. 0.5 ml of the cell suspension (containing approximately 1.5×10⁶ cells) is then added to the cuvette, and the cell suspension and DNA solutions are gently mixed. Electroporation is performed with a Gene-Pulser apparatus (Bio-Rad). Capacitance and voltage are set at 960 μF and 250-300 V, respectively. As voltage increases, cell survival decreases, but the percentage of surviving cells that stably incorporate the introduced DNA into their genome increases dramatically. Given these parameters, a pulse time of approximately 14-20 mSec should be observed.

[1160] Electroporated cells are maintained at room temperature for approximately 5 min, and the contents of the cuvette are then gently removed with a sterile transfer pipette. The cells are added directly to 10 ml of prewarmed nutrient media (DMEM with 15% calf serum) in a 10 cm dish and incubated at 37 degree C. The following day, the media is aspirated and replaced with 10 ml of fresh media and incubated for a further 16-24 hours.

[1161] The engineered fibroblasts are then injected into the host, either alone or after having been grown to confluence on cytodex 3 microcarrier beads. The fibroblasts now produce the protein product. The fibroblasts can then be introduced into a patient as described above.

### Example 18

### Method of Treatment Using Gene Therapy—In Vivo

[1162] Another aspect of the present invention is using in vivo gene therapy methods to treat disorders, diseases and conditions. The gene therapy method relates to the introduction of naked nucleic acid (DNA, RNA, and antisense DNA or RNA) sequences into an animal to increase or decrease the expression of the polypeptide. The polynucleotide of the present invention may be operatively linked to (i.e., associated with) a promoter or any other genetic elements necessary for the expression of the polypeptide by the target tissue. Such gene therapy and delivery techniques and methods are known in the art, see, for example, WO90/11092, WO98/11779; U.S. Pat. Nos. 5,693,622, 5,705,151, 5,580,859; Tabata et al., Cardiovasc. Res. 35(3):470-479 (1997); Chao et al., Pharmacol. Res. 35(6):517-522 (1997); Wolff, Neuromuscul. Disord. 7(5):314-318 (1997); Schwartz et al., Gene Ther. 3(5):405-411 (1996); Tsurumi et al., Circulation 94(12):3281-3290 (1996) (incorporated herein by reference).

[1163] The polynucleotide constructs may be delivered by any method that delivers injectable materials to the cells of an animal, such as, injection into the interstitial space of tissues (heart, muscle, skin, lung, liver, intestine and the like). The polynucleotide constructs can be delivered in a pharmaceutically acceptable liquid or aqueous carrier.

[1164] The term “naked” polynucleotide, DNA or RNA, refers to sequences that are free from any delivery vehicle that acts to assist, promote, or facilitate entry into the cell, including viral sequences, viral particles, liposome formulations, lipofectin or precipitating agents and the like. However, the polynucleotides of the present invention may also be delivered in liposome formulations (such as those taught in Felgner P. L. et al. (1995) Ann. NY Acad. Sci. 772:126-139 and Abdallah B. et al. (1995) Biol. Cell 85(1):1-7) which can be prepared by methods well known to those skilled in the art.

[1165] The polynucleotide vector constructs used in the gene therapy method are preferably constructs that will not integrate into the host genome nor will they contain sequences that allow for replication. Any strong promoter known to those skilled in the art can be used for driving the expression of DNA. Unlike other gene therapy techniques, one major advantage of introducing naked nucleic acid sequences into target cells is the transitory nature of the polynucleotide synthesis in the cells. Studies have shown that non-replicating DNA sequences can be introduced into cells to provide production of the desired polypeptide for periods of up to six months.

[1166] The polynucleotide construct can be delivered to the interstitial space of tissues within an animal, including muscle, skin, brain, lung, liver, spleen, bone marrow, thymus, heart, lymph, blood, bone, cartilage, pancreas, kidney, gall bladder, stomach, intestine, testis, ovary, uterus, rectum, nervous system, eye, gland, and connective tissue. Interstitial space of the tissues comprises the intercellular fluid, mucopolysaccharide matrix among the reticular fibers of organ tissues, elastic fibers in the walls of vessels or chambers, collagen fibers of fibrous tissues, or that same matrix within connective tissue ensheathing muscle cells or in the lacunae of bone. It is similarly the space occupied by the plasma of the circulation and the lymph fluid of the lymphatic channels. Delivery to the interstitial space of muscle tissue is preferred for the reasons discussed below. They may be conveniently delivered by injection into the tissues comprising these cells. They are preferably delivered to and expressed in persistent, non-dividing cells which are differentiated, although delivery and expression may be achieved in non-differentiated or less completely differentiated cells, such as, for example, stem cells of blood or skin fibroblasts. In vivo muscle cells are particularly competent in their ability to take up and express polynucleotides.

[1167] For the naked polynucleotide injection, an effective dosage amount of DNA or RNA will be in the range of from about 0.05 g/kg body weight to about 50 mg/kg body weight. Preferably the dosage will be from about 0.005 mg/kg to about 20 mg/kg and more preferably from about 0.05 mg/kg to about 5 mg/kg. Of course, as the artisan of ordinary skill will appreciate, this dosage will vary according to the tissue site of injection. The appropriate and effective dosage of nucleic acid sequence can readily be determined by those of ordinary skill in the art and may depend on the condition being treated and the route of administration. The preferred route of administration is by the parenteral route of injection into the interstitial space of tissues. However, other parenteral routes may also be used, such as, inhalation of an aerosol formulation particularly for delivery to lungs or bronchial tissues, throat or mucous membranes of the nose. In addition, naked polynucleotide constructs can be delivered to arteries during angioplasty by the catheter used in the procedure.

[1168] The dose response effects of injected polynucleotide in muscle in vivo is determined as follows. Suitable template DNA for production of mRNA coding for polypeptide of the present invention is prepared in accordance with a standard recombinant DNA methodology. The template DNA, which may be either circular or linear, is either used as naked DNA or complexed with liposomes. The quadriceps muscles of mice are then injected with various amounts of the template DNA.

[1169] Five to six week old female and male Balb/C mice are anesthetized by intraperitoneal injection with 0.3 ml of 2.5% Avertin. A 1.5 cm incision is made on the anterior thigh, and the quadriceps muscle is directly visualized. The template DNA is injected in 0.1 ml of carrier in a 1 cc syringe through a 27 gauge needle over one minute, approximately 0.5 cm from the distal insertion site of the muscle into the knee and about 0.2 cm deep. A suture is placed over the injection site for future localization, and the skin is closed with stainless steel clips.

[1170] After an appropriate incubation time (e.g., 7 days) muscle extracts are prepared by excising the entire quadriceps. Every fifth 15 um cross-section of the individual quadriceps muscles is histochemically stained for protein expression. A time course for protein expression may be done in a similar fashion except that quadriceps from different mice are harvested at different times. Persistence of DNA in muscle following injection may be determined by Southern blot analysis after preparing total cellular DNA and HIRT supernatants from injected and control mice. The results of the above experimentation in mice can be used to extrapolate proper dosages and other treatment parameters in humans and other animals using naked DNA.

### Example 19

### Transgenic Animals

[1171] The polypeptides of the invention can also be expressed in transgenic animals. Animals of any species, including, but not limited to, mice, rats, rabbits, hamsters, guinea pigs, pigs, micro-pigs, goats, sheep, cows and non-human primates, e.g., baboons, monkeys, and chimpanzees may be used to generate transgenic animals. In a specific embodiment, techniques described herein or otherwise known in the art, are used to express polypeptides of the invention in humans, as part of a gene therapy protocol.

[1172] Any technique known in the art may be used to introduce the transgene (i.e., polynucleotides of the invention) into animals to produce the founder lines of transgenic animals. Such techniques include, but are not limited to, pronuclear microinjection (Paterson et al., Appl. Microbiol. Biotechnol. 40:691-698 (1994); Carver et al., Biotechnology (NY) 11:1263-1270 (1993); Wright et al., Biotechnology (NY) 9:830-834 (1991); and Hoppe et al., U.S. Pat. No. 4,873,191 (1989)); retrovirus mediated gene transfer into germ lines (Van der Putten et al., Proc. Natl. Acad. Sci., USA 82:6148-6152 (1985)), blastocysts or embryos; gene targeting in embryonic stem cells (Thompson et al., Cell 56:313-321 (1989)); electroporation of cells or embryos (Lo, 1983, Mol Cell. Biol. 3:1803-1814 (1983)); introduction of the polynucleotides of the invention using a gene gun (see, e.g., Ulmer et al., Science 259:1745 (1993); introducing nucleic acid constructs into embryonic pleuripotent stem cells and transferring the stem cells back into the blastocyst; and sperm-mediated gene transfer (Lavitrano et al., Cell 57:717-723 (1989); etc. For a review of such techniques, see Gordon, “Transgenic Animals,” Intl. Rev. Cytol. 115:171-229 (1989), which is incorporated by reference herein in its entirety.

[1173] Any technique known in the art may be used to produce transgenic clones containing polynucleotides of the invention, for example, nuclear transfer into enucleated oocytes of nuclei from cultured embryonic, fetal, or adult cells induced to quiescence (Campell et al., Nature 380:64-66 (1996); Wilmut et al., Nature 385:810-813 (1997)).

[1174] The present invention provides for transgenic animals that carry the transgene in all their cells, as well as animals which carry the transgene in some, but not all their cells, i.e., mosaic animals or chimeric. The transgene may be integrated as a single transgene or as multiple copies such as in concatamers, e.g., head-to-head tandems or head-to-tail tandems. The transgene may also be selectively introduced into and activated in a particular cell type by following, for example, the teaching of Lasko et al. (Lasko et al., Proc. Natl. Acad. Sci. USA 89:6232-6236 (1992)). The regulatory sequences required for such a cell-type specific activation will depend upon the particular cell type of interest, and will be apparent to those of skill in the art. When it is desired that the polynucleotide transgene be integrated into the chromosomal site of the endogenous gene, gene targeting is preferred. Briefly, when such a technique is to be utilized, vectors containing some nucleotide sequences homologous to the endogenous gene are designed for the purpose of integrating, via homologous recombination with chromosomal sequences, into and disrupting the function of the nucleotide sequence of the endogenous gene. The transgene may also be selectively introduced into a particular cell type, thus inactivating the endogenous gene in only that cell type, by following, for example, the teaching of Gu et al. (Gu et al., Science 265:103-106 (1994)). The regulatory sequences required for such a cell-type specific inactivation will depend upon the particular cell type of interest, and will be apparent to those of skill in the art.

[1175] Once transgenic animals have been generated, the expression of the recombinant gene may be assayed utilizing standard techniques. Initial screening may be accomplished by Southern blot analysis or PCR techniques to analyze animal tissues to verify that integration of the transgene has taken place. The level of mRNA expression of the transgene in the tissues of the transgenic animals may also be assessed using techniques which include, but are not limited to, Northern blot analysis of tissue samples obtained from the animal, in situ hybridization analysis, and reverse transcriptase-PCR (rt-PCR). Samples of transgenic gene-expressing tissue may also be evaluated immunocytochemically or immunohistochemically using antibodies specific for the transgene product.

[1176] Once the founder animals are produced, they may be bred, inbred, outbred, or crossbred to produce colonies of the particular animal. Examples of such breeding strategies include, but are not limited to: outbreeding of founder animals with more than one integration site in order to establish separate lines; inbreeding of separate lines in order to produce compound transgenics that express the transgene at higher levels because of the effects of additive expression of each transgene; crossing of heterozygous transgenic animals to produce animals homozygous for a given integration site in order to both augment expression and eliminate the need for screening of animals by DNA analysis; crossing of separate homozygous lines to produce compound heterozygous or homozygous lines; and breeding to place the transgene on a distinct background that is appropriate for an experimental model of interest.

[1177] Transgenic animals of the invention have uses which include, but are not limited to, animal model systems useful in elaborating the biological function of polypeptides of the present invention, studying conditions and/or disorders associated with aberrant expression, and in screening for compounds effective in ameliorating such conditions and/or disorders.

### Example 20

### Knock-Out Animals

[1178] Endogenous gene expression can also be reduced by inactivating or “knocking out” the gene and/or its promoter using targeted homologous recombination. (e.g., see Smithies et al., Nature 317:230-234 (1985); Thomas & Capecchi, Cell 51:503-512 (1987); Thompson et al., Cell 5:313-321 (1989); each of which is incorporated by reference herein in its entirety). For example, a mutant, non-functional polynucleotide of the invention (or a completely unrelated DNA sequence) flanked by DNA homologous to the endogenous polynucleotide sequence (either the coding regions or regulatory regions of the gene) can be used, with or without a selectable marker and/or a negative selectable marker, to transfect cells that express polypeptides of the invention in vivo. In another embodiment, techniques known in the art are used to generate knockouts in cells that contain, but do not express the gene of interest. Insertion of the DNA construct, via targeted homologous recombination, results in inactivation of the targeted gene. Such approaches are particularly suited in research and agricultural fields where modifications to embryonic stem cells can be used to generate animal offspring with an inactive targeted gene (e.g., see Thomas & Capecchi 1987 and Thompson 1989, supra). However this approach can be routinely adapted for use in humans provided the recombinant DNA constructs are directly administered or targeted to the required site in vivo using appropriate viral vectors that will be apparent to those of skill in the art.

[1179] In further embodiments of the invention, cells that are genetically engineered to express the polypeptides of the invention, or alternatively, that are genetically engineered not to express the polypeptides of the invention (e.g., knockouts) are administered to a patient in vivo. Such cells may be obtained from the patient (i.e., animal, including human) or an MHC compatible donor and can include, but are not limited to fibroblasts, bone marrow cells, blood cells (e.g., lymphocytes), adipocytes, muscle cells, endothelial cells etc. The cells are genetically engineered in vitro using recombinant DNA techniques to introduce the coding sequence of polypeptides of the invention into the cells, or alternatively, to disrupt the coding sequence and/or endogenous regulatory sequence associated with the polypeptides of the invention, e.g., by transduction (using viral vectors, and preferably vectors that integrate the transgene into the cell genome) or transfection procedures, including, but not limited to, the use of plasmids, cosmids, YACs, naked DNA, electroporation, liposomes, etc. The coding sequence of the polypeptides of the invention can be placed under the control of a strong constitutive or inducible promoter or promoter/enhancer to achieve expression, and preferably secretion, of the polypeptides of the invention. The engineered cells which express and preferably secrete the polypeptides of the invention can be introduced into the patient systemically, e.g., in the circulation, or intraperitoneally.

[1180] Alternatively, the cells can be incorporated into a matrix and implanted in the body, e.g., genetically engineered fibroblasts can be implanted as part of a skin graft; genetically engineered endothelial cells can be implanted as part of a lymphatic or vascular graft. (See, for example, Anderson et al. U.S. Pat. No. 5,399,349; and Mulligan & Wilson, U.S. Pat. No. 5,460,959 each of which is incorporated by reference herein in its entirety).

[1181] When the cells to be administered are non-autologous or non-MHC compatible cells, they can be administered using well known techniques which prevent the development of a host immune response against the introduced cells. For example, the cells may be introduced in an encapsulated form which, while allowing for an exchange of components with the immediate extracellular environment, does not allow the introduced cells to be recognized by the host immune system.

[1182] Transgenic and “knock-out” animals of the invention have uses which include, but are not limited to, animal model systems useful in elaborating the biological function of polypeptides of the present invention, studying conditions and/or disorders associated with aberrant expression, and in screening for compounds effective in ameliorating such conditions and/or disorders.

### Example 21

### Assays Detecting Stimulation or Inhibition of B Cell Proliferation and Differentiation

[1183] Generation of functional humoral immune responses requires both soluble and cognate signaling between B-lineage cells and their microenvironment. Signals may impart a positive stimulus that allows a B-lineage cell to continue its programmed development, or a negative stimulus that instructs the cell to arrest its current developmental pathway. To date, numerous stimulatory and inhibitory signals have been found to influence B cell responsiveness including IL-2, IL-4, IL-5, IL-6, IL-7, IL10, IL-13, IL-14 and IL-15. Interestingly, these signals are by themselves weak effectors but can, in combination with various co-stimulatory proteins, induce activation, proliferation, differentiation, homing, tolerance and death among B cell populations.

[1184] One of the best studied classes of B-cell co-stimulatory proteins is the TNF-superfamily. Within this family CD40, CD27, and CD30 along with their respective ligands CD154, CD70, and CD153 have been found to regulate a variety of immune responses. Assays which allow for the detection and/or observation of the proliferation and differentiation of these B-cell populations and their precursors are valuable tools in determining the effects various proteins may have on these B-cell populations in terms of proliferation and differentiation. Listed below are two assays designed to allow for the detection of the differentiation, proliferation, or inhibition of B-cell populations and their precursors.

[1185] In Vitro Assay—Agonists or antagonists of the invention can be assessed for its ability to induce activation, proliferation, differentiation or inhibition and/or death in B-cell populations and their precursors. The activity of the agonists or antagonists of the invention on purified human tonsillar B cells, measured qualitatively over the dose range from 0.1 to 10,000 ng/mL, is assessed in a standard B-lymphocyte co-stimulation assay in which purified tonsillar B cells are cultured in the presence of either formalin-fixed Staphylococcus aureus Cowan I (SAC) or immobilized anti-human IgM antibody as the priming agent. Second signals such as IL-2 and IL-15 synergize with SAC and IgM crosslinking to elicit B cell proliferation as measured by tritiated-thymidine incorporation. Novel synergizing agents can be readily identified using this assay. The assay involves isolating human tonsillar B cells by magnetic bead (MACS) depletion of CD3-positive cells. The resulting cell population is greater than 95% B cells as assessed by expression of CD45R(B220).

[1186] Various dilutions of each sample are placed into individual wells of a 96-well plate to which are added 10⁵ B-cells suspended in culture medium (RPMI 1640 containing 10% FBS, 5×10⁻⁵M 2ME, 100 U/ml penicillin, 10 ug/ml streptomycin, and 10⁻⁵ dilution of SAC) in a total volume of 150 ul. Proliferation or inhibition is quantitated by a 20 h pulse (1 uCi/well) with 3H-thymidine (6.7 Ci/mM) beginning 72 h post factor addition. The positive and negative controls are IL2 and medium respectively.

[1187] In vivo Assay—BALB/c mice are injected (i.p.) twice per day with buffer only, or 2 mg/Kg of agonists or antagonists of the invention, or truncated forms thereof. Mice receive this treatment for 4 consecutive days, at which time they are sacrificed and various tissues and serum collected for analyses. Comparison of H&E sections from normal spleens and spleens treated with agonists or antagonists of the invention identify the results of the activity of the agonists or antagonists on spleen cells, such as the diffusion of peri-arterial lymphatic sheaths, and/or significant increases in the nucleated cellularity of the red pulp regions, which may indicate the activation of the differentiation and proliferation of B-cell populations. Immunohistochemical studies using a B cell marker, anti-CD45R(B220), are used to determine whether any physiological changes to splenic cells, such as splenic disorganization, are due to increased B-cell representation within loosely defined B-cell zones that infiltrate established T-cell regions.

[1188] Flow cytometric analyses of the spleens from mice treated with agonist or antagonist is used to indicate whether the agonists or antagonists specifically increases the proportion of ThB+, CD45R(B220) dull B cells over that which is observed in control mice.

[1189] Likewise, a predicted consequence of increased mature B-cell representation in vivo is a relative increase in serum Ig titers. Accordingly, serum IgM and IgA levels are compared between buffer and agonists or antagonists-treated mice.

[1190] The studies described in this example tested activity of agonists or antagonists of the invention. However, one skilled in the art could easily modify the exemplified studies to test the activity of polynucleotides or polypeptides of the invention (e.g., gene therapy).

### Example 22

### T Cell Proliferation Assay

[1191] A CD3-induced proliferation assay is performed on PBMCs and is measured by the uptake of ³H-thymidine. The assay is performed as follows. Ninety-six well plates are coated with 100 μl/well of mAb to CD3 (HIT3a, Pharmingen) or isotype-matched control mAb (B33.1) overnight at 4 degrees C. (1 μg/ml in 0.05M bicarbonate buffer, pH 9.5), then washed three times with PBS. PBMC are isolated by F/H gradient centrifugation from human peripheral blood and added to quadruplicate wells (5×10⁴/well) of mAb coated plates in RPMI containing 10% FCS and P/S in the presence of varying concentrations of agonists or antagonists of the invention (total volume 200 ul). Relevant protein buffer and medium alone are controls. After 48 hr. culture at 37 degrees C., plates are spun for 2 min. at 1000 rpm and 100 μl of supernatant is removed and stored −20 degrees C. for measurement of IL-2 (or other cytokines) if effect on proliferation is observed. Wells are supplemented with 100 ul of medium containing 0.5 uCi of ³H-thymidine and cultured at 37 degrees C. for 18-24 hr. Wells are harvested and incorporation of ³H-thymidine used as a measure of proliferation. Anti-CD3 alone is the positive control for proliferation. IL-2 (100 U/ml) is also used as a control which enhances proliferation. Control antibody which does not induce proliferation of T cells is used as the negative control for the effects of agonists or antagonists of the invention.

[1192] The studies described in this example tested activity of agonists or antagonists of the invention. However, one skilled in the art could easily modify the exemplified studies to test the activity of polynucleotides or polypeptides of the invention (e.g., gene therapy).

### Example 23

### Effect of Agonists or Antagonists of the Invention on the Expression of MHC Class II, Costimulatory and Adhesion Molecules and Cell Differentiation of Monocytes and Monocyte-Derived Human Dendritic Cells

[1193] Dendritic cells are generated by the expansion of proliferating precursors found in the peripheral blood: adherent PBMC or elutriated monocytic fractions are cultured for 7-10 days with GM-CSF (50 ng/ml) and IL-4 (20 ng/ml). These dendritic cells have the characteristic phenotype of immature cells (expression of CD1, CD80, CD86, CD40 and MHC class II antigens). Treatment with activating factors, such as TNF-α, causes a rapid change in surface phenotype (increased expression of MHC class I and II, costimulatory and adhesion molecules, downregulation of FCγRII, upregulation of CD83). These changes correlate with increased antigen-presenting capacity and with functional maturation of the dendritic cells.

[1194] FACS analysis of surface antigens is performed as follows. Cells are treated 1-3 days with increasing concentrations of agonist or antagonist of the invention or LPS (positive control), washed with PBS containing 1% BSA and 0.02 mM sodium azide, and then incubated with 1:20 dilution of appropriate FITC- or PE-labeled monoclonal antibodies for 30 minutes at 4 degrees C. After an additional wash, the labeled cells are analyzed by flow cytometry on a FACScan (Becton Dickinson).

[1195] Effect on the production of cytokines. Cytokines generated by dendritic cells, in particular IL-12, are important in the initiation of T-cell dependent immune responses. IL-12 strongly influences the development of Th1 helper T-cell immune response, and induces cytotoxic T and NK cell function. An ELISA is used to measure the IL-12 release as follows. Dendritic cells (10⁶/ml) are treated with increasing concentrations of agonists or antagonists of the invention for 24 hours. LPS (100 ng/ml) is added to the cell culture as positive control. Supernatants from the cell cultures are then collected and analyzed for IL-12 content using commercial ELISA kit (e.g., R & D Systems (Minneapolis, Minn.)). The standard protocols provided with the kits are used.

[1196] Effect on the expression of MHC Class II, costimulatory and adhesion molecules. Three major families of cell surface antigens can be identified on monocytes: adhesion molecules, molecules involved in antigen presentation, and Fc receptor. Modulation of the expression of MHC class II antigens and other costimulatory molecules, such as B7 and ICAM-1, may result in changes in the antigen presenting capacity of monocytes and ability to induce T cell activation. Increased expression of Fc receptors may correlate with improved monocyte cytotoxic activity, cytokine release and phagocytosis.

[1197] FACS analysis is used to examine the surface antigens as follows. Monocytes are treated 1-5 days with increasing concentrations of agonists or antagonists of the invention or LPS (positive control), washed with PBS containing 1% BSA and 0.02 mM sodium azide, and then incubated with 1:20 dilution of appropriate FITC- or PE-labeled monoclonal antibodies for 30 minutes at 4 degrees C. After an additional wash, the labeled cells are analyzed by flow cytometry on a FACScan (Becton Dickinson).

[1198] Monocyte activation and/or increased survival. Assays for molecules that activate (or alternatively, inactivate) monocytes and/or increase monocyte survival (or alternatively, decrease monocyte survival) are known in the art and may routinely be applied to determine whether a molecule of the invention functions as an inhibitor or activator of monocytes. Agonists or antagonists of the invention can be screened using the three assays described below. For each of these assays, Peripheral blood mononuclear cells (PBMC) are purified from single donor leukopacks (American Red Cross, Baltimore, Md.) by centrifugation through a Histopaque gradient (Sigma). Monocytes are isolated from PBMC by counterflow centrifugal elutriation.

[1199] Monocyte Survival Assay. Human peripheral blood monocytes progressively lose viability when cultured in absence of serum or other stimuli. Their death results from internally regulated processes (apoptosis). Addition to the culture of activating factors, such as TNF-alpha dramatically improves cell survival and prevents DNA fragmentation. Propidium iodide (PI) staining is used to measure apoptosis as follows. Monocytes are cultured for 48 hours in polypropylene tubes in serum-free medium (positive control), in the presence of 100 ng/ml TNF-alpha (negative control), and in the presence of varying concentrations of the compound to be tested. Cells are suspended at a concentration of 2×10⁶/ml in PBS containing PI at a final concentration of 5 μg/ml, and then incubated at room temperature for 5 minutes before FACScan analysis. PI uptake has been demonstrated to correlate with DNA fragmentation in this experimental paradigm.

[1200] Effect on cytokine release. An important function of monocytes/macrophages is their regulatory activity on other cellular populations of the immune system through the release of cytokines after stimulation. An ELISA to measure cytokine release is performed as follows. Human monocytes are incubated at a density of 5×10⁵ cells/ml with increasing concentrations of agonists or antagonists of the invention and under the same conditions, but in the absence of agonists or antagonists. For IL-12 production, the cells are primed overnight with IFN (100 U/ml) in the presence of agonist or antagonist of the invention. LPS (10 ng/ml) is then added. Conditioned media are collected after 24 h and kept frozen until use. Measurement of TNF-alpha, IL-10, MCP-1 and IL-8 is then performed using a commercially available ELISA kit (e.g., R & D Systems (Minneapolis, Minn.)) and applying the standard protocols provided with the kit.

[1201] Oxidative burst. Purified monocytes are plated in 96-w plate at 2-1×10⁵ cell/well. Increasing concentrations of agonists or antagonists of the invention are added to the wells in a total volume of 0.2 ml culture medium (RPMI 1640+10% FCS, glutamine and antibiotics). After 3 days incubation, the plates are centrifuged and the medium is removed from the wells. To the macrophage monolayers, 0.2 ml per well of phenol red solution (140 mM NaCl, 10 mM potassium phosphate buffer pH 7.0, 5.5 mM dextrose, 0.56 mM phenol red and 19 U/ml of HRPO) is added, together with the stimulant (200 nM PMA). The plates are incubated at 37° C. for 2 hours and the reaction is stopped by adding 20 μl 1N NaOH per well. The absorbance is read at 610 nm. To calculate the amount of H₂O₂ produced by the macrophages, a standard curve of a H₂O₂ solution of known molarity is performed for each experiment.

[1202] The studies described in this example tested activity of agonists or antagonists of the invention. However, one skilled in the art could easily modify the exemplified studies to test the activity of polynucleotides or polypeptides of the invention (e.g., gene therapy).

### Example 24

### Biological Effects of Agonists or Antagonists of the Invention

Astrocyte and Neuronal Assays

[1203] Agonists or antagonists of the invention, expressed in Escherichia coli and purified as described above, can be tested for activity in promoting the survival, neurite outgrowth, or phenotypic differentiation of cortical neuronal cells and for inducing the proliferation of glial fibrillary acidic protein immunopositive cells, astrocytes. The selection of cortical cells for the bioassay is based on the prevalent expression of FGF-1 and FGF-2 in cortical structures and on the previously reported enhancement of cortical neuronal survival resulting from FGF-2 treatment. A thymidine incorporation assay, for example, can be used to elucidate an agonist or antagonist of the invention's activity on these cells.

[1204] Moreover, previous reports describing the biological effects of FGF-2 (basic FGF) on cortical or hippocampal neurons in vitro have demonstrated increases in both neuron survival and neurite outgrowth (Walicke et al., “Fibroblast growth factor promotes survival of dissociated hippocampal neurons and enhances neurite extension.” Proc. Natl. Acad. Sci. USA 83:3012-3016. (1986), assay herein incorporated by reference in its entirety). However, reports from experiments done on PC-12 cells suggest that these two responses are not necessarily synonymous and may depend on not only which FGF is being tested but also on which receptor(s) are expressed on the target cells. Using the primary cortical neuronal culture paradigm, the ability of an agonist or antagonist of the invention to induce neurite outgrowth can be compared to the response achieved with FGF-2 using, for example, a thymidine incorporation assay.

Fibroblast and Endothelial Cell Assays

[1205] Human lung fibroblasts are obtained from Clonetics (San Diego, Calif.) and maintained in growth media from Clonetics. Dermal microvascular endothelial cells are obtained from Cell Applications (San Diego, Calif.). For proliferation assays, the human lung fibroblasts and dermal microvascular-endothelial cells can be cultured at 5,000 cells/well in a 96-well plate for one day in growth medium. The cells are then incubated for one day in 0.1% BSA basal medium. After replacing the medium with fresh 0.1% BSA medium, the cells are incubated with the test proteins for 3 days. Alamar Blue (Alamar Biosciences, Sacramento, Calif.) is added to each well to a final concentration of 10%. The cells are incubated for 4 hr. Cell viability is measured by reading in a CytoFluor fluorescence reader. For the PGE₂ assays, the human lung fibroblasts are cultured at 5,000 cells/well in a 96-well plate for one day. After a medium change to 0.1% BSA basal medium, the cells are incubated with FGF-2 or agonists or antagonists of the invention with or without IL-1α for 24 hours. The supernatants are collected and assayed for PGE₂ by EIA kit (Cayman, Ann Arbor, Mich.). For the IL-6 assays, the human lung fibroblasts are cultured at 5,000 cells/well in a 96-well plate for one day. After a medium change to 0.1% BSA basal medium, the cells are incubated with FGF-2 or with or without agonists or antagonists of the invention IL-1α for 24 hours. The supernatants are collected and assayed for IL-6 by ELISA kit (Endogen, Cambridge, Mass.).

[1206] Human lung fibroblasts are cultured with FGF-2 or agonists or antagonists of the invention for 3 days in basal medium before the addition of Alamar Blue to assess effects on growth of the fibroblasts. FGF-2 should show a stimulation at 10-2500 ng/ml which can be used to compare stimulation with agonists or antagonists of the invention.

Parkinson Models.

[1207] The loss of motor function in Parkinson's disease is attributed to a deficiency of striatal dopamine resulting from the degeneration of the nigrostriatal dopaminergic projection neurons. An animal model for Parkinson's that has been extensively characterized involves the systemic administration of 1-methyl-4 phenyl 1,2,3,6-tetrahydropyridine (MPTP). In the CNS, MPTP is taken-up by astrocytes and catabolized by monoamine oxidase B to 1-methyl-4-phenyl pyridine (MPP⁺) and released. Subsequently, MPP⁺ is actively accumulated in dopaminergic neurons by the high-affinity reuptake transporter for dopamine. MPP⁺ is then concentrated in mitochondria by the electrochemical gradient and selectively inhibits nicotidamide adenine disphosphate: ubiquinone oxidoreductionase (complex I), thereby interfering with electron transport and eventually generating oxygen radicals.

[1208] It has been demonstrated in tissue culture paradigms that FGF-2 (basic FGF) has trophic activity towards nigral dopaminergic neurons (Ferrari et al., Dev. Biol. 1989). Recently, Dr. Unsicker's group has demonstrated that administering FGF-2 in gel foam implants in the striatum results in the near complete protection of nigral dopaminergic neurons from the toxicity associated with MPTP exposure (Otto and Unsicker, J. Neuroscience, 1990).

[1209] Based on the data with FGF-2, agonists or antagonists of the invention can be evaluated to determine whether it has an action similar to that of FGF-2 in enhancing dopaminergic neuronal survival in vitro and it can also be tested in vivo for protection of dopaminergic neurons in the striatum from the damage associated with MPTP treatment. The potential effect of an agonist or antagonist of the invention is first examined in vitro in a dopaminergic neuronal cell culture paradigm. The cultures are prepared by dissecting the midbrain floor plate from gestation day 14 Wistar rat embryos. The tissue is dissociated with trypsin and seeded at a density of 200,000 cells/cm² on polyorthinine-laminin coated glass coverslips. The cells are maintained in Dulbecco's Modified Eagle's medium and F12 medium containing hormonal supplements (N1). The cultures are fixed with paraformaldehyde after 8 days in vitro and are processed for tyrosine hydroxylase, a specific marker for dopaminergic neurons, immunohistochemical staining. Dissociated cell cultures are prepared from embryonic rats. The culture medium is changed every third day and the factors are also added at that time.

[1210] Since the dopaminergic neurons are isolated from animals at gestation day 14, a developmental time which is past the stage when the dopaminergic precursor cells are proliferating, an increase in the number of tyrosine hydroxylase immunopositive neurons would represent an increase in the number of dopaminergic neurons surviving in vitro. Therefore, if an agonist or antagonist of the invention acts to prolong the survival of dopaminergic neurons, it would suggest that the agonist or antagonist may be involved in Parkinson's Disease.

[1211] The studies described in this example tested activity of agonists or antagonists of the invention. However, one skilled in the art could easily modify the exemplified studies to test the activity of polynucleotides or polypeptides of the invention (e.g., gene therapy).

### Example 25

### The Effect of Agonists or Antagonists of the Invention on the Growth of Vascular Endothelial Cells

[1212] On day 1, human umbilical vein endothelial cells (HUVEC) are seeded at 2-5×10⁴ cells/35 mm dish density in M199 medium containing 4% fetal bovine serum (FBS), 16 units/ml heparin, and 50 units/ml endothelial cell growth supplements (ECGS, Biotechnique, Inc.). On day 2, the medium is replaced with M199 containing 10% FBS, 8 units/ml heparin. An agonist or antagonist of the invention, and positive controls, such as VEGF and basic FGF (bFGF) are added, at varying concentrations. On days 4 and 6, the medium is replaced. On day 8, cell number is determined with a Coulter Counter.

[1213] An increase in the number of HUVEC cells indicates that the compound of the invention may proliferate vascular endothelial cells, while a decrease in the number of HUVEC cells indicates that the compound of the invention inhibits vascular endothelial cells.

[1214] The studies described in this example tested activity of a polypeptide of the invention. However, one skilled in the art could easily modify the exemplified studies to test the activity of polynucleotides (e.g., gene therapy), agonists, and/or antagonists of the invention.

### Example 26

### Rat Corneal Wound Healing Model

[1215] This animal model shows the effect of an agonist or antagonist of the invention on neovascularization. The experimental protocol includes:

a) Making a 1-1.5 mm long incision from the center of cornea into the stromal layer.

b) Inserting a spatula below the lip of the incision facing the outer corner of the eye.

c) Making a pocket (its base is 1-1.5 mm form the edge of the eye).

d) Positioning a pellet, containing 50 ng-5 ug of an agonist or antagonist of the invention, within the pocket.

e) Treatment with an agonist or antagonist of the invention can also be applied topically to the corneal wounds in a dosage range of 20 mg-500 mg (daily treatment for five days).

[1216] The studies described in this example tested activity of agonists or antagonists of the invention. However, one skilled in the art could easily modify the exemplified studies to test the activity of polynucleotides or polypeptides of the invention (e.g., gene therapy).

### Example 27

### Diabetic Mouse and Glucocorticoid-Impaired Wound Healing Models

Diabetic db+/db+ Mouse Model.

[1217] To demonstrate that an agonist or antagonist of the invention accelerates the healing process, the genetically diabetic mouse model of wound healing is used. The full thickness wound healing model in the db+/db+ mouse is a well characterized, clinically relevant and reproducible model of impaired wound healing. Healing of the diabetic wound is dependent on formation of granulation tissue and re-epithelialization rather than contraction (Gartner, M. H. et al., J. Surg. Res. 52:389 (1992); Greenhalgh, D. G. et al., Am. J. Pathol. 136:1235 (1990)).

[1218] The diabetic animals have many of the characteristic features observed in Type II diabetes mellitus. Homozygous (db+/db+) mice are obese in comparison to their normal heterozygous (db+/+m) littermates. Mutant diabetic (db+/db+) mice have a single autosomal recessive mutation on chromosome 4 (db+) (Coleman et al. Proc. Natl. Acad. Sci. USA 77:283-293 (1982)). Animals show polyphagia, polydipsia and polyuria. Mutant diabetic mice (db+/db+) have elevated blood glucose, increased or normal insulin levels, and suppressed cell-mediated immunity (Mandel et al, J. Immunol. 120:1375 (1978); Debray-Sachs, M. et al., Clin. Exp. Immunol. 51(1):1-7 (1983); Leiter et al., Am. J. of Pathol. 114:46-55 (1985)). Peripheral neuropathy, myocardial complications, and microvascular lesions, basement membrane thickening and glomerular filtration abnormalities have been described in these animals (Norido, F. et al., Exp. Neurol. 83(2):221-232 (1984); Robertson et al., Diabetes 29(1):60-67 (1980); Giacomelli et al., Lab Invest. 40(4):460-473 (1979); Coleman, D. L., Diabetes 31 (Suppl):1-6 (1982)). These homozygous diabetic mice develop hyperglycemia that is resistant to insulin analogous to human type II diabetes (Mandel et al., J. Immunol. 120:1375-1377 (1978)).

[1219] The characteristics observed in these animals suggests that healing in this model may be similar to the healing observed in human diabetes (Greenhalgh, et al., Am. J. of Pathol. 136:1235-1246 (1990)).

[1220] Genetically diabetic female C57BL/KsJ (db+/db+) mice and their non-diabetic (db+/+m) heterozygous littermates are used in this study (Jackson Laboratories). The animals are purchased at 6 weeks of age and are 8 weeks old at the beginning of the study. Animals are individually housed and received food and water ad libitum. All manipulations are performed using aseptic techniques. The experiments are conducted according to the rules and guidelines of Human Genome Sciences, Inc. Institutional Animal Care and Use Committee and the Guidelines for the Care and Use of Laboratory Animals.

[1221] Wounding protocol is performed according to previously reported methods (Tsuboi, R. and Rifkin, D. B., J. Exp. Med. 172:245-251 (1990)). Briefly, on the day of wounding, animals are anesthetized with an intraperitoneal injection of Avertin (0.01 mg/mL), 2,2,2-tribromoethanol and 2-methyl-2-butanol dissolved in deionized water. The dorsal region of the animal is shaved and the skin washed with 70% ethanol solution and iodine. The surgical area is dried with sterile gauze prior to wounding. An 8 mm full-thickness wound is then created using a Keyes tissue punch. Immediately following wounding, the surrounding skin is gently stretched to eliminate wound expansion. The wounds are left open for the duration of the experiment. Application of the treatment is given topically for 5 consecutive days commencing on the day of wounding. Prior to treatment, wounds are gently cleansed with sterile saline and gauze sponges.

[1222] Wounds are visually examined and photographed at a fixed distance at the day of surgery and at two day intervals thereafter. Wound closure is determined by daily measurement on days 1-5 and on day 8. Wounds are measured horizontally and vertically using a calibrated Jameson caliper. Wounds are considered healed if granulation tissue is no longer visible and the wound is covered by a continuous epithelium.

[1223] An agonist or antagonist of the invention is administered using at a range different doses, from 4 mg to 500 mg per wound per day for 8 days in vehicle. Vehicle control groups received 50 mL of vehicle solution.

[1224] Animals are euthanized on day 8 with an intraperitoneal injection of sodium pentobarbital (300 mg/kg). The wounds and surrounding skin are then harvested for histology and immunohistochemistry. Tissue specimens are placed in 10% neutral buffered formalin in tissue cassettes between biopsy sponges for further processing.

[1225] Three groups of 10 animals each (5 diabetic and 5 non-diabetic controls) are evaluated: 1) Vehicle placebo control, 2) untreated group, and 3) treated group.

[1226] Wound closure is analyzed by measuring the area in the vertical and horizontal axis and obtaining the total square area of the wound. Contraction is then estimated by establishing the differences between the initial wound area (day 0) and that of post treatment (day 8). The wound area on day 1 is 64 mm², the corresponding size of the dermal punch. Calculations are made using the following formula:
[Open area on day 8]−[Open area on day 1]/[Open area on day 1]

[1227] Specimens are fixed in 10% buffered formalin and paraffin embedded blocks are sectioned perpendicular to the wound surface (5 mm) and cut using a Reichert-Jung microtome. Routine hematoxylin-eosin (H&E) staining is performed on cross-sections of bisected wounds. Histologic examination of the wounds are used to assess whether the healing process and the morphologic appearance of the repaired skin is altered by treatment with an agonist or antagonist of the invention. This assessment included verification of the presence of cell accumulation, inflammatory cells, capillaries, fibroblasts, re-epithelialization and epidermal maturity (Greenhalgh, D. G. et al., Am. J. Pathol. 136:1235 (1990)). A calibrated lens micrometer is used by a blinded observer.

[1228] Tissue sections are also stained immunohistochemically with a polyclonal rabbit anti-human keratin antibody using ABC Elite detection system. Human skin is used as a positive tissue control while non-immune IgG is used as a negative control. Keratinocyte growth is determined by evaluating the extent of reepithelialization of the wound using a calibrated lens micrometer.

[1229] Proliferating cell nuclear antigen/cyclin (PCNA) in skin specimens is demonstrated by using anti-PCNA antibody (1:50) with an ABC Elite detection system. Human colon cancer served as a positive tissue control and human brain tissue is used as a negative tissue control. Each specimen included a section with omission of the primary antibody and substitution with non-immune mouse IgG. Ranking of these sections is based on the extent of proliferation on a scale of 0-8, the lower side of the scale reflecting slight proliferation to the higher side reflecting intense proliferation.

[1230] Experimental data are analyzed using an unpaired t test. A p value of <0.05 is considered significant.

Steroid Impaired Rat Model

[1231] The inhibition of wound healing by steroids has been well documented in various in vitro and in vivo systems (Wahl, Glucocorticoids and Wound healing. In: Anti-Inflammatory Steroid Action: Basic and Clinical Aspects. 280-302 (1989); Wahl et al., J. Immunol. 115: 476-481 (1975); Werb et al., J. Exp. Med. 147:1684-1694 (1978)). Glucocorticoids retard wound healing by inhibiting angiogenesis, decreasing vascular permeability (Ebert et al., An. Intern. Med. 37:701-705 (1952)), fibroblast proliferation, and collagen synthesis (Beck et al., Growth Factors. 5: 295-304 (1991); Haynes et al., J. Clin. Invest. 61: 703-797 (1978)) and producing a transient reduction of circulating monocytes (Haynes et al., J. Clin. Invest. 61: 703-797 (1978); Wahl, “Glucocorticoids and wound healing”, In: Antiinflammatory Steroid Action: Basic and Clinical Aspects, Academic Press, New York, pp. 280-302 (1989)). The systemic administration of steroids to impaired wound healing is a well establish phenomenon in rats (Beck et al., Growth Factors. 5: 295-304 (1991); Haynes et al., J. Clin. Invest. 61: 703-797 (1978); Wahl, “Glucocorticoids and wound healing”, In: Antiinflammatory Steroid Action: Basic and Clinical Aspects, Academic Press, New York, pp. 280-302 (1989); Pierce et al., Proc. Natl. Acad. Sci. USA 86: 2229-2233 (1989)).

[1232] To demonstrate that an agonist or antagonist of the invention can accelerate the healing process, the effects of multiple topical applications of the agonist or antagonist on full thickness excisional skin wounds in rats in which healing has been impaired by the systemic administration of methylprednisolone is assessed.

[1233] Young adult male Sprague Dawley rats weighing 250-300 g (Charles River Laboratories) are used in this example. The animals are purchased at 8 weeks of age and are 9 weeks old at the beginning of the study. The healing response of rats is impaired by the systemic administration of methylprednisolone (17 mg/kg/rat intramuscularly) at the time of wounding. Animals are individually housed and received food and water ad libitum. All manipulations are performed using aseptic techniques. This study is conducted according to the rules and guidelines of Human Genome Sciences, Inc. Institutional Animal Care and Use Committee and the Guidelines for the Care and Use of Laboratory Animals.

[1234] The wounding protocol is followed according to section A, above. On the day of wounding, animals are anesthetized with an intramuscular injection of ketamine (50 mg/kg) and xylazine (5 mg/kg). The dorsal region of the animal is shaved and the skin washed with 70% ethanol and iodine solutions. The surgical area is dried with sterile gauze prior to wounding. An 8 mm full-thickness wound is created using a Keyes tissue punch. The wounds are left open for the duration of the experiment. Applications of the testing materials are given topically once a day for 7 consecutive days commencing on the day of wounding and subsequent to methylprednisolone administration. Prior to treatment, wounds are gently cleansed with sterile saline and gauze sponges.

[1235] Wounds are visually examined and photographed at a fixed distance at the day of wounding and at the end of treatment. Wound closure is determined by daily measurement on days 1-5 and on day 8. Wounds are measured horizontally and vertically using a calibrated Jameson caliper. Wounds are considered healed if granulation tissue is no longer visible and the wound is covered by a continuous epithelium.

[1236] The agonist or antagonist of the invention is administered using at a range different doses, from 4 mg to 500 mg per wound per day for 8 days in vehicle. Vehicle control groups received 50 mL of vehicle solution.

[1237] Animals are euthanized on day 8 with an intraperitoneal injection of sodium pentobarbital (300 mg/kg). The wounds and surrounding skin are then harvested for histology. Tissue specimens are placed in 10% neutral buffered formalin in tissue cassettes between biopsy sponges for further processing.

[1238] Three groups of 10 animals each (5 with methylprednisolone and 5 without glucocorticoid) are evaluated: 1) Untreated group 2) Vehicle placebo control 3) treated groups.

[1239] Wound closure is analyzed by measuring the area in the vertical and horizontal axis and obtaining the total area of the wound. Closure is then estimated by establishing the differences between the initial wound area (day 0) and that of post treatment (day 8). The wound area on day 1 is 64 mm², the corresponding size of the dermal punch. Calculations are made using the following formula:
[Open area on day 8]−[Open area on day 1]/[Open area on day 1]

[1240] Specimens are fixed in 10% buffered formalin and paraffin embedded blocks are sectioned perpendicular to the wound surface (5 mm) and cut using an Olympus microtome. Routine hematoxylin-eosin (H&E) staining is performed on cross-sections of bisected wounds. Histologic examination of the wounds allows assessment of whether the healing process and the morphologic appearance of the repaired skin is improved by treatment with an agonist or antagonist of the invention. A calibrated lens micrometer is used by a blinded observer to determine the distance of the wound gap.

[1241] Experimental data are analyzed using an unpaired t test. A p value of <0.05 is considered significant.

[1242] The studies described in this example tested activity of agonists or antagonists of the invention. However, one skilled in the art could easily modify the exemplified studies to test the activity of polynucleotides or polypeptides of the invention (e.g., gene therapy).

### Example 28

### Lymphadema Animal Model

[1243] The purpose of this experimental approach is to create an appropriate and consistent lymphedema model for testing the therapeutic effects of an agonist or antagonist of the invention in lymphangiogenesis and re-establishment of the lymphatic circulatory system in the rat hind limb. Effectiveness is measured by swelling volume of the affected limb, quantification of the amount of lymphatic vasculature, total blood plasma protein, and histopathology. Acute lymphedema is observed for 7-10 days. Perhaps more importantly, the chronic progress of the edema is followed for up to 3-4 weeks.

[1244] Prior to beginning surgery, blood sample is drawn for protein concentration analysis. Male rats weighing approximately ˜350 g are dosed with Pentobarbital. Subsequently, the right legs are shaved from knee to hip. The shaved area is swabbed with gauze soaked in 70% EtOH. Blood is drawn for serum total protein testing. Circumference and volumetric measurements are made prior to injecting dye into paws after marking 2 measurement levels (0.5 cm above heel, at mid-pt of dorsal paw). The intradermal dorsum of both right and left paws are injected with 0.05 ml of 1% Evan's Blue. Circumference and volumetric measurements are then made following injection of dye into paws.

[1245] Using the knee joint as a landmark, a mid-leg inguinal incision is made circumferentially allowing the femoral vessels to be located. Forceps and hemostats are used to dissect and separate the skin flaps. After locating the femoral vessels, the lymphatic vessel that runs along side and underneath the vessel(s) is located. The main lymphatic vessels in this area are then electrically coagulated or suture ligated.

[1246] Using a microscope, muscles in back of the leg (near the semitendinosis and adductors) are bluntly dissected. The popliteal lymph node is then located. The 2 proximal and 2 distal lymphatic vessels and distal blood supply of the popliteal node are then ligated by suturing. The popliteal lymph node, and any accompanying adipose tissue, is then removed by cutting connective tissues.

[1247] Care is taken to control any mild bleeding resulting from this procedure. After lymphatics are occluded, the skin flaps are sealed by using liquid skin (Vetbond) (AJ Buck). The separated skin edges are sealed to the underlying muscle tissue while leaving a gap of ˜0.5 cm around the leg. Skin also may be anchored by suturing to underlying muscle when necessary.

[1248] To avoid infection, animals are housed individually with mesh (no bedding). Recovering animals are checked daily through the optimal edematous peak, which typically occurred by day 5-7. The plateau edematous peak are then observed. To evaluate the intensity of the lymphedema, the circumference and volumes of 2 designated places on each paw before operation and daily for 7 days are measured. The effect of plasma proteins on lymphedema is determined and whether protein analysis is a useful testing perimeter is also investigated. The weights of both control and edematous limbs are evaluated at 2 places. Analysis is performed in a blind manner.

[1249] Circumference Measurements: Under brief gas anesthetic to prevent limb movement, a cloth tape is used to measure limb circumference. Measurements are done at the ankle bone and dorsal paw by 2 different people and those 2 readings are averaged. Readings are taken from both control and edematous limbs.

[1250] Volumetric Measurements: On the day of surgery, animals are anesthetized with Pentobarbital and are tested prior to surgery. For daily volumetrics animals are under brief halothane anesthetic (rapid immobilization and quick recovery), and both legs are shaved and equally marked using waterproof marker on legs. Legs are first dipped in water, then dipped into instrument to each marked level then measured by Buxco edema software (Chen/Victor). Data is recorded by one person, while the other is dipping the limb to marked area.

[1251] Blood-plasma protein measurements: Blood is drawn, spun, and serum separated prior to surgery and then at conclusion for total protein and Ca²⁺ comparison.

[1252] Limb Weight Comparison: After drawing blood, the animal is prepared for tissue collection. The limbs are amputated using a quillitine, then both experimental and control legs are cut at the ligature and weighed. A second weighing is done as the tibio-cacaneal joint is disarticulated and the foot is weighed.

[1253] Histological Preparations: The transverse muscle located behind the knee (popliteal) area is dissected and arranged in a metal mold, filled with freezeGel, dipped into cold methylbutane, placed into labeled sample bags at −80 EC until sectioning. Upon sectioning, the muscle is observed under fluorescent microscopy for lymphatics.

[1254] The studies described in this example tested activity of agonists or antagonists of the invention. However, one skilled in the art could easily modify the exemplified studies to test the activity of polynucleotides or polypeptides of the invention (e.g., gene therapy).

### Example 29

### Suppression of TNF Alpha-Induced Adhesion Molecule Expression by an Agonist or Antagonist of the Invention

[1255] The recruitment of lymphocytes to areas of inflammation and angiogenesis involves specific receptor-ligand interactions between cell surface adhesion molecules (CAMs) on lymphocytes and the vascular endothelium. The adhesion process, in both normal and pathological settings, follows a multi-step cascade that involves intercellular adhesion molecule-1 (ICAM-1), vascular cell adhesion molecule-1 (VCAM-1), and endothelial leukocyte adhesion molecule-1 (E-selectin) expression on endothelial cells (EC). The expression of these molecules and others on the vascular endothelium determines the efficiency with which leukocytes may adhere to the local vasculature and extravasate into the local tissue during the development of an inflammatory response. The local concentration of cytokines and growth factor participate in the modulation of the expression of these CAMs.

[1256] Tumor necrosis factor alpha (TNF-a), a potent proinflammatory cytokine, is a stimulator of all three CAMs on endothelial cells and may be involved in a wide variety of inflammatory responses, often resulting in a pathological outcome.

[1257] The potential of an agonist or antagonist of the invention to mediate a suppression of TNF-a induced CAM expression can be examined. A modified ELISA assay which uses ECs as a solid phase absorbent is employed to measure the amount of CAM expression on TNF-a treated ECs when co-stimulated with a member of the FGF family of proteins.

[1258] To perform the experiment, human umbilical vein endothelial cell (HUVEC) cultures are obtained from pooled cord harvests and maintained in growth medium (EGM-2; Clonetics, San Diego, Calif.) supplemented with 10% FCS and 1% penicillin/streptomycin in a 37 degree C. humidified incubator containing 5% CO₂. HUVECs are seeded in 96-well plates at concentrations of 1×10⁴ cells/well in EGM medium at 37 degree C. for 18-24 hrs or until confluent. The monolayers are subsequently washed 3 times with a serum-free solution of RPMI-1640 supplemented with 100 U/ml penicillin and 100 mg/ml streptomycin, and treated with a given cytokine and/or growth factor(s) for 24 h at 37 degree C. Following incubation, the cells are then evaluated for CAM expression.

[1259] Human Umbilical Vein Endothelial cells (HUVECs) are grown in a standard 96 well plate to confluence. Growth medium is removed from the cells and replaced with 90 ul of 199 Medium (10% FBS). Samples for testing and positive or negative controls are added to the plate in triplicate (in 10 ul volumes). Plates are incubated at 37 degree C. for either 5 h (selectin and integrin expression) or 24 h (integrin expression only). Plates are aspirated to remove medium and 100 μl of 0.1% paraformaldehyde-PBS (with Ca++ and Mg++) is added to each well. Plates are held at 4° C. for 30 min.

[1260] Fixative is then removed from the wells and wells are washed 1× with PBS(+Ca,Mg)+0.5% BSA and drained. Do not allow the wells to dry. Add 10 μl of diluted primary antibody to the test and control wells. Anti-ICAM-1-Biotin, Anti-VCAM-1-Biotin and Anti-E-selectin-Biotin are used at a concentration of 10 μg/ml (1:10 dilution of 0.1 mg/ml stock antibody). Cells are incubated at 37° C. for 30 min. in a humidified environment. Wells are washed ×3 with PBS(+Ca,Mg)+0.5% BSA.

[1261] Then add 20 μl of diluted ExtrAvidin-Alkaline Phosphotase (1:5,000 dilution) to each well and incubated at 37° C. for 30 min. Wells are washed ×3 with PBS(+Ca,Mg)+0.5% BSA. 1 tablet of p-Nitrophenol Phosphate pNPP is dissolved in 5 ml of glycine buffer (pH 10.4). 100 μl of pNPP substrate in glycine buffer is added to each test well. Standard wells in triplicate are prepared from the working dilution of the ExtrAvidin-Alkaline Phosphotase in glycine buffer: 1:5,000 (10⁰)>10^{-0.5}>10⁻¹>10^{-1.5}. 5 μl of each dilution is added to triplicate wells and the resulting AP content in each well is 5.50 ng, 1.74 ng, 0.55 ng, 0.18 ng. 100 μl of pNNP reagent must then be added to each of the standard wells. The plate must be incubated at 37° C. for 4 h. A volume of 50 μl of 3M NaOH is added to all wells. The results are quantified on a plate reader at 405 nm. The background subtraction option is used on blank wells filled with glycine buffer only. The template is set up to indicate the concentration of AP-conjugate in each standard well [5.50 ng; 1.74 ng; 0.55 ng; 0.18 ng]. Results are indicated as amount of bound AP-conjugate in each sample.

[1262] The studies described in this example tested activity of agonists or antagonists of the invention. However, one skilled in the art could easily modify the exemplified studies to test the activity of polynucleotides or polypeptides of the invention (e.g., gene therapy).

### Example 30

### Production of Polypeptide of the Invention for High-Throughput Screening Assays

[1263] The following protocol produces a supernatant containing polypeptide of the present invention to be tested. This supernatant can then be used in the Screening Assays described in Examples 32-41.

[1264] First, dilute Poly-D-Lysine (644 587 Boehringer-Mannheim) stock solution (1 mg/ml in PBS) 1:20 in PBS (w/o calcium or magnesium 17-516F Biowhittaker) for a working solution of 50 ug/ml. Add 200 ul of this solution to each well (24 well plates) and incubate at RT for 20 minutes. Be sure to distribute the solution over each well (note: a 12-channel pipetter may be used with tips on every other channel). Aspirate off the Poly-D-Lysine solution and rinse with 1 ml PBS (Phosphate Buffered Saline). The PBS should remain in the well until just prior to plating the cells and plates may be poly-lysine coated in advance for up to two weeks.

[1265] Plate 293T cells (do not carry cells past P+20) at 2×10⁵ cells/well in 0.5 ml DMEM (Dulbecco's Modified Eagle Medium) (with 4.5 G/L glucose and L-glutamine (12-604F Biowhittaker))/10% heat inactivated FBS(14-503F Biowhittaker)/1× Penstrep (17-602E Biowhittaker). Let the cells grow overnight.

[1266] The next day, mix together in a sterile solution basin: 300 ul Lipofectamine (18324-012 Gibco/BRL) and 5 ml Optimem 1 (31985070 Gibco/BRL)/96-well plate. With a small volume multi-channel pipetter, aliquot approximately 2 ug of an expression vector containing a polynucleotide insert, produced by the methods described in Examples 8-10, into an appropriately labeled 96-well round bottom plate. With a multi-channel pipetter, add 50 ul of the Lipofectamine/Optimem I mixture to each well. Pipette up and down gently to mix. Incubate at RT 15-45 minutes. After about 20 minutes, use a multi-channel pipetter to add 150 ul Optimem I to each well. As a control, one plate of vector DNA lacking an insert should be transfected with each set of transfections.

[1267] Preferably, the transfection should be performed by tag-teaming the following tasks. By tag-teaming, hands on time is cut in half, and the cells do not spend too much time on PBS. First, person A aspirates off the media from four 24-well plates of cells, and then person B rinses each well with 0.5-1 ml PBS. Person A then aspirates off PBS rinse, and person B, using a12-channel pipetter with tips on every other channel, adds the 200 ul of DNA/Lipofectamine/Optimem I complex to the odd wells first, then to the even wells, to each row on the 24-well plates. Incubate at 37 degree C. for 6 hours.

[1268] While cells are incubating, prepare appropriate media, either 1% BSA in DMEM with 1× penstrep, or HGS CHO-5 media (116.6 mg/L of CaCl2 (anhyd); 0.00130 mg/L CuSO₄.5H₂O; 0.050 mg/L of Fe(NO₃)₃-9H₂O; 0.417 mg/L of FeSO₄-7H₂O; 311.80 mg/L of Kcl; 28.64 mg/L of MgCl₂; 48.84 mg/L of MgSO₄; 6995.50 mg/L of NaCl; 2400.0 mg/L of NaHCO₃; 62.50 mg/L of NaH₂PO₄—H₂0; 71.02 mg/L of Na₂HPO4; 0.4320 mg/L of ZnSO₄-7H₂O; 0.002 mg/L of Arachidonic Acid; 1.022 mg/L of Cholesterol; 0.070 mg/L of DL-alpha-Tocopherol-Acetate; 0.0520 mg/L of Linoleic Acid; 0.010 mg/L of Linolenic Acid; 0.010 mg/L of Myristic Acid; 0.010 mg/L of Oleic Acid; 0.010 mg/L of Palmitric Acid; 0.010 mg/L of Palmitic Acid; 100 mg/L of Pluronic F-68; 0.010 mg/L of Stearic Acid; 2.20 mg/L of Tween 80; 4551 mg/L of D-Glucose; 130.85 mg/ml of L-Alanine; 147.50 mg/ml of L-Arginine-HCL; 7.50 mg/ml of L-Asparagine-H₂0; 6.65 mg/ml of L-Aspartic Acid; 29.56 mg/ml of L-Cystine-2HCL-H₂O; 31.29 mg/ml of L-Cystine-2HCL; 7.35 mg/ml of L-Glutamic Acid; 365.0 mg/ml of L-Glutamine; 18.75 mg/ml of Glycine; 52.48 mg/ml of L-Histidine-HCL-H₂0; 106.97 mg/ml of L-Isoleucine; 111.45 mg/ml of L-Leucine; 163.75 mg/ml of L-Lysine HCL; 32.34 mg/ml of L-Methionine; 68.48 mg/ml of L-Phenylalainine; 40.0 mg/ml of L-Proline; 26.25 mg/ml of L-Serine; 101.05 mg/ml of L-Threonine; 19.22 mg/ml of L-Tryptophan; 91.79 mg/ml of L-Tryrosine-2Na-2H₂0; and 99.65 mg/ml of L-Valine; 0.0035 mg/L of Biotin; 3.24 mg/L of D-Ca Pantothenate; 11.78 mg/L of Choline Chloride; 4.65 mg/L of Folic Acid; 15.60 mg/L of i-Inositol; 3.02 mg/L of Niacinamide; 3.00 mg/L of Pyridoxal HCL; 0.031 mg/L of Pyridoxine HCL; 0.319 mg/L of Riboflavin; 3.17 mg/L of Thiamine HCL; 0.365 mg/L of Thymidine; 0.680 mg/L of Vitamin B₁₂; 25 mM of HEPES Buffer; 2.39 mg/L of Na Hypoxanthine; 0.105 mg/L of Lipoic Acid; 0.081 mg/L of Sodium Putrescine-2HCL; 55.0 mg/L of Sodium Pyruvate; 0.0067 mg/L of Sodium Selenite; 20 uM of Ethanolamine; 0.122 mg/L of Ferric Citrate; 41.70 mg/L of Methyl-B-Cyclodextrin complexed with Linoleic Acid; 33.33 mg/L of Methyl-B-Cyclodextrin complexed with Oleic Acid; 10 mg/L of Methyl-B-Cyclodextrin complexed with Retinal Acetate. Adjust osmolarity to 327 mOsm) with 2 mm glutamine and 1× penstrep. (BSA (81-068-3 Bayer) 100 gm dissolved in IL DMEM for a 10% BSA stock solution). Filter the media and collect 50 ul for endotoxin assay in 15 ml polystyrene conical.

[1269] The transfection reaction is terminated, preferably by tag-teaming, at the end of the incubation period. Person A aspirates off the transfection media, while person B adds 1.5 ml appropriate media to each well. Incubate at 37 degree C. for 45 or 72 hours depending on the media used: 1% BSA for 45 hours or CHO-5 for 72 hours.

[1270] On day four, using a 300 ul multichannel pipetter, aliquot 600 ul in one 1 ml deep well plate and the remaining supernatant into a 2 ml deep well. The supernatants from each well can then be used in the assays described in Examples 32-39.

[1271] It is specifically understood that when activity is obtained in any of the assays described below using a supernatant, the activity originates from either the polypeptide of the present invention directly (e.g., as a secreted protein) or by polypeptide of the present invention inducing expression of other proteins, which are then secreted into the supernatant. Thus, the invention further provides a method of identifying the protein in the supernatant characterized by an activity in a particular assay.

### Example 31

### Construction of GAS Reporter Construct

[1272] One signal transduction pathway involved in the differentiation and proliferation of cells is called the Jaks-STATs pathway. Activated proteins in the Jaks-STATs pathway bind to gamma activation site “GAS” elements or interferon-sensitive responsive element (“ISRE”), located in the promoter of many genes. The binding of a protein to these elements alter the expression of the associated gene.

[1273] GAS and ISRE elements are recognized by a class of transcription factors called Signal Transducers and Activators of Transcription, or “STATs.” There are six members of the STATs family. Stat1 and Stat3 are present in many cell types, as is Stat2 (as response to IFN-alpha is widespread). Stat4 is more restricted and is not in many cell types though it has been found in T helper class I, cells after treatment with IL-12. Stat5 was originally called mammary growth factor, but has been found at higher concentrations in other cells including myeloid cells. It can be activated in tissue culture cells by many cytokines.

[1274] The STATs are activated to translocate from the cytoplasm to the nucleus upon tyrosine phosphorylation by a set of kinases known as the Janus Kinase (“Jaks”) family. Jaks represent a distinct family of soluble tyrosine kinases and include Tyk2, Jak1, Jak2, and Jak3. These kinases display significant sequence similarity and are generally catalytically inactive in resting cells.

[1275] The Jaks are activated by a wide range of receptors summarized in the Table below. (Adapted from review by Schidler and Darnell, Ann. Rev. Biochem. 64:621-51 (1995)). A cytokine receptor family, capable of activating Jaks, is divided into two groups: (a) Class 1 includes receptors for IL-2, IL-3, IL-4, IL-6, IL-7, IL-9, IL-11, IL-12, IL-15, Epo, PRL, GH, G-CSF, GM-CSF, LIF, CNTF, and thrombopoietin; and (b) Class 2 includes IFN-a, IFN-g, and IL-10. The Class 1 receptors share a conserved cysteine motif (a set of four conserved cysteines and one tryptophan) and a WSXWS motif (a membrane proximal region encoding Trp-Ser-Xaa-Trp-Ser (SEQ ID NO: 2)).

[1276] Thus, on binding of a ligand to a receptor, Jaks are activated, which in turn activate STATs, which then translocate and bind to GAS elements. This entire process is encompassed in the Jaks-STATs signal transduction pathway. Therefore, activation of the Jaks-STATs pathway, reflected by the binding of the GAS or the ISRE element, can be used to indicate proteins involved in the proliferation and differentiation of cells. For example, growth factors and cytokines are known to activate the Jaks-STATs pathway (See Table below). Thus, by using GAS elements linked to reporter molecules, activators of the Jaks-STATs pathway can be identified.

| | JAKs | | | | | |
|---|---|---|---|---|---|---|
| Ligand | tyk2 | Jak1 | Jak2 | Jak3 | STATS | GAS(elements) or ISRE |
| IFN family | | | | | | |
| IFN-a/B | + | + | − | − | 1, 2, 3 | ISRE |
| IFN-g | | + | + | − | 1 | GAS (IRF1 > Lys6 > IFP) |
| Il-10 | + | ? | ? | − | 1, 3 | |
| gp130 family | | | | | | |
| IL-6 (Pleiotropic) | + | + | + | ? | 1, 3 | GAS (IRF1 > Lys6 > IFP) |
| Il-11 (Pleiotropic) | ? | + | ? | ? | 1, 3 | |
| OnM (Pleiotropic) | ? | + | + | ? | 1, 3 | |
| LIF (Pleiotropic) | ? | + | + | ? | 1, 3 | |
| CNTF (Pleiotropic) | −/+ | + | + | ? | 1, 3 | |
| G-CSF (Pleiotropic) | ? | + | ? | ? | 1, 3 | |
| IL-12 (Pleiotropic) | + | − | + | + | 1, 3 | |
| g-C family | | | | | | |
| IL-2 (lymphocytes) | − | + | − | + | 1, 3, 5 | GAS |
| IL-4 (lymph/myeloid) | − | + | − | + | 6 | GAS (IRF1 = IFP >> Ly6)(IgH) |
| IL-7 (lymphocytes) | − | + | − | + | 5 | GAS |
| IL-9 (lymphocytes) | − | + | − | + | 5 | GAS |
| IL-13 (lymphocyte) | − | + | ? | ? | 6 | GAS |
| IL-15 | ? | + | ? | + | 5 | GAS |
| gp140 family | | | | | | |
| IL-3 (myeloid) | − | − | + | − | 5 | GAS (IRF1 > IFP >> Ly6) |
| IL-5 (myeloid) | − | − | + | − | 5 | GAS |
| GM-CSF (myeloid) | − | − | + | − | 5 | GAS |
| Growth hormone family | | | | | | |
| GH | ? | − | + | − | 5 | |
| PRL | ? | +/− | + | − | 1, 3, 5 | |
| EPO | ? | − | + | − | 5 | GAS(B-CAS > IRF1 = IFP >> Ly6) |
| Receptor Tyrosine Kinases | | | | | | |
| EGF | ? | + | + | − | 1, 3 | GAS (IRF1) |
| PDGF | ? | + | + | − | 1, 3 | |
| CSF-1 | ? | + | + | − | 1, 3 | GAS (not IRF1) |

[1277] To construct a synthetic GAS containing promoter element, which is used in the Biological Assays described in Examples 32-33, a PCR based strategy is employed to generate a GAS-SV40 promoter sequence. The 5′ primer contains four tandem copies of the GAS binding site found in the IRF1 promoter and previously demonstrated to bind STATs upon induction with a range of cytokines (Rothman et al., Immunity 1:457-468 (1994).), although other GAS or ISRE elements can be used instead. The 5′ primer also contains 18 bp of sequence complementary to the SV40 early promoter sequence and is flanked with an XhoI site. The sequence of the 5′ primer is:

(SEQ ID NO: 3)

5′:GCGCCTCGAGATTTCCCCGAAATCTAGATTTCCCCGAAATGATTTCC
CCGAAATGATTTCCCCGAAATATCTGCCATCTCAATTAG:3′

[1278] The downstream primer is complementary to the SV40 promoter and is flanked with a Hind III site: 5′:GCGGCAAGCTTTTTGCAAAGCCTAGGC:3′ (SEQ ID NO: 4)

[1279] PCR amplification is performed using the SV40 promoter template present in the B-gal:promoter plasmid obtained from Clontech. The resulting PCR fragment is digested with XhoI/Hind III and subcloned into BLSK2-. (Stratagene.) Sequencing with forward and reverse primers confirms that the insert contains the following sequence:

(SEQ ID NO: 5)

5′:CTCGAGATTTCCCCGAAATCTAGATTTCCCCGAAATGATTTCCCCGA
AATGATTTCCCCGAAATATCTGCCATCTCAATTAGTCAGCAACCATAGTC
CCGCCCCTAACTCCGCCCATCCCGCCCCTAACTCCGCCCAGTTCCGCCCA
TTCTCCGCCCCATGGCTGACTAATTTTTTTTATTTATGCAGAGGCCGAGG
CCGCCTCGGCCTCTGAGCTATTCCAGAAGTAGTGAGGAGGCTTTTTTGGA
GGCCTAGGCTTTTGCAAAAAGCTT:3′

[1280] With this GAS promoter element linked to the SV40 promoter, a GAS:SEAP2 reporter construct is next engineered. Here, the reporter molecule is a secreted alkaline phosphatase, or “SEAP.” Clearly, however, any reporter molecule can be instead of SEAP, in this or in any of the other Examples. Well known reporter molecules that can be used instead of SEAP include chloramphenicol acetyltransferase (CAT), luciferase, alkaline phosphatase, B-galactosidase, green fluorescent protein (GFP), or any protein detectable by an antibody.

[1281] The above sequence confirmed synthetic GAS-SV40 promoter element is subcloned into the pSEAP-Promoter vector obtained from Clontech using HindIII and XhoI, effectively replacing the SV40 promoter with the amplified GAS:SV40 promoter element, to create the GAS-SEAP vector. However, this vector does not contain a neomycin resistance gene, and therefore, is not preferred for mammalian expression systems.

[1282] Thus, in order to generate mammalian stable cell lines expressing the GAS-SEAP reporter, the GAS-SEAP cassette is removed from the GAS-SEAP vector using SalI and NotI, and inserted into a backbone vector containing the neomycin resistance gene, such as pGFP-1 (Clontech), using these restriction sites in the multiple cloning site, to create the GAS-SEAP/Neo vector. Once this vector is transfected into mammalian cells, this vector can then be used as a reporter molecule for GAS binding as described in Examples 32-33.

[1283] Other constructs can be made using the above description and replacing GAS with a different promoter sequence. For example, construction of reporter molecules containing EGR and NF-KB promoter sequences are described in Examples 34 and 35. However, many other promoters can be substituted using the protocols described in these Examples. For instance, SRE, IL-2, NFAT, or Osteocalcin promoters can be substituted, alone or in combination (e.g., GAS/NF-KB/EGR, GAS/NF-KB, Il-2/NFAT, or NF-KB/GAS). Similarly, other cell lines can be used to test reporter construct activity, such as HELA (epithelial), HUVEC (endothelial), Reh (B-cell), Saos-2 (osteoblast), HUVAC (aortic), or Cardiomyocyte.

### Example 32

### High-Throughput Screening Assay for T-Cell Activity

[1284] The following protocol is used to assess T-cell activity by identifying factors, and determining whether supernate containing a polypeptide of the invention proliferates and/or differentiates T-cells. T-cell activity is assessed using the GAS/SEAP/Neo construct produced in Example 31. Thus, factors that increase SEAP activity indicate the ability to activate the Jaks-STATS signal transduction pathway. The T-cell used in this assay is Jurkat T-cells (ATCC Accession No. TIB-152), although Molt-3 cells (ATCC Accession No. CRL-1552) and Molt-4 cells (ATCC Accession No. CRL-1582) cells can also be used.

[1285] Jurkat T-cells are lymphoblastic CD4+ Th1 helper cells. In order to generate stable cell lines, approximately 2 million Jurkat cells are transfected with the GAS-SEAP/neo vector using DMRIE-C (Life Technologies) (transfection procedure described below). The transfected cells are seeded to a density of approximately 20,000 cells per well and transfectants resistant to 1 mg/ml genticin selected. Resistant colonies are expanded and then tested for their response to increasing concentrations of interferon gamma. The dose response of a selected clone is demonstrated.

[1286] Specifically, the following protocol will yield sufficient cells for 75 wells containing 200 ul of cells. Thus, it is either scaled up, or performed in multiple to generate sufficient cells for multiple 96 well plates. Jurkat cells are maintained in RPMI+10% serum with 1% Pen-Strep. Combine 2.5 mls of OPTI-MEM (Life Technologies) with 10 ug of plasmid DNA in a T25 flask. Add 2.5 ml OPTI-MEM containing 50 ul of DMRIE-C and incubate at room temperature for 15-45 mins.

[1287] During the incubation period, count cell concentration, spin down the required number of cells (10 per transfection), and resuspend in OPTI-MEM to a final concentration of 10⁷ cells/ml. Then add 1 ml of 1×10⁷ cells in OPTI-MEM to T25 flask and incubate at 37 degree C. for 6 hrs. After the incubation, add 10 ml of RPMI+15% serum.

[1288] The Jurkat:GAS-SEAP stable reporter lines are maintained in RPMI+10% serum, 1 mg/ml Genticin, and 1% Pen-Strep. These cells are treated with supernatants containing polypeptide of the present invention or polypeptide of the present invention induced polypeptides as produced by the protocol described in Example 30.

[1289] On the day of treatment with the supernatant, the cells should be washed and resuspended in fresh RPMI+10% serum to a density of 500,000 cells per ml. The exact number of cells required will depend on the number of supernatants being screened. For one 96 well plate, approximately 10 million cells (for 10 plates, 100 million cells) are required.

[1290] Transfer the cells to a triangular reservoir boat, in order to dispense the cells into a 96 well dish, using a 12 channel pipette. Using a 12 channel pipette, transfer 200 ul of cells into each well (therefore adding 100,000 cells per well).

[1291] After all the plates have been seeded, 50 ul of the supernatants are transferred directly from the 96 well plate containing the supernatants into each well using a 12 channel pipette. In addition, a dose of exogenous interferon gamma (0.1, 1.0, 10 ng) is added to wells H9, H10, and H11 to serve as additional positive controls for the assay.

[1292] The 96 well dishes containing Jurkat cells treated with supernatants are placed in an incubator for 48 hrs (note: this time is variable between 48-72 hrs). 35 ul samples from each well are then transferred to an opaque 96 well plate using a 12 channel pipette. The opaque plates should be covered (using sellophene covers) and stored at −20 degree C. until SEAP assays are performed according to Example 36. The plates containing the remaining treated cells are placed at 4 degree C. and serve as a source of material for repeating the assay on a specific well if desired.

[1293] As a positive control, 100 Unit/ml interferon gamma can be used which is known to activate Jurkat T cells. Over 30 fold induction is typically observed in the positive control wells.

[1294] The above protocol may be used in the generation of both transient, as well as, stable transfected cells, which would be apparent to those of skill in the art.

### Example 33

### High-Throughput Screening Assay Identifying Myeloid Activity

[1295] The following protocol is used to assess myeloid activity of polypeptide of the present invention by determining whether polypeptide of the present invention proliferates and/or differentiates myeloid cells. Myeloid cell activity is assessed using the GAS/SEAP/Neo construct produced in Example 31. Thus, factors that increase SEAP activity indicate the ability to activate the Jaks-STATS signal transduction pathway. The myeloid cell used in this assay is U937, a pre-monocyte cell line, although TF-1, HL60, or KG1 can be used.

[1296] To transiently transfect U937 cells with the GAS/SEAP/Neo construct produced in Example 31, a DEAE-Dextran method (Kharbanda et. al., 1994, Cell Growth & Differentiation, 5:259-265) is used. First, harvest 2×10⁷ U937 cells and wash with PBS. The U937 cells are usually grown in RPMI 1640 medium containing 10% heat-inactivated fetal bovine serum (FBS) supplemented with 100 units/ml penicillin and 100 mg/ml streptomycin.

[1297] Next, suspend the cells in 1 ml of 20 mM Tris-HCl (pH 7.4) buffer containing 0.5 mg/ml DEAE-Dextran, 8 ug GAS-SEAP2 plasmid DNA, 140 mM NaCl, 5 mM KCl, 375 uM Na₂HPO₄.7H₂O, 1 mM MgCl₂, and 675 uM CaCl₂. Incubate at 37 degrees C. for 45 min.

[1298] Wash the cells with RPMI 1640 medium containing 10% FBS and then resuspend in 10 ml complete medium and incubate at 37 degree C. for 36 hr.

[1299] The GAS-SEAP/U937 stable cells are obtained by growing the cells in 400 ug/ml G418. The G418-free medium is used for routine growth but every one to two months, the cells should be re-grown in 400 ug/ml G418 for couple of passages.

[1300] These cells are tested by harvesting 1×10⁸ cells (this is enough for ten 96-well plates assay) and wash with PBS. Suspend the cells in 200 ml above described growth medium, with a final density of 5×10⁵ cells/ml. Plate 200 ul cells per well in the 96-well plate (or 1×10⁵ cells/well).

[1301] Add 50 ul of the supernatant prepared by the protocol described in Example 30. Incubate at 37 degee C for 48 to 72 hr. As a positive control, 100 Unit/ml interferon gamma can be used which is known to activate U937 cells. Over 30 fold induction is typically observed in the positive control wells. SEAP assay the supernatant according to the protocol described in Example 36.

### Example 34

### High-Throughput Screening Assay Identifying Neuronal Activity

[1302] When cells undergo differentiation and proliferation, a group of genes are activated through many different signal transduction pathways. One of these genes, EGR1 (early growth response gene 1), is induced in various tissues and cell types upon activation. The promoter of EGR1 is responsible for such induction. Using the EGR1 promoter linked to reporter molecules, activation of cells can be assessed by polypeptide of the present invention.

[1303] Particularly, the following protocol is used to assess neuronal activity in PC12 cell lines. PC12 cells (rat phenochromocytoma cells) are known to proliferate and/or differentiate by activation with a number of mitogens, such as TPA (tetradecanoyl phorbol acetate), NGF (nerve growth factor), and EGF (epidermal growth factor). The EGR1 gene expression is activated during this treatment. Thus, by stably transfecting PC12 cells with a construct containing an EGR promoter linked to SEAP reporter, activation of PC12 cells by polypeptide of the present invention can be assessed.

[1304] The EGR/SEAP reporter construct can be assembled by the following protocol. The EGR-1 promoter sequence (−633 to +1) (Sakamoto K et al., Oncogene 6:867-871 (1991)) can be PCR amplified from human genomic DNA using the following primers:

(SEQ ID NO: 6)

5′ GCGCTCGAGGGATGACAGCGATAGAACCCCGG-3′

(SEQ ID NO: 7)

5′ GCGAAGCTTCGCGACTCCCCGGATCCGCCTC-3′

[1305] Using the GAS:SEAP/Neo vector produced in Example 31, EGR1 amplified product can then be inserted into this vector. Linearize the GAS:SEAP/Neo vector using restriction enzymes XhoI/HindIII, removing the GAS/SV40 stuffer. Restrict the EGR1 amplified product with these same enzymes. Ligate the vector and the EGR1 promoter.

[1306] To prepare 96 well-plates for cell culture, two mls of a coating solution (1:30 dilution of collagen type I (Upstate Biotech Inc. Cat#08-115) in 30% ethanol (filter sterilized)) is added per one 10 cm plate or 50 ml per well of the 96-well plate, and allowed to air dry for 2 hr.

[1307] PC12 cells are routinely grown in RPMI-1640 medium (Bio Whittaker) containing 10% horse serum (JRH BIOSCIENCES, Cat. # 12449-78P), 5% heat-inactivated fetal bovine serum (FBS) supplemented with 100 units/ml penicillin and 100 ug/ml streptomycin on a precoated 10 cm tissue culture dish. One to four split is done every three to four days. Cells are removed form the plates by scraping and resuspended with pipetting up and down for more than 15 times.

[1308] Transfect the EGR/SEAP/Neo construct into PC12 using the Lipofectamine protocol described in Example 30. EGR-SEAP/PC12 stable cells are obtained by growing the cells in 300 ug/ml G418. The G418-free medium is used for routine growth but every one to two months, the cells should be re-grown in 300 ug/ml G418 for couple of passages.

[1309] To assay for neuronal activity, a 10 cm plate with cells around 70 to 80% confluent is screened by removing the old medium. Wash the cells once with PBS (Phosphate buffered saline). Then starve the cells in low serum medium (RPMI-1640 containing 1% horse serum and 0.5% FBS with antibiotics) overnight.

[1310] The next morning, remove the medium and wash the cells with PBS. Scrape off the cells from the plate, suspend the cells well in 2 ml low serum medium. Count the cell number and add more low serum medium to reach final cell density as 5×10⁵ cells/ml.

[1311] Add 200 ul of the cell suspension to each well of 96-well plate (equivalent to 1×10⁵ cells/well). Add 50 ul supernatant produced by Example 30, 37 degree C. for 48 to 72 hr. As a positive control, a growth factor known to activate PC12 cells through EGR can be used, such as 50 ng/ul of Neuronal Growth Factor (NGF). Over fifty-fold induction of SEAP is typically seen in the positive control wells. SEAP assay the supernatant according to Example 36.

### Example 35

### High-Throughput Screening Assay for T-Cell Activity

[1312] NF-KB (Nuclear Factor KB) is a transcription factor activated by a wide variety of agents including the inflammatory cytokines IL-1 and TNF, CD30 and CD40, lymphotoxin-alpha and lymphotoxin-beta, by exposure to LPS or thrombin, and by expression of certain viral gene products. As a transcription factor, NF-KB regulates the expression of genes involved in immune cell activation, control of apoptosis (NF-KB appears to shield cells from apoptosis), B and T-cell development, anti-viral and antimicrobial responses, and multiple stress responses.

[1313] In non-stimulated conditions, NF-KB is retained in the cytoplasm with I-KB (Inhibitor KB). However, upon stimulation, I-KB is phosphorylated and degraded, causing NF-KB to shuttle to the nucleus, thereby activating transcription of target genes. Target genes activated by NF-KB include IL-2, IL-6, GM-CSF, ICAM-1 and class 1 MHC.

[1314] Due to its central role and ability to respond to a range of stimuli, reporter constructs utilizing the NF-KB promoter element are used to screen the supernatants produced in Example 30. Activators or inhibitors of NF-KB would be useful in treating, preventing, and/or diagnosing diseases. For example, inhibitors of NF-KB could be used to treat those diseases related to the acute or chronic activation of NF-KB, such as rheumatoid arthritis.

[1315] To construct a vector containing the NF-KB promoter element, a PCR based strategy is employed. The upstream primer contains four tandem copies of the NF-KB binding site (GGGGACTTTCCC) (SEQ ID NO: 8), 18 bp of sequence complementary to the 5′ end of the SV40 early promoter sequence, and is flanked with an XhoI site:

(SEQ ID NO: 9)

5′:GCGGCCTCGAGGGGACTTTCCCGGGGACTTTCCGGGGACTTTCCGGG
ACTTTCCATCCTGCCATCTCAATTAG:3′

[1316] The downstream primer is complementary to the 3′ end of the SV40 promoter and is flanked with a Hind III site:

(SEQ ID NO: 4)

5′:GCGGCAAGCTTTTTGCAAAGCCTAGGC:3′

[1317] PCR amplification is performed using the SV40 promoter template present in the pB-gal:promoter plasmid obtained from Clontech. The resulting PCR fragment is digested with XhoI and Hind III and subcloned into BLSK2-. (Stratagene) Sequencing with the T7 and T3 primers confirms the insert contains the following sequence:

(SEQ ID NO: 10)

5′:CTCGAGGGGACTTTCCCGGGGACTTTCCGGGGACTTTCCGGGACTTT
CCATCTGCCATCTCAATTAGTCAGCAACCATAGTCCCGCCCCTAACTCCG
CCCATCCCGCCCCTAACTCCGCCCAGTTCCGCCCATTCTCCGCCCCATGG
CTGACTAATTTTTTTTATTTATGCAGAGGCCGAGGCCGCCTCGGCCTCTG
AGCTATTCCAGAAGTAGTGAGGAGGCTTTTTTGGAGGCCTAGGCTTTTGC
AAAAAGCTT:3′

[1318] Next, replace the SV40 minimal promoter element present in the pSEAP2-promoter plasmid (Clontech) with this NF-KB/SV40 fragment using XhoI and HindIII. However, this vector does not contain a neomycin resistance gene, and therefore, is not preferred for mammalian expression systems.

[1319] In order to generate stable mammalian cell lines, the NF-KB/SV40/SEAP cassette is removed from the above NF-KB/SEAP vector using restriction enzymes SalI and NotI, and inserted into a vector containing neomycin resistance. Particularly, the NF-KB/SV40/SEAP cassette was inserted into pGFP-1 (Clontech), replacing the GFP gene, after restricting pGFP-1 with SalI and NotI.

[1320] Once NF-KB/SV40/SEAP/Neo vector is created, stable Jurkat T-cells are created and maintained according to the protocol described in Example 32. Similarly, the method for assaying supernatants with these stable Jurkat T-cells is also described in Example 32. As a positive control, exogenous TNF alpha (0.1, 1, 10 ng) is added to wells H9, H10, and H11, with a 5-10 fold activation typically observed.

### Example 36

### Assay for SEAP Activity

[1321] As a reporter molecule for the assays described in Examples 32-35, SEAP activity is assayed using the Tropix Phospho-light Kit (Cat. BP-400) according to the following general procedure. The Tropix Phospho-light Kit supplies the Dilution, Assay, and Reaction Buffers used below.

[1322] Prime a dispenser with the 2.5× Dilution Buffer and dispense 15 ul of 2.5× dilution buffer into Optiplates containing 35 ul of a supernatant. Seal the plates with a plastic sealer and incubate at 65 degree C. for 30 min. Separate the Optiplates to avoid uneven heating.

[1323] Cool the samples to room temperature for 15 minutes. Empty the dispenser and prime with the Assay Buffer. Add 50 ml Assay Buffer and incubate at room temperature 5 min. Empty the dispenser and prime with the Reaction Buffer (see the Table below). Add 50 ul Reaction Buffer and incubate at room temperature for 20 minutes. Since the intensity of the chemiluminescent signal is time dependent, and it takes about 10 minutes to read 5 plates on a luminometer, thus one should treat 5 plates at each time and start the second set 10 minutes later.

[1324] Read the relative light unit in the luminometer. Set H12 as blank, and print the results. An increase in chemiluminescence indicates reporter activity.

Reaction Buffer Formulation:

| # of plates | Rxn buffer diluent (ml) | CSPD (ml) |
|---|---|---|
| 10 | 60 | 3 |
| 11 | 65 | 3.25 |
| 12 | 70 | 3.5 |
| 13 | 75 | 3.75 |
| 14 | 80 | 4 |
| 15 | 85 | 4.25 |
| 16 | 90 | 4.5 |
| 17 | 95 | 4.75 |
| 18 | 100 | 5 |
| 19 | 105 | 5.25 |
| 20 | 110 | 5.5 |
| 21 | 115 | 5.75 |
| 22 | 120 | 6 |
| 23 | 125 | 6.25 |
| 24 | 130 | 6.5 |
| 25 | 135 | 6.75 |
| 26 | 140 | 7 |
| 27 | 145 | 7.25 |
| 28 | 150 | 7.5 |
| 29 | 155 | 7.75 |
| 30 | 160 | 8 |
| 31 | 165 | 8.25 |
| 32 | 170 | 8.5 |
| 33 | 175 | 8.75 |
| 34 | 180 | 9 |
| 35 | 185 | 9.25 |
| 36 | 190 | 9.5 |
| 37 | 195 | 9.75 |
| 38 | 200 | 10 |
| 39 | 205 | 10.25 |
| 40 | 210 | 10.5 |
| 41 | 215 | 10.75 |
| 42 | 220 | 11 |
| 43 | 225 | 11.25 |
| 44 | 230 | 11.5 |
| 45 | 235 | 11.75 |
| 46 | 240 | 12 |
| 47 | 245 | 12.25 |
| 48 | 250 | 12.5 |
| 49 | 255 | 12.75 |
| 50 | 260 | 13 |

### Example 37

### High-Throughput Screening Assay Identifying Changes in Small Molecule Concentration and Membrane Permeability

[1325] Binding of a ligand to a receptor is known to alter intracellular levels of small molecules, such as calcium, potassium, sodium, and pH, as well as alter membrane potential. These alterations can be measured in an assay to identify supernatants which bind to receptors of a particular cell. Although the following protocol describes an assay for calcium, this protocol can easily be modified to detect changes in potassium, sodium, pH, membrane potential, or any other small molecule which is detectable by a fluorescent probe.

[1326] The following assay uses Fluorometric Imaging Plate Reader (“FLIPR”) to measure changes in fluorescent molecules (Molecular Probes) that bind small molecules. Clearly, any fluorescent molecule detecting a small molecule can be used instead of the calcium fluorescent molecule, fluo-4 (Molecular Probes, Inc.; catalog no. F-14202), used here.

[1327] For adherent cells, seed the cells at 10,000 cells/well in a Co-star black 96-well plate with clear bottom. The plate is incubated in a CO₂ incubator for 20 hours. The adherent cells are washed two times in Biotek washer with 200 ul of HBSS (Hank's Balanced Salt Solution) leaving 100 ul of buffer after the final wash.

[1328] A stock solution of 1 mg/ml fluo-4 is made in 10% pluronic acid DMSO. To load the cells with fluo-4, 50 ul of 12 ug/ml fluo-4 is added to each well. The plate is incubated at 37 degrees C. in a CO₂ incubator for 60 min. The plate is washed four times in the Biotek washer with HBSS leaving 100 ul of buffer.

[1329] For non-adherent cells, the cells are spun down from culture media. Cells are re-suspended to 2-5×10⁶ cells/ml with HBSS in a 50-ml conical tube. 4 ul of 1 mg/ml fluo-4 solution in 10% pluronic acid DMSO is added to each ml of cell suspension. The tube is then placed in a 37 degrees C. water bath for 30-60 min. The cells are washed twice with HBSS, resuspended to 1×10⁶ cells/ml, and dispensed into a microplate, 100 ul/well. The plate is centrifuged at 1000 rpm for 5 min. The plate is then washed once in Denley Cell Wash with 200 ul, followed by an aspiration step to 100 ul final volume.

[1330] For a non-cell based assay, each well contains a fluorescent molecule, such as fluo-4. The supernatant is added to the well, and a change in fluorescence is detected.

[1331] To measure the fluorescence of intracellular calcium, the FLIPR is set for the following parameters: (1) System gain is 300-800 mW; (2) Exposure time is 0.4 second; (3) Camera F/stop is F/2; (4) Excitation is 488 nm; (5) Emission is 530 nm; and (6) Sample addition is 50 ul. Increased emission at 530 nm indicates an extracellular signaling event caused by the a molecule, either polypeptide of the present invention or a molecule induced by polypeptide of the present invention, which has resulted in an increase in the intracellular Ca⁺⁺ concentration.

### Example 38

### High-Throughput Screening Assay Identifying Tyrosine Kinase Activity

[1332] The Protein Tyrosine Kinases (PTK) represent a diverse group of transmembrane and cytoplasmic kinases. Within the Receptor Protein Tyrosine Kinase RPTK) group are receptors for a range of mitogenic and metabolic growth factors including the PDGF, FGF, EGF, NGF, HGF and Insulin receptor subfamilies. In addition there are a large family of RPTKs for which the corresponding ligand is unknown. Ligands for RPTKs include mainly secreted small proteins, but also membrane-bound and extracellular matrix proteins.

[1333] Activation of RPTK by ligands involves ligand-mediated receptor dimerization, resulting in transphosphorylation of the receptor subunits and activation of the cytoplasmic tyrosine kinases. The cytoplasmic tyrosine kinases include receptor associated tyrosine kinases of the src-family (e.g., src, yes, lck, lyn, fyn) and non-receptor linked and cytosolic protein tyrosine kinases, such as the Jak family, members of which mediate signal transduction triggered by the cytokine superfamily of receptors (e.g., the Interleukins, Interferons, GM-CSF, and Leptin).

[1334] Because of the wide range of known factors capable of stimulating tyrosine kinase activity, identifying whether polypeptide of the present invention or a molecule induced by polypeptide of the present invention is capable of activating tyrosine kinase signal transduction pathways is of interest. Therefore, the following protocol is designed to identify such molecules capable of activating the tyrosine kinase signal transduction pathways.

[1335] Seed target cells (e.g., primary keratinocytes) at a density of approximately 25,000 cells per well in a 96 well Loprodyne Silent Screen Plates purchased from Nalge Nunc (Naperville, Ill.). The plates are sterilized with two 30 minute rinses with 100% ethanol, rinsed with water and dried overnight. Some plates are coated for 2 hr with 100 ml of cell culture grade type I collagen (50 mg/ml), gelatin (2%) or polylysine (50 mg/ml), all of which can be purchased from Sigma Chemicals (St. Louis, Mo.) or 10% Matrigel purchased from Becton Dickinson (Bedford, Mass.), or calf serum, rinsed with PBS and stored at 4 degree C. Cell growth on these plates is assayed by seeding 5,000 cells/well in growth medium and indirect quantitation of cell number through use of alamarBlue as described by the manufacturer Alamar Biosciences, Inc. (Sacramento, Calif.) after 48 hr. Falcon plate covers #3071 from Becton Dickinson (Bedford, Mass.) are used to cover the Loprodyne Silent Screen Plates. Falcon Microtest III cell culture plates can also be used in some proliferation experiments.

[1336] To prepare extracts, A431 cells are seeded onto the nylon membranes of Loprodyne plates (20,000/200 ml/well) and cultured overnight in complete medium. Cells are quiesced by incubation in serum-free basal medium for 24 hr. After 5-20 minutes treatment with EGF (60 ng/ml) or 50 ul of the supernatant produced in Example 30, the medium was removed and 100 ml of extraction buffer ((20 mM HEPES pH 7.5, 0.15 M NaCl, 1% Triton X-100, 0.1% SDS, 2 mM Na3VO4, 2 mM Na4P2O7 and a cocktail of protease inhibitors (# 1836170) obtained from Boeheringer Mannheim (Indianapolis, Ind.)) is added to each well and the plate is shaken on a rotating shaker for 5 minutes at 4° C. The plate is then placed in a vacuum transfer manifold and the extract filtered through the 0.45 mm membrane bottoms of each well using house vacuum. Extracts are collected in a 96-well catch/assay plate in the bottom of the vacuum manifold and immediately placed on ice. To obtain extracts clarified by centrifugation, the content of each well, after detergent solubilization for 5 minutes, is removed and centrifuged for 15 minutes at 4 degree C. at 16,000×g.

[1337] Test the filtered extracts for levels of tyrosine kinase activity. Although many methods of detecting tyrosine kinase activity are known, one method is described here.

[1338] Generally, the tyrosine kinase activity of a supernatant is evaluated by determining its ability to phosphorylate a tyrosine residue on a specific substrate (a biotinylated peptide). Biotinylated peptides that can be used for this purpose include PSK1 (corresponding to amino acids 6-20 of the cell division kinase cdc2-p34) and PSK2 (corresponding to amino acids 1-17 of gastrin). Both peptides are substrates for a range of tyrosine kinases and are available from Boehringer Mannheim.

[1339] The tyrosine kinase reaction is set up by adding the following components in order. First, add 10 ul of 5 uM Biotinylated Peptide, then 10 ul ATP/Mg₂₊ (5 mM ATP/50 mM MgCl₂), then 10 ul of 5× Assay Buffer (40 mM imidazole hydrochloride, pH7.3, 40 mM beta-glycerophosphate, 1 mM EGTA, 100 mM MgCl₂, 5 mM MnCl₂, 0.5 mg/ml BSA), then 5 ul of Sodium Vanadate (1 mM), and then 5 ul of water. Mix the components gently and preincubate the reaction mix at 30 degree C. for 2 min. Initial the reaction by adding 10 ul of the control enzyme or the filtered supernatant.

[1340] The tyrosine kinase assay reaction is then terminated by adding 10 ul of 120 mm EDTA and place the reactions on ice.

[1341] Tyrosine kinase activity is determined by transferring 50 ul aliquot of reaction mixture to a microtiter plate (MTP) module and incubating at 37 degree C. for 20 min. This allows the streptavidin coated 96 well plate to associate with the biotinylated peptide. Wash the MTP module with 300 ul/well of PBS four times. Next add 75 ul of anti-phospotyrosine antibody conjugated to horse radish peroxidase (anti-P-Tyr-POD (0.5 u/ml)) to each well and incubate at 37 degree C. for one hour. Wash the well as above.

[1342] Next add 100 ul of peroxidase substrate solution (Boehringer Mannheim) and incubate at room temperature for at least 5 mins (up to 30 min). Measure the absorbance of the sample at 405 nm by using ELISA reader. The level of bound peroxidase activity is quantitated using an ELISA reader and reflects the level of tyrosine kinase activity.

### Example 39

### High-Throughput Screening Assay Identifying Phosphorylation Activity

[1343] As a potential alternative and/or complement to the assay of protein tyrosine kinase activity described in Example 38, an assay which detects activation (phosphorylation) of major intracellular signal transduction intermediates can also be used. For example, as described below one particular assay can detect tyrosine phosphorylation of the Erk-1 and Erk-2 kinases. However, phosphorylation of other molecules, such as Raf, JNK, p38 MAP, Map kinase kinase (MEK), MEK kinase, Src, Muscle specific kinase (MuSK), IRAK, Tec, and Janus, as well as any other phosphoserine, phosphotyrosine, or phosphothreonine molecule, can be detected by substituting these molecules for Erk-1 or Erk-2 in the following assay.

[1344] Specifically, assay plates are made by coating the wells of a 96-well ELISA plate with 0.1 ml of protein G (1 ug/ml) for 2 hr at room temp, (RT). The plates are then rinsed with PBS and blocked with 3% BSA/PBS for 1 hr at RT. The protein G plates are then treated with 2 commercial monoclonal antibodies (100 ng/well) against Erk-1 and Erk-2 (1 hr at RT) (Santa Cruz Biotechnology). (To detect other molecules, this step can easily be modified by substituting a monoclonal antibody detecting any of the above described molecules.) After 3-5 rinses with PBS, the plates are stored at 4 degree C. until use.

[1345] A431 cells are seeded at 20,000/well in a 96-well Loprodyne filterplate and cultured overnight in growth medium. The cells are then starved for 48 hr in basal medium (DMEM) and then treated with EGF (6 ng/well) or 50 ul of the supernatants obtained in Example 30 for 5-20 minutes. The cells are then solubilized and extracts filtered directly into the assay plate.

[1346] After incubation with the extract for 1 hr at RT, the wells are again rinsed. As a positive control, a commercial preparation of MAP kinase (10 ng/well) is used in place of A431 extract. Plates are then treated with a commercial polyclonal (rabbit) antibody (1 ug/ml) which specifically recognizes the phosphorylated epitope of the Erk-1 and Erk-2 kinases (1 hr at RT). This antibody is biotinylated by standard procedures. The bound polyclonal antibody is then quantitated by successive incubations with Europium-streptavidin and Europium fluorescence enhancing reagent in the Wallac DELFIA instrument (time-resolved fluorescence). An increased fluorescent signal over background indicates a phosphorylation by polypeptide of the present invention or a molecule induced by polypeptide of the present invention.

### Example 40

### Assay for the Stimulation of Bone Marrow CD34+ Cell Proliferation

[1347] This assay is based on the ability of human CD34+ to proliferate in the presence of hematopoietic growth factors and evaluates the ability of isolated polypeptides expressed in mammalian cells to stimulate proliferation of CD34+ cells.

[1348] It has been previously shown that most mature precursors will respond to only a single signal. More immature precursors require at least two signals to respond. Therefore, to test the effect of polypeptides on hematopoietic activity of a wide range of progenitor cells, the assay contains a given polypeptide in the presence or absence of other hematopoietic growth factors. Isolated cells are cultured for 5 days in the presence of Stem Cell Factor (SCF) in combination with tested sample. SCF alone has a very limited effect on the proliferation of bone marrow (BM) cells, acting in such conditions only as a “survival” factor. However, combined with any factor exhibiting stimulatory effect on these cells (e.g., IL-3), SCF will cause a synergistic effect. Therefore, if the tested polypeptide has a stimulatory effect on hematopoietic progenitors, such activity can be easily detected. Since normal BM cells have a low level of cycling cells, it is likely that any inhibitory effect of a given polypeptide, or agonists or antagonists thereof, might not be detected. Accordingly, assays for an inhibitory effect on progenitors is preferably tested in cells that are first subjected to in vitro stimulation with SCF+IL+3, and then contacted with the compound that is being evaluated for inhibition of such induced proliferation.

[1349] Briefly, CD34+ cells are isolated using methods known in the art. The cells are thawed and resuspended in medium (QBSF 60 serum-free medium with 1% L-glutamine (500 ml) Quality Biological, Inc., Gaithersburg, Md. Cat# 160-204-101). After several gentle centrifugation steps at 200×g, cells are allowed to rest for one hour. The cell count is adjusted to 2.5×10⁵ cells/ml. During this time, 100 μl of sterile water is added to the peripheral wells of a 96-well plate. The cytokines that can be tested with a given polypeptide in this assay is rhSCF (R&D Systems, Minneapolis, Minn., Cat# 255-SC) at 50 ng/ml alone and in combination with rhSCF and rhIL-3 (R&D Systems, Minneapolis, Minn., Cat# 203-ML) at 30 ng/ml. After one hour, 10 μl of prepared cytokines, 50 μl of the supernatants prepared in Example 30 (supernatants at 1:2 dilution=50 μl) and 20 μl of diluted cells are added to the media which is already present in the wells to allow for a final total volume of 100 μl. The plates are then placed in a 37° C./5% CO₂ incubator for five days.

[1350] Eighteen hours before the assay is harvested, 0.5 μCi/well of [3H] Thymidine is added in a 10 μl volume to each well to determine the proliferation rate. The experiment is terminated by harvesting the cells from each 96-well plate to a filtermat using the Tomtec Harvester 96. After harvesting, the filtermats are dried, trimmed and placed into OmniFilter assemblies consisting of one OmniFilter plate and one OmniFilter Tray. 60 μl Microscint is added to each well and the plate sealed with TopSeal-A press-on sealing film A bar code 15 sticker is affixed to the first plate for counting. The sealed plates are then loaded and the level of radioactivity determined via the Packard Top Count and the printed data collected for analysis. The level of radioactivity reflects the amount of cell proliferation.

[1351] The studies described in this example test the activity of a given polypeptide to stimulate bone marrow CD34+ cell proliferation. One skilled in the art could easily modify the exemplified studies to test the activity of polynucleotides (e.g., gene therapy), antibodies, agonists, and/or antagonists and fragments and variants thereof. As a nonlimiting example, potential antagonists tested in this assay would be expected to inhibit cell proliferation in the presence of cytokines and/or to increase the inhibition of cell proliferation in the presence of cytokines and a given polypeptide. In contrast, potential agonists tested in this assay would be expected to enhance cell proliferation and/or to decrease the inhibition of cell proliferation in the presence of cytokines and a given polypeptide.

[1352] The ability of a gene to stimulate the proliferation of bone marrow CD34+ cells indicates that polynucleotides and polypeptides corresponding to the gene are useful for the diagnosis and treatment of disorders affecting the immune system and hematopoiesis. Representative uses are described in the “Immune Activity” and “Infectious Disease” sections above, and elsewhere herein.

### Example 41

### Assay for Extracellular Matrix Enhanced Cell Response (EMECR)

[1353] The objective of the Extracellular Matrix Enhanced Cell Response (EMECR) assay is to identify gene products (e.g., isolated polypeptides) that act on the hematopoietic stem cells in the context of the extracellular matrix (ECM) induced signal.

[1354] Cells respond to the regulatory factors in the context of signal(s) received from the surrounding microenvironment. For example, fibroblasts, and endothelial and epithelial stem cells fail to replicate in the absence of signals from the ECM. Hematopoietic stem cells can undergo self-renewal in the bone marrow, but not in in vitro suspension culture. The ability of stem cells to undergo self-renewal in vitro is dependent upon their interaction with the stromal cells and the ECM protein fibronectin (fn). Adhesion of cells to fn is mediated by the α₅.β₁ and α₄.β₁ integrin receptors, which are expressed by human and mouse hematopoietic stem cells. The factor(s) which integrate with the ECM environment and are responsible for stimulating stem cell self-renewal have a not yet been identified. Discovery of such factors should be of great interest in gene therapy and bone marrow transplant applications

[1355] Briefly, polystyrene, non tissue culture treated, 96-well plates are coated with fn fragment at a coating concentration of 0.2 μg/cm². Mouse bone marrow cells are plated (1,000 cells/well) in 0.2 ml of serum-free medium. Cells cultured in the presence of IL-3 (5 ng/ml)+SCF (50 ng/ml) would serve as the positive control, conditions under which little self-renewal but pronounced differentiation of the stem cells is to be expected. Gene products of the invention (e.g., including, but not limited to, polynucleotides and polypeptides of the present invention, and supernatants produced in Example 30), are tested with appropriate negative controls in the presence and absence of SCF (5.0 ng/ml), where test factor supernatants represent 10% of the total assay volume. The plated cells are then allowed to grow by incubating in a low oxygen environment (5% CO₂, 7% O₂, and 88% N₂) tissue culture incubator for 7 days. The number of proliferating cells within the wells is then quantitated by measuring thymidine incorporation into cellular DNA. Verification of the positive hits in the assay will require phenotypic characterization of the cells, which can be accomplished by scaling up of the culture system and using appropriate antibody reagents against cell surface antigens and FACScan.

[1356] One skilled in the art could easily modify the exemplified studies to test the activity of polynucleotides (e.g., gene therapy), antibodies, agonists, and/or antagonists and fragments and variants thereof.

[1357] If a particular polypeptide of the present invention is found to be a stimulator of hematopoietic progenitors, polynucleotides and polypeptides corresponding to the gene encoding said polypeptide may be useful for the diagnosis and treatment of disorders affecting the immune system and hematopoiesis. Representative uses are described in the “Immune Activity” and “Infectious Disease” sections above, and elsewhere herein. The gene product may also be useful in the expansion of stem cells and committed progenitors of various blood lineages, and in the differentiation and/or proliferation of various cell types.

[1358] Additionally, the polynucleotides and/or polypeptides of the gene of interest and/or agonists and/or antagonists thereof, may also be employed to inhibit the proliferation and differentiation of hematopoietic cells and therefore may be employed to protect bone marrow stem cells from chemotherapeutic agents during chemotherapy. This antiproliferative effect may allow administration of higher doses of chemotherapeutic agents and, therefore, more effective chemotherapeutic treatment.

[1359] Moreover, polynucleotides and polypeptides corresponding to the gene of interest may also be useful for the treatment and diagnosis of hematopoietic related disorders such as, for example, anemia, pancytopenia, leukopenia, thrombocytopenia or leukemia since stromal cells are important in the production of cells of hematopoietic lineages. The uses include bone marrow cell ex-vivo culture, bone marrow transplantation, bone marrow reconstitution, radiotherapy or chemotherapy of neoplasia.

### Example 42

### Human Dermal Fibroblast and Aortic Smooth Muscle Cell Proliferation

[1360] The polypeptide of interest is added to cultures of normal human dermal fibroblasts (NHDF) and human aortic smooth muscle cells (AoSMC) and two co-assays are performed with each sample. The first assay examines the effect of the polypeptide of interest on the proliferation of normal human dermal fibroblasts (NHDF) or aortic smooth muscle cells (AoSMC). Aberrant growth of fibroblasts or smooth muscle cells is a part of several pathological processes, including fibrosis, and restenosis. The second assay examines IL6 production by both NHDF and SMC. IL6 production is an indication of functional activation. Activated cells will have increased production of a number of cytokines and other factors, which can result in a proinflammatory or immunomodulatory outcome. Assays are run with and without co-TNFa stimulation, in order to check for costimulatory or inhibitory activity.

[1361] Briefly, on day 1, 96-well, black plates are set up with 1000 cells/well (NHDF) or 2000 cells/well (AoSMC) in 100 μl culture media. NHDF culture media contains: Clonetics FB basal media, 1 mg/ml hFGF, 5 mg/ml insulin, 50 mg/ml gentamycin, 2% FBS, while AoSMC culture media contains Clonetics SM basal media, 0.5 μg/ml hEGF, 5 mg/ml insulin, 1 μg/ml hFGF, 50 mg/ml gentamycin, 50 μg/ml Amphotericin B, 5% FBS. After incubation at 37° C. for at least 4-5 hours culture media is aspirated and replaced with growth arrest media. Growth arrest media for NHDF contains fibroblast basal media, 50 mg/ml gentamycin, 2% FBS, while growth arrest media for AoSMC contains SM basal media, 50 mg/ml gentamycin, 50 μg/ml Amphotericin B, 0.4% FBS. Incubate at 37° C. until day 2.

[1362] On day 2, serial dilutions and templates of the polypeptide of interest are designed such that they always include media controls and known-protein controls. For both stimulation and inhibition experiments, proteins are diluted in growth arrest media. For inhibition experiments, TNFa is added to a final concentration of 2 ng/ml (NHDF) or 5 ng/ml (AoSMC). Add ⅓ vol media containing controls or polypeptides of the present invention and incubate at 37 degrees C./5% CO₂ until day 5.

[1363] Transfer 60 μl from each well to another labeled 96-well plate, cover with a plate-sealer, and store at 4 degrees C. until Day 6 (for IL6 ELISA). To the remaining 100 μl in the cell culture plate, aseptically add Alamar Blue in an amount equal to 10% of the culture volume (10 μl). Return plates to incubator for 3 to 4 hours. Then measure fluorescence with excitation at 530 nm and emission at 590 nm using the CytoFluor. This yields the growth stimulation/inhibition data.

[1364] On day 5, the IL6 ELISA is performed by coating a 96 well plate with 50-100 ul/well of Anti-Human IL6 Monoclonal antibody diluted in PBS, pH 7.4, incubate ON at room temperature.

[1365] On day 6, empty the plates into the sink and blot on paper towels. Prepare Assay Buffer containing PBS with 4% BSA. Block the plates with 200 μl/well of Pierce Super Block blocking buffer in PBS for 1-2 hr and then wash plates with wash buffer (PBS, 0.05% Tween-20). Blot plates on paper towels. Then add 50 μl/well of diluted Anti-Human IL-6 Monoclonal, Biotin-labeled antibody at 0.50 mg/ml. Make dilutions of IL-6 stock in media (30, 10, 3, 1, 0.3, 0 ng/ml). Add duplicate samples to top row of plate. Cover the plates and incubate for 2 hours at RT on shaker.

[1366] Plates are washed with wash buffer and blotted on paper towels. Dilute EU-labeled Streptavidin 1:1000 in Assay buffer, and add 100 μl/well. Cover the plate and incubate 1 h at RT. Plates are again washed with wash buffer and blotted on paper towels.

[1367] Add 100 μl/well of Enhancement Solution. Shake for 5 minutes. Read the plate on the Wallac DELFIA Fluorometer. Readings from triplicate samples in each assay were tabulated and averaged.

[1368] A positive result in this assay suggests AoSMC cell proliferation and that the polypeptide of the present invention may be involved in dermal fibroblast proliferation and/or smooth muscle cell proliferation. A positive result also suggests many potential uses of polypeptides, polynucleotides, agonists and/or antagonists of the polynucleotide/polypeptide of the present invention which gives a positive result. For example, inflammation and immune responses, wound healing, and angiogenesis, as detailed throughout this specification. Particularly, polypeptides of the present invention and polynucleotides of the present invention may be used in wound healing and dermal regeneration, as well as the promotion of vasculogenesis, both of the blood vessels and lymphatics. The growth of vessels can be used in the treatment of, for example, cardiovascular diseases. Additionally, antagonists of polypeptides and polynucleotides of the invention may be useful in treating diseases, disorders, and/or conditions which involve angiogenesis by acting as an anti-vascular agent (e.g., anti-angiogenesis). These diseases, disorders, and/or conditions are known in the art and/or are described herein, such as, for example, malignancies, solid tumors, benign tumors, for example hemangiomas, acoustic neuromas, neurofibromas, trachomas, and pyogenic granulomas; artheroscleric plaques; ocular angiogenic diseases, for example, diabetic retinopathy, retinopathy of prematurity, macular degeneration, corneal graft rejection, neovascular glaucoma, retrolental fibroplasia, rubeosis, retinoblastoma, uvietis and Pterygia (abnormal blood vessel growth) of the eye; rheumatoid arthritis; psoriasis; delayed wound healing; endometriosis; vasculogenesis; granulations; hypertrophic scars (keloids); nonunion fractures; scleroderma; trachoma; vascular adhesions; myocardial angiogenesis; coronary collaterals; cerebral collaterals; arteriovenous malformations; ischemic limb angiogenesis; Osler-Webber Syndrome; plaque neovascularization; telangiectasia; hemophiliac joints; angiofibroma; fibromuscular dysplasia; wound granulation; Crohn's disease; and atherosclerosis. Moreover, antagonists of polypeptides and polynucleotides of the invention may be useful in treating anti-hyperproliferative diseases and/or anti-inflammatory known in the art and/or described herein.

[1369] One skilled in the art could easily modify the exemplified studies to test the activity of polynucleotides (e.g., gene therapy), antibodies, agonists, and/or antagonists and fragments and variants thereof.

### Example 43

### Cellular Adhesion Molecule (CAM) Expression on Endothelial Cells

[1370] The recruitment of lymphocytes to areas of inflammation and angiogenesis involves specific receptor-ligand interactions between cell surface adhesion molecules (CAMs) on lymphocytes and the vascular endothelium. The adhesion process, in both normal and pathological settings, follows a multi-step cascade that involves intercellular adhesion molecule-1 (ICAM-1), vascular cell adhesion molecule-1 (VCAM-1), and endothelial leukocyte adhesion molecule-1 (E-selectin) expression on endothelial cells (EC). The expression of these molecules and others on the vascular endothelium determines the efficiency with which leukocytes may adhere to the local vasculature and extravasate into the local tissue during the development of an inflammatory response. The local concentration of cytokines and growth factor participate in the modulation of the expression of these CAMs.

[1371] Briefly, endothelial cells (e.g., Human Umbilical Vein Endothelial cells (HUVECs)) are grown in a standard 96 well plate to confluence, growth medium is removed from the cells and replaced with 100 μl of 199 Medium (10% fetal bovine serum (FBS)). Samples for testing and positive or negative controls are added to the plate in triplicate (in 10 μl volumes). Plates are then incubated at 37° C. for either 5 h (selectin and integrin expression) or 24 h (integrin expression only). Plates are aspirated to remove medium and 100 μl of 0.1% paraformaldehyde-PBS (with Ca++ and Mg++) is added to each well. Plates: are held at 4° C. for 30 min. Fixative is removed from the wells and wells are washed 1× with PBS(+Ca,Mg)+0.5% BSA and drained. 10 μl of diluted primary antibody is added to the test and control wells. Anti-ICAM-1-Biotin, Anti-VCAM-1-Biotin and Anti-E-selectin-Biotin are used at a concentration of 10 μg/ml (1:10 dilution of 0.1 mg/ml stock antibody). Cells are incubated at 37° C. for 30 min. in a humidified environment. Wells are washed three times with PBS(+Ca,Mg)+0.5% BSA. 20 μl of diluted ExtrAvidin-Alkaline Phosphatase (1:5,000 dilution, referred to herein as the working dilution) are added to each well and incubated at 37° C. for 30 min. Wells are washed three times with PBS(+Ca,Mg)+0.5% BSA. Dissolve 1 tablet of p-Nitrophenol Phosphate pNPP per 5 ml of glycine buffer (pH 10.4). 100 μl of pNPP substrate in glycine buffer is added to each test well. Standard wells in triplicate are prepared from the working dilution of the ExtrAvidin-Alkaline Phosphotase in glycine buffer: 1:5,000 (10⁰)>10^{-0.5}>10⁻¹>10^{-1.5}. 5 μl of each dilution is added to triplicate wells and the resulting AP content in each well is 5.50 ng, 1.74 ng, 0.55 ng, 0.18 ng. 100 μl of pNNP reagent is then added to each of the standard wells. The plate is incubated at 37° C. for 4 h. A volume of 50 μl of 3M NaOH is added to all wells. The plate is read on a plate reader at 405 nm using the background subtraction option on blank wells filled with glycine buffer only. Additionally, the template is set up to indicate the concentration of AP-conjugate in each standard well [5.50 ng; 1.74 ng; 0.55 ng; 0.18 ng]. Results are indicated as amount of bound AP-conjugate in each sample.

### Example 44

### Alamar Blue Endothelial Cells Proliferation Assay

[1372] This assay may be used to quantitatively determine protein mediated inhibition of bFGF-induced proliferation of Bovine Lymphatic Endothelial Cells (LECs), Bovine Aortic Endothelial Cells (BAECs) or Human Microvascular Uterine Myometrial Cells (UTMECs). This assay incorporates a fluorometric growth indicator based on detection of metabolic activity. A standard Alamar Blue Proliferation Assay is prepared in EGM-2MV with 10 ng/ml of bFGF added as a source of endothelial cell stimulation. This assay may be used with a variety of endothelial cells with slight changes in growth medium and cell concentration. Dilutions of the protein batches to be tested are diluted as appropriate. Serum-free medium (GIBCO SFM) without bFGF is used as a non-stimulated control and Angiostatin or TSP-1 are included as a known inhibitory controls.

[1373] Briefly, LEC, BAECs or UTMECs are seeded in growth media at a density of 5000 to 2000 cells/well in a 96 well plate and placed at 37 degrees C. overnight. After the overnight incubation of the cells, the growth media is removed and replaced with GIBCO EC-SFM. The cells are treated with the appropriate dilutions of the protein of interest or control protein sample(s) (prepared in SFM) in triplicate wells with additional bFGF to a concentration of 10 ng/ml. Once the cells have been treated with the samples, the plate(s) is/are placed back in the 37° C. incubator for three days. After three days 10 ml of stock alamar blue (Biosource Cat# DAL1100) is added to each well and the plate(s) is/are placed back in the 37° C. incubator for four hours. The plate(s) are then read at 530 nm excitation and 590 nm emission using the CytoFluor fluorescence reader. Direct output is recorded in relative fluorescence units.

[1374] Alamar blue is an oxidation-reduction indicator that both fluoresces and changes color in response to chemical reduction of growth medium resulting from cell growth. As cells grow in culture, innate metabolic activity results in a chemical reduction of the immediate surrounding environment. Reduction related to growth causes the indicator to change from oxidized (non-fluorescent blue) form to reduced (fluorescent red) form (i.e., stimulated proliferation will produce a stronger signal and inhibited proliferation will produce a weaker signal and the total signal is proportional to the total number of cells as well as their metabolic activity). The background level of activity is observed with the starvation medium alone. This is compared to the output observed from the positive control samples (bFGF in growth medium) and protein dilutions.

### Example 45

### Detection of Inhibition of a Mixed Lymphocyte Reaction

[1375] This assay can be used to detect and evaluate inhibition of a Mixed Lymphocyte Reaction (MLR) by gene products (e.g., isolated polypeptides). Inhibition of a MLR may be due to a direct effect on cell proliferation and viability, modulation of costimulatory molecules on interacting cells, modulation of adhesiveness between lymphocytes and accessory cells, or modulation of cytokine production by accessory cells. Multiple cells may be targeted by these polypeptides since the peripheral blood mononuclear fraction used in this assay includes T, B and natural killer lymphocytes, as well as monocytes and dendritic cells.

[1376] Polypeptides of interest found to inhibit the MLR may find application in diseases associated with lymphocyte and monocyte activation or proliferation. These include, but are not limited to, diseases such as asthma, arthritis, diabetes, inflammatory skin conditions, psoriasis, eczema, systemic lupus erythematosus, multiple sclerosis, glomerulonephritis, inflammatory bowel disease, crohn's disease, ulcerative colitis, arteriosclerosis, cirrhosis, graft vs. host disease, host vs. graft disease, hepatitis, leukemia and lymphoma.

[1377] Briefly, PBMCs from human donors are purified by density gradient centrifugation using Lymphocyte Separation Medium (LSM®, density 1.0770 g/ml, Organon Teknika Corporation, West Chester, Pa.). PBMCs from two donors are adjusted to 2×10⁶ cells/ml in RPMI-1640 (Life Technologies, Grand Island, N.Y.) supplemented with 10% FCS and 2 mM glutamine. PBMCs from a third donor is adjusted to 2×10⁵ cells/ml. Fifty microliters of PBMCs from each donor is added to wells of a 96-well round bottom microtiter plate. Dilutions of test materials (50 μl) is added in triplicate to microtiter wells. Test samples (of the protein of interest) are added for final dilution of 1:4; rhuIL-2 (R&D Systems, Minneapolis, Minn., catalog number 202-IL) is added to a final concentration of 1 μg/ml; anti-CD4 mAb (R&D Systems, clone 34930.11, catalog number MAB379) is added to a final concentration of 10 μg/ml. Cells are cultured for 7-8 days at 37° C. in 5% CO₂, and 1 μC of [³H] thymidine is added to wells for the last 16 hrs of culture. Cells are harvested and thymidine incorporation determined using a Packard TopCount. Data is expressed as the mean and standard deviation of triplicate determinations.

[1378] Samples of the protein of interest are screened in separate experiments and compared to the negative control treatment, anti-CD4 mAb, which inhibits proliferation of lymphocytes and the positive control treatment, IL-2 (either as recombinant material or supernatant), which enhances proliferation of lymphocytes.

[1379] One skilled in the art could easily modify the exemplified studies to test the activity of polynucleotides (e.g., gene therapy), antibodies, agonists, and/or antagonists and fragments and variants thereof.

### Example 46

### Assays for Protease Activity

[1380] The following assay may be used to assess protease activity of the polypeptides of the invention.

[1381] Gelatin and casein zymography are performed essentially as described (Heusen et al., Anal. Biochem., 102:196-202 (1980); Wilson et al., Journal of Urology, 149:653-658 (1993)). Samples are run on 10% polyacryamide/0.1% SDS gels containing 1% gelain orcasein, soaked in 2.5% triton at room temperature for 1 hour, and in 0.1M glycine, pH 8.3 at 37° C. 5 to 16 hours. After staining in amido black areas of proteolysis apear as clear areas agains the blue-black background. Trypsin (Sigma T8642) is used as a positive control.

[1382] Protease activity is also determined by monitoring the cleavage of n-a-benzoyl-L-arginine ethyl ester (BAEE) (Sigma B-4500. Reactions are set up in (25 mMNaPO₄, 1 mM EDTA, and 1 mM BAEE), pH-7.5. Samples are added and the change in adsorbance at 260 nm is monitored on the Beckman DU-6 spectrophotometer in the time-drive mode. Trypsin is used as a positive control.

[1383] Additional assays based upon the release of acid-soluble peptides from casein or hemoglobin measured as adsorbance at 280 nm or colorimetrically using the Folin method are performed as described in Bergmeyer, et al., Methods of Enzymatic Analysis, 5 (1984). Other assays involve the solubilization of chromogenic substrates (Ward, Applied Science, 251-317 (1983)).

### Example 47

### Identifying Serine Protease Substrate Specificity

[1384] Methods known in the art or described herein may be used to determine the substrate specificity of the polypeptides of the present invention having serine protease activity. A preferred method of determining substrate specificity is by the use of positional scanning synthetic combinatorial libraries as described in GB 2 324 529 (incorporated herein in its entirety).

### Example 48

### Ligand Binding Assays

[1385] The following assay may be used to assess ligand binding activity of the polypeptides of the invention.

[1386] Ligand binding assays provide a direct method for ascertaining receptor pharmacology and are adaptable to a high throughput format. The purified ligand for a polypeptide is radiolabeled to high specific activity (50-2000 Ci/mmol) for binding studies. A determination is then made that the process of radiolabeling does not diminish the activity of the ligand towards its polypeptide. Assay conditions for buffers, ions, pH and other modulators such as nucleotides are optimized to establish a workable signal to noise ratio for both membrane and whole cell polypeptide sources. For these assays, specific polypeptide binding is defined as total associated radioactivity minus the radioactivity measured in the presence of an excess of unlabeled competing ligand. Where possible, more than one competing ligand is used to define residual nonspecific binding.

### Example 49

### Functional Assay in Xenopus Oocytes

[1387] Capped RNA transcripts from linearized plasmid templates encoding the polypeptides of the invention are synthesized in vitro with RNA polymerases in accordance with standard procedures. In vitro transcripts are suspended in water at a final concentration of 0.2 mg/ml. Ovarian lobes are removed from adult female toads, Stage V defolliculated oocytes are obtained, and RNA transcripts (10 ng/oocyte) are injected in a 50 nl bolus using a microinjection apparatus. Two electrode voltage clamps are used to measure the currents from individual Xenopus oocytes in response polypeptides and polypeptide agonist exposure. Recordings are made in Ca2+ free Barth's medium at room temperature. The Xenopus system can be used to screen known ligands and tissue/cell extracts for activating ligands.

### Example 50

### Microphysiometric Assays

[1388] Activation of a wide variety of secondary messenger systems results in extrusion of small amounts of acid from a cell. The acid formed is largely as a result of the increased metabolic activity required to fuel the intracellular signaling process. The pH changes in the media surrounding the cell are very small but are detectable by the CYTOSENSOR microphysiometer (Molecular Devices Ltd., Menlo Park, Calif.). The CYTOSENSOR is thus capable of detecting the activation of polypeptide which is coupled to an energy utilizing intracellular signaling pathway.

### Example 51

### Extract/Cell Supernatant Screening

[1389] A large number of mammalian receptors exist for which there remains, as yet, no cognate activating ligand (agonist). Thus, active ligands for these receptors may not be included within the ligands banks as identified to date. Accordingly, the polypeptides of the invention can also be functionally screened (using calcium, cAMP, microphysiometer, oocyte electrophysiology, etc., functional screens) against tissue extracts to identify its natural ligands. Extracts that produce positive functional responses can be sequentially subfractionated until an activating ligand is isolated and identified.

### Example 52

### Calcium and cAMP Functional Assays

[1390] Seven transmembrane receptors which are expressed in HEK 293 cells have been shown to be coupled functionally to activation of PLC and calcium mobilization and/or cAMP stimulation or inhibition. Basal calcium levels in the HEK 293 cells in receptor-transfected or vector control cells were observed to be in the normal, 100 nM to 200 nM, range. HEK 293 cells expressing recombinant receptors are loaded with fura 2 and in a single day >150 selected ligands or tissue/cell extracts are evaluated for agonist induced calcium mobilization. Similarly, HEK 293 cells expressing recombinant receptors are evaluated for the stimulation or inhibition of cAMP production using standard cAMP quantitation assays. Agonists presenting a calcium transient or cAMP fluctuation are tested in vector control cells to determine if the response is unique to the transfected cells expressing receptor.

### Example 53

### A TP-Binding Assay

[1391] The following assay may be used to assess ATP-binding activity of polypeptides of the invention.

[1392] ATP-binding activity of the polypeptides of the invention may be detected using the ATP-binding assay described in U.S. Pat. No. 5,858,719, which is herein incorporated by reference in its entirety. Briefly, ATP-binding to polypeptides of the invention is measured via photoaffinity labeling with 8-azido-ATP in a competition assay. Reaction mixtures containing 1 mg/ml of the ABC transport protein of the present invention are incubated with varying concentrations of ATP, or the non-hydrolyzable ATP analog adenyl-5′-imidodiphosphate for 10 minutes at 4° C. A mixture of 8-azido-ATP (Sigma Chem. Corp., St. Louis, Mo.) plus 8-azido-ATP (³²P ATP) (5 mCi/μmol, ICN, Irvine Calif.) is added to a final concentration of 100 μM and 0.5 ml aliquots are placed in the wells of a porcelain spot plate on ice. The plate is irradiated using a short wave 254 nm UV lamp at a distance of 2.5 cm from the plate for two one-minute intervals with a one-minute cooling interval in between. The reaction is stopped by addition of dithiothreitol to a final concentration of 2 mM. The incubations are subjected to SDS-PAGE electrophoresis, dried, and autoradiographed. Protein bands corresponding to the particular polypeptides of the invention are excised, and the radioactivity quantified. A decrease in radioactivity with increasing ATP or adenly-5′-imidodiphosphate provides a measure of ATP affinity to the polypeptides.

### Example 54

### Small Molecule Screening

[1393] This invention is particularly useful for screening therapeutic compounds by using the polypeptides of the invention, or binding fragments thereof, in any of a variety of drug screening techniques. The polypeptide or fragment employed in such a test may be affixed to a solid support, expressed on a cell surface, free in solution, or located intracellularly. One method of drug screening utilizes eukaryotic or prokaryotic host cells which are stably transformed with recombinant nucleic acids expressing the polypeptide or fragment. Drugs are screened against such transformed cells in competitive binding assays. One may measure, for example, the formulation of complexes between the agent being tested and polypeptide of the invention.

[1394] Thus, the present invention provides methods of screening for drugs or any other agents which affect activities mediated by the polypeptides of the invention. These methods comprise contacting such an agent with a polypeptide of the invention or fragment thereof and assaying for the presence of a complex between the agent and the polypeptide or fragment thereof, by methods well known in the art. In such a competitive binding assay, the agents to screen are typically labeled. Following incubation, free agent is separated from that present in bound form, and the amount of free or uncomplexed label is a measure of the ability of a particular agent to bind to the polypeptides of the invention.

[1395] Another technique for drug screening provides high throughput screening for compounds having suitable binding affinity to the polypeptides of the invention, and is described in great detail in European Patent Application 84/03564, published on Sep. 13, 1984, which is herein incorporated by reference in its entirety. Briefly stated, large numbers of different small molecule test compounds are synthesized on a solid substrate, such as plastic pins or some other surface. The test compounds are reacted with polypeptides of the invention and washed. Bound polypeptides are then detected by methods well known in the art. Purified polypeptides are coated directly onto plates for use in the aforementioned drug screening techniques. In addition, non-neutralizing antibodies may be used to capture the peptide and immobilize it on the solid support.

[1396] This invention also contemplates the use of competitive drug screening assays in which neutralizing antibodies capable of binding polypeptides of the invention specifically compete with a test compound for binding to the polypeptides or fragments thereof. In this manner, the antibodies are used to detect the presence of any peptide which shares one or more antigenic epitopes with a polypeptide of the invention.

### Example 55

### Phosphorylation Assay

[1397] In order to assay for phosphorylation activity of the polypeptides of the invention, a phosphorylation assay as described in U.S. Pat. No. 5,958,405 (which is herein incorporated by reference) is utilized. Briefly, phosphorylation activity may be measured by phosphorylation of a protein substrate using gamma-labeled ³²P-ATP and quantitation of the incorporated radioactivity using a gamma radioisotope counter. The polypeptides of the invention are incubated with the protein substrate, ³²P-ATP, and a kinase buffer. The ³²P incorporated into the substrate is then separated from free ³²P-ATP by electrophoresis, and the incorporated ³²P is counted and compared to a negative control. Radioactivity counts above the negative control are indicative of phosphorylation activity of the polypeptides of the invention.

### Example 56

### Detection of Phosphorylation Activity (Activation) of the Polypeptides of the Invention in the Presence of Polypeptide Ligands

[1398] Methods known in the art or described herein may be used to determine the phosphorylation activity of the polypeptides of the invention. A preferred method of determining phosphorylation activity is by the use of the tyrosine phosphorylation assay as described in U.S. Pat. No. 5,817,471 (incorporated herein by reference).

### Example 57

### Identification of Signal Transduction Proteins that Interact with Polypeptides of the Present Invention

[1399] The purified polypeptides of the invention are research tools for the identification, characterization and purification of additional signal transduction pathway proteins or receptor proteins. Briefly, labeled polypeptides of the invention are useful as reagents for the purification of molecules with which it interacts. In one embodiment of affinity purification, polypeptides of the invention are covalently coupled to a chromatography column. Cell-free extract derived from putative target cells, such as carcinoma tissues, is passed over the column, and molecules with appropriate affinity bind to the polypeptides of the invention. The protein complex is recovered from the column, dissociated, and the recovered molecule subjected to N-terminal protein sequencing. This amino acid sequence is then used to identify the captured molecule or to design degenerate oligonucleotide probes for cloning the relevant gene from an appropriate cDNA library.

### Example 58

### IL-6 Bioassay

[1400] To test the proliferative effects of the polypeptides of the invention, the IL-6 Bioassay as described by Marz et al. is utilized (Proc. Natl. Acad. Sci., U.S.A., 95:3251-56 (1998), which is herein incorporated by reference). Briefly, IL-6 dependent B9 murine cells are washed three times in IL-6 free medium and plated at a concentration of 5,000 cells per well in 50 μl, and 50 μl of the IL-6-like polypeptide is added. After 68 hrs. at 37° C., the number of viable cells is measured by adding the tetrazolium salt thiazolyl blue (MTT) and incubating for a further 4 hrs. at 37° C. B9 cells are lysed by SDS and optical density is measured at 570 nm. Controls containing IL-6 (positive) and no cytokine (negative) are utilized. Enhanced proliferation in the test sample(s) relative to the negative control is indicative of proliferative effects mediated by polypeptides of the invention.

### Example 59

### Support of Chicken Embryo Neuron Survival

[1401] To test whether sympathetic neuronal cell viability is supported by polypeptides of the invention, the chicken embryo neuronal survival assay of Senaldi et al is utilized (Proc. Natl. Acad. Sci., U.S.A., 96:11458-63 (1998), which is herein incorporated by reference). Briefly, motor and sympathetic neurons are isolated from chicken embryos, resuspended in L15 medium (with 10% FCS, glucose, sodium selenite, progesterone, conalbumin, putrescine, and insulin; Life Technologies, Rockville, Md.) and Dulbecco's modified Eagles medium [with 10% FCS, glutamine, penicillin, and 25 mM Hepes buffer (pH 7.2); Life Technologies, Rockville, Md.], respectively, and incubated at 37° C. in 5% CO₂ in the presence of different concentrations of the purified IL-6-like polypeptide, as well as a negative control lacking any cytokine. After 3 days, neuron survival is determined by evaluation of cellular morphology, and through the use of the colorimetric assay of Mosmann (Mosmann, T., J. Immunol. Methods, 65:55-63 (1983)). Enhanced neuronal cell viability as compared to the controls lacking cytokine is indicative of the ability of the inventive purified IL-6-like polypeptide(s) to enhance the survival of neuronal cells.

### Example 60

### Assay for Phosphatase Activity

[1402] The following assay may be used to assess serine/threonine phosphatase (PTPase) activity of the polypeptides of the invention.

[1403] In order to assay for serine/threonine phosphatase (PTPase) activity, assays can be utilized which are widely known to those skilled in the art. For example, the serine/threonine phosphatase (PSPase) activity is measured using a PSPase assay kit from New England Biolabs, Inc. Myelin basic protein (MyBP), a substrate for PSPase, is phosphorylated on serine and threonine residues with cAMP-dependent Protein Kinase in the presence of [³²P]ATP. Protein serine/threonine phosphatase activity is then determined by measuring the release of inorganic phosphate from 32P-labeled MyBP.

### Example 61

### Interaction of Serine/Threonine Phosphatases with other Proteins

[1404] The polypeptides of the invention with serine/threonine phosphatase activity as determined in Example 60 are research tools for the identification, characterization and purification of additional interacting proteins or receptor proteins, or other signal transduction pathway proteins. Briefly, labeled polypeptide(s) of the invention is useful as a reagent for the purification of molecules with which it interacts. In one embodiment of affinity purification, polypeptide of the invention is covalently coupled to a chromatography column. Cell-free extract derived from putative target cells, such as neural or liver cells, is passed over the column, and molecules with appropriate affinity bind to the polypeptides of the invention. The polypeptides of the invention-complex is recovered from the column, dissociated, and the recovered molecule subjected to N-terminal protein sequencing. This amino acid sequence is then used to identify the captured molecule or to design degenerate oligonucleotide probes for cloning the relevant gene from an appropriate cDNA library.

### Example 62

### Assaying for Heparanase Activity

[1405] In order to assay for heparanase activity of the polypeptides of the invention, the heparanase assay described by Vlodavsky et al is utilized (Vlodavsky, I., et al., Nat. Med., 5:793-802 (1999)). Briefly, cell lysates, conditioned media or intact cells (1×10⁶ cells per 35-mm dish) are incubated for 18 hrs at 37° C., pH 6.2-6.6, with ³⁵S-labeled ECM or soluble ECM derived peak I proteoglycans. The incubation medium is centrifuged and the supernatant is analyzed by gel filtration on a Sepharose CL-6B column (0.9×30 cm). Fractions are eluted with PBS and their radioactivity is measured. Degradation fragments of heparan sulfate side chains are eluted from Sepharose 6B at 0.5<Kₐᵥ<0.8 (peak II). Each experiment is done at least three times. Degradation fragments corresponding to “peak II,” as described by Vlodavsky et al., is indicative of the activity of the polypeptides of the invention in cleaving heparan sulfate.

### Example 63

### Immobilization of Biomolecules

[1406] This example provides a method for the stabilization of polypeptides of the invention in non-host cell lipid bilayer constucts (see, e.g., Bieri et al., Nature Biotech 17:1105-1108 (1999), hereby incorporated by reference in its entirety herein) which can be adapted for the study of polypeptides of the invention in the various functional assays described above. Briefly, carbohydrate-specific chemistry for biotinylation is used to confine a biotin tag to the extracellular domain of the polypeptides of the invention, thus allowing uniform orientation upon immobilization. A 50 uM solution of polypeptides of the invention in washed membranes is incubated with 20 mM NaIO4 and 1.5 mg/ml (4 mM) BACH or 2 mg/ml (7.5 mM) biotin-hydrazide for 1 hr at room temperature (reaction volume, 150 ul). Then the sample is dialyzed (Pierce Slidealizer Cassett, 10 kDa cutoff; Pierce Chemical Co., Rockford Ill.) at 4 C first for 5 h, exchanging the buffer after each hour, and finally for 12 h against 500 ml buffer R (0.15 M NaCl, 1 mM MgCl2, 10 mM sodium phosphate, pH7). Just before addition into a cuvette, the sample is diluted 1:5 in buffer ROG50 (Buffer R supplemented with 50 mM octylglucoside).

### Example 64

### TAQMAN

[1407] Quantitative PCR (QPCR). Total RNA from cells in culture are extracted by Trizol separation as recommended by the supplier (LifeTechnologies). (Total RNA is treated with DNase I (Life Technologies) to remove any contaminating genomic DNA before reverse transcription.) Total RNA (50 ng) is used in a one-step, 50 ul, RT-QPCR, consisting of Taqman Buffer A (Perkin-Elmer; 50 mM KCl/10 mM Tris, pH 8.3), 5.5 mM MgCl₂, 240 μM each dNTP, 0.4 units RNase inhibitor (Promega), 8% glycerol, 0.012% Tween-20, 0.05% gelatin, 0.3 uM primers, 0.1 uM probe, 0.025 units Amplitaq Gold (Perkin-Elmer) and 2.5 units Superscript II reverse transcriptase (Life Technologies). As a control for genomic contamination, parallel reactions are setup without reverse transcriptase. The relative abundance of (unknown) and 18S RNAs are assessed by using the Applied Biosystems Prism 7700 Sequence Detection System (Livak, K. J., Flood, S. J., Marmaro, J., Giusti, W. & Deetz, K. (1995) PCR Methods Appl. 4, 357-362). Reactions are carried out at 48° C. for 30 min, 95° C. for 10 min, followed by 40 cycles of 95° C. for 15s, 60° C. for 1 min. Reactions are performed in triplicate.

[1408] Primers (f & r) and FRET probes sets are designed using Primer Express Software (Perkin-Elmer). Probes are labeled at the 5′-end with the reporter dye 6-FAM and on the 3′-end with the quencher dye TAMRA (Biosource International, Camarillo, Calif. or Perkin-Elmer).

### Example 65

### Assays for Metalloproteinase Activity

[1409] Metalloproteinases (EC 3.4.24.-) are peptide hydrolases which use metal ions, such as Zn²⁺, as the catalytic mechanism. Metalloproteinase activity of polypeptides of the present invention can be assayed according to the following methods.

Proteolysis of Alpha-2-Macroglobulin

[1410] To confirm protease activity, purified polypeptides of the invention are mixed with the substrate alpha-2-macroglobulin (0.2 unit/ml; Boehringer Mannheim, Germany) in 1× assay buffer (50 mM HEPES, pH 7.5, 0.2 M NaCl, 10 mM CaCl₂, 25 μM ZnCl₂ and 0.05% Brij-35) and incubated at 37° C. for 1-5 days. Trypsin is used as positive control. Negative controls contain only alpha-2-macroglobulin in assay buffer. The samples are collected and boiled in SDS-PAGE sample buffer containing 5% 2-mercaptoethanol for 5-min, then loaded onto 8% SDS-polyacrylamide gel. After electrophoresis the proteins are visualized by silver staining. Proteolysis is evident by the appearance of lower molecular weight bands as compared to the negative control.

Inhibition of Alpha-2-Macroglobulin Proteolysis by Inhibitors of Metalloproteinases

[1411] Known metalloproteinase inhibitors (metal chelators (EDTA, EGTA, AND HgCl₂), peptide metalloproteinase inhibitors (TIMP-1 and TIMP-2), and commercial small molecule MMP inhibitors) are used to characterize the proteolytic activity of polypeptides of the invention. The three synthetic MMP inhibitors used are: MMP inhibitor I, [IC₅₀=1.0 μM against MMP-1 and MMP-8; IC₅₀=30 μM against MMP-9; IC₅₀=150 μM against MMP-3]; MMP-3 (stromelysin-1) inhibitor I [IC₅₀=5 μM against MMP-3], and MMP-3 inhibitor II [Kᵢ=130 nM against MMP-3]; inhibitors available through Calbiochem, catalog # 444250, 444218, and 444225, respectively). Briefly, different concentrations of the small molecule MMP inhibitors are mixed with purified polypeptides of the invention (50 μg/ml) in 22.9 μl of 1× HEPES buffer (50 mM HEPES, pH 7.5, 0.2 M NaCl, 10 mM CaCl₂, 25 μM ZnCl₂ and 0.05% Brij-35) and incubated at room temperature (24° C.) for 2-hr, then 7.1 μl of substrate alpha-2-macroglobulin (0.2 unit/ml) is added and incubated at 37° C. for 20-hr. The reactions are stopped by adding 4× sample buffer and boiled immediately for 5 minutes. After SDS-PAGE, the protein bands are visualized by silver stain.

Synthetic Fluorogenic Peptide Substrates Cleavage Assay

[1412] The substrate specificity for polypeptides of the invention with demonstrated metalloproteinase activity can be determined using synthetic fluorogenic peptide substrates (purchased from BACHEM Bioscience Inc). Test substrates include, M-1985, M-2225, M-2105, M-2110, and M-2255. The first four are MMP substrates and the last one is a substrate of tumor necrosis factor-α (TNF-α) converting enzyme (TACE). All the substrates are prepared in 1:1 dimethyl sulfoxide (DMSO) and water. The stock solutions are 50-500 μM. Fluorescent assays are performed by using a Perkin Elmer LS 50B luminescence spectrometer equipped with a constant temperature water bath. The excitation λ is 328 nm and the emission λ is 393 nm. Briefly, the assay is carried out by incubating 176 μl 1× HEPES buffer (0.2 M NaCl, 10 mM CaCl₂, 0.05% Brij-35 and 50 mM HEPES, pH 7.5) with 4 μl of substrate solution (50 μM) at 25° C. for 15 minutes, and then adding 20 μl of a purified polypeptide of the invention into the assay cuvett. The final concentration of substrate is 1 μM. Initial hydrolysis rates are monitored for 30-min.

### Example 66

### Characterization of the cDNA Contained in a Deposited Plasmid

[1413] The size of the cDNA insert contained in a deposited plasmid may be routinely determined using techniques known in the art, such as PCR amplification using synthetic primers hybridizable to the 3′ and 5′ ends of the cDNA sequence. For example, two primers of 17-30 nucleotides derived from each end of the cDNA (i.e., hybridizable to the absolute 5′ nucleotide or the 3′ nucleotide end of the sequence of SEQ ID NO:X, respectively) are synthesized and used to amplify the cDNA using the deposited cDNA plasmid as a template. The polymerase chain reaction is carried out under routine conditions, for instance, in 25 ul of reaction mixture with 0.5 ug of the above cDNA template. A convenient reaction mixture is 1.5-5 mM MgCl₂, 0.01% (w/v) gelatin, 20 uM each of dATP, dCTP, dGTP, dTTP, 25 pmol of each primer and 0.25 Unit of Taq polymerase. Thirty five cycles of PCR (denaturation at 94 degree C. for 1 min; annealing at 55 degree C. for 1 min; elongation at 72 degree C. for 1 min) are performed with a Perkin-Elmer Cetus automated thermal cycler. The amplified product is analyzed by agarose gel electrophoresis. The PCR product is verified to be the selected sequence by subcloning and sequencing the DNA product. It will be clear that the invention may be practiced otherwise than as particularly described in the foregoing description and examples. Numerous modifications and variations of the present invention are possible in light of the above teachings and, therefore, are within the scope of the appended claims.

### INCORPORATION BY REFERENCE

[1414] The entire disclosure of each document cited (including patents, patent applications, journal articles, abstracts, laboratory manuals, books, or other disclosures) in the Background of the Invention, Detailed Description, and Examples is hereby incorporated herein by reference. In addition, the sequence listing submitted herewith is incorporated herein by reference in its entirety.

LENGTHY TABLE
The patent application contains a lengthy table section. A copy of the table is available in electronic form from the USPTO web site (http://seqdata.uspto.gov/?pageRequest=docDetail&DocID=US20070015271A1) An electronic copy of the table will also be available from the USPTO upon request and payment of the fee set forth in 37 CFR 1.19(b)(3).

The application's sequence listing, which the Patent Office published only in electronic form, follows.

SEQUENCE LISTING (5810 sequences)

SEQ ID NO: 1 - DNA, 733 bp, Homo sapiens
gggatccggagcccaaatcttctgacaaaactcacacatgcccaccgtgcccagcacctgaattcgagggtgcaccgtcagtcttcctcttccccccaaaacccaaggacaccctcatgatctcccggactcctgaggtcacatgcgtggtggtggacgtaagccacgaagaccctgaggtcaagttcaactggtacgtggacggcgtggaggtgcataatgccaagacaaagccgcgggaggagcagtacaacagcacgtaccgtgtggtcagcgtcctcaccgtcctgcaccaggactggctgaatggcaaggagtacaagtgcaaggtctccaacaaagccctcccaacccccatcgagaaaaccatctccaaagccaaagggcagccccgagaaccacaggtgtacaccctgcccccatcccgggatgagctgaccaagaaccaggtcagcctgacctgcctggtcaaaggcttctatccaagcgacatcgccgtggagtgggagagcaatgggcagccggagaacaactacaagaccacgcctcccgtgctggactccgacggctccttcttcctctacagcaagctcaccgtggacaagagcaggtggcagcaggggaacgtcttctcatgctccgtgatgcatgaggctctgcacaaccactacacgcagaagagcctctccctgtctccgggtaaatgagtgcgacggccgcgactctagaggat

SEQ ID NO: 2 - protein, 5 aa, Homo sapiens
  Site (3): Xaa equals any amino acid
WSXWS

SEQ ID NO: 3 - DNA, 86 bp, Artificial Sequence
  Primer_Bind: Synthetic sequence with 4 tandem copies of the GAS binding site found in the IRF1 promoter (Rothman et al., Immunity 1:457-468 (1994)), 18 nucleotides complementary to the SV40 early promoter, and a Xho I restriction site.
gcgcctcgagatttccccgaaatctagatttccccgaaatgatttccccgaaatgatttccccgaaatatctgccatctcaattag

SEQ ID NO: 4 - DNA, 27 bp, Artificial Sequence
  Primer_Bind: Synthetic sequence complementary to the SV40 promoter; includes a Hind III restriction site.
gcggcaagctttttgcaaagcctaggc

SEQ ID NO: 5 - DNA, 271 bp, Artificial Sequence
  Protein_Bind: Synthetic promoter for use in biological assays; includes GAS binding sites found in the IRF1 promoter (Rothman et al., Immunity 1:457-468 (1994)).
ctcgagatttccccgaaatctagatttccccgaaatgatttccccgaaatgatttccccgaaatatctgccatctcaattagtcagcaaccatagtcccgcccctaactccgcccatcccgcccctaactccgcccagttccgcccattctccgccccatggctgactaattttttttatttatgcagaggccgaggccgcctcggcctctgagctattccagaagtagtgaggaggcttttttggaggcctaggcttttgcaaaaagctt

SEQ ID NO: 6 - DNA, 32 bp, Artificial Sequence
  Primer_Bind: Synthetic primer complementary to human genomic EGR-1 promoter sequence (Sakamoto et al., Oncogene 6:867-871 (1991)); includes a Xho I restriction site.
gcgctcgagggatgacagcgatagaaccccgg

SEQ ID NO: 7 - DNA, 31 bp, Artificial Sequence
  Primer_Bind: Synthetic primer complementary to human genomic EGR-1 promoter sequence (Sakamoto et al., Oncogene 6:867-871 (1991)); includes a Hind III restriction site.
gcgaagcttcgcgactccccggatccgcctc

SEQ ID NO: 8 - DNA, 12 bp, Homo sapiens
ggggactttccc

SEQ ID NO: 9 - DNA, 73 bp, Artificial Sequence
  Primer_Bind: Synthetic primer with 4 tandem copies of the NF-KB binding site (GGGGACTTTCCC), 18 nucleotides complementary to the 5' end of the SV40 early promoter sequence, and a XhoI restriction site.
gcggcctcgaggggactttcccggggactttccggggactttccgggactttccatcctgccatctcaattag

SEQ ID NO: 10 - DNA, 256 bp, Artificial Sequence
  Protein_Bind: Synthetic promoter for use in biological assays; includes NF-KB binding sites.
ctcgaggggactttcccggggactttccggggactttccgggactttccatctgccatctcaattagtcagcaaccatagtcccgcccctaactccgcccatcccgcccctaactccgcccagttccgcccattctccgccccatggctgactaattttttttatttatgcagaggccgaggccgcctcggcctctgagctattccagaagtagtgaggaggcttttttggaggcctaggcttttgcaaaaagctt

SEQ ID NO: 11 - DNA, 1418 bp, Homo sapiens
  misc_feature (1417)..(1417): n equals a,t,g, or c
gcaccagaccgcggacgtctgtaatctcagaggcttgtttgctgagggtgcctgcgcagctgcgacggctgctggttttgaaacatgaatctttcgctcgtcctggctgccttttgcttgggaatagcctccgctgttccaaaatttgaccaaaatttggatacaaagtggtaccagtggaaggcaacacacagaagattatatggcgcgaatgaagaaggatggaggagagcagtgtgggaaaagaatatgaaaatgattgaactgcacaatggggaatacagccaagggaaacatggcttcacaatggccatgaatgcttttggtgacatgaccaatgaagaattcaggcagatgatgggttgctttcgaaaccagaaattcaggaaggggaaagtgttccgtgagcctctgtttcttgatcttcccaaatctgtggattggagaaagaaaggctacgtgacgccagtgaagaatcagaaacagtgtggttcttgttgggcttttagtgcgactggtgctcttgaaggacagatgttccggaaaactgggaaacttgtctcactgagcgagcagaatctggtggactgttcgcgtcctcaaggcaatcagggctgcaatggtggcttcatggctaggccttccagtatgtcaaggagaacggaggcctggactctgaggaatcctatccatatgtagcagtggatgaaatctgtaagtacagacctgagaattctgttgctaatgacactggcttcacagtggtcgcacctggaaaggagaaggccctgatgaaagcagtcgcaactgtggggcccatctccgttgctatggatgcaggccattcgtccttccagttctacaaatcaggcatttattttgaaccagactgcagcagcaaaaacctggatcatggtgttctggtggttggctacggctttgaaggagcaaattcgaataacagcaagtattggctcgtcaaaaacagctggggtccagaatggggctcgaatggctatgtaaaaatagccaaagacaagaacaaccactgtggaatcgccacagcagccagctaccccaatgtgtgagctgatggatggtgaggaggaaggacttaaggacagcatgtctggggaaattttatcttgaaactgaccaaacgcttattgtgtaagataaaccagttgaatcattgaggatccaagttgagattttaattctgtgacatttttacaagggtaaaatgttaccactactttaattattgttatacacagctttatgatatcaaagactcattgcttaattctaagacttttgaattttcattttttaaaaagatgtacaaaacagtttgaaataaattttaattcgtatataaaaaaaaaaaaaacccggggggggcccccggaccccnt

SEQ ID NO: 12 - DNA, 617 bp, Homo sapiens
  misc_feature (386)..(386): n equals a,t,g, or c
  misc_feature (402)..(402): n equals a,t,g, or c
  misc_feature (439)..(439): n equals a,t,g, or c
  misc_feature (518)..(518): n equals a,t,g, or c
  misc_feature (555)..(555): n equals a,t,g, or c
  misc_feature (602)..(602): n equals a,t,g, or c
gccccgacagacactgtgaacggaagacagcaggccgcgatcagagtcgctgttcattcagccgcagcctctgggccggggcggcccccaggggccaggagagagccctggagtcccgcagccaccatgcacgctcccagcgtkctgtgtccttcgccactcccacgcgcccgttcctcttccgtcgccctctgtcccctgctctacctctctgtccttgtctggctctcccgtcaccctccctgcctctgtctctctcctggccgcacaggatggccttcagggaaggtggtcttggggcatggtgcagagcaggtgaccggagggaatcggtgacggagcggggccaagggaggggtccggagggagtcagggatggagggcanagggagtggatgtggnggtttgaggacgtgtgacaagctccagcaggggtggnggccgggctgagggtggtggtgcgaggtgggtcactcccatcgtgcccctggccgtccctccactcacccacacctggnccagtccacgttgaggtccaggactgggaaggaccgntgagtgcaccggtgacccaggccaggtgccccccggagcctgctgcntggccagaagcagga

SEQ ID NO: 13 - DNA, 868 bp, Homo sapiens
ggcacgaggccgccgactcacacaaggcagagttgccatggagaaaattccagtgtcagcattcttgctccttgtggccctctcctacactctggccagagataccacagtcaaacctggagccaaaaaggacacaaaggactctcgacccaaactgccccagaccctctccagaggttggggtgaccaactcatctggactcagacatatgaagaagctctatataaatccaagacaagcaacaaacccttgatgattattcatcacttggatgagtgcccacacagtcaagctttaaagaaagtgtttgctgaaaataaagaaatccagaaattggcagagcagtttgtcctcctcaatctgggttatgaaacaactgacaaacacctttctcctgatggccagtatgtccccaggattatgtttgttgacccatctctgacagttagagccgatatcactggaagatattcaaaccgtctctatgcttacgaacctgcagatacagctctgttgcttgacaacatgaagaaagctctcaagttgctgaagactgaattgtaaagaaaaaaaatctccaagcccttctgtctgtcaggccttgagacttgaaaccagaagaagtgtgagaagactggctagtgtggaagcatagtgaacacactgattaggttatggtttaatgttacaacaactattttttaagaaaaacaagttttagaaatttggtttcaagtgtacatgtgtgaaaacaatattgtatactaccatagtgagccatgattttctaaaaaaaaaaataaatgttttgggggtgttctgttttctccaaaaaaaaaaaaaaaaaaaaaaaaaaaaaaaaaaaaa

SEQ ID NO: 14 - DNA, 1693 bp, Homo sapiens
  misc_feature (5)..(5): n equals a,t,g, or c
  misc_feature (8)..(8): n equals a,t,g, or c
  misc_feature (15)..(15): n equals a,t,g, or c
  misc_feature (62)..(62): n equals a,t,g, or c
agaangtncgacacnaaccctcactaaagggaacaaaagctggagctccaccgcggtgcagnccgctctagaactagtggatcccccgggctgcaggaattcggcacgaggtgctgtgatcacaggcacgagccactgcatcctgcctttaaatggttttttggggccccttttggatgctctgggtgtttttgccaagagttacaggatgtcaagtgtggggagctcagcacccttgctgtggaccagtgaaggctgttccagaccaggtgcttccagacatttccaggctccaggagagaggctgggagcccccacagaaagcacaggaaaatgcaaaaaaaaaacagtcttttttttttttttgctttttattatgaaaacaaaacaaatgccccaggagaagggtccatgattaccagaaacatcaaagagtactttctaccatttttattctgttgtgttgaggccagcattgcaataaacaagctaaactacttacattggactcattttcagtaactgacatttacaggaatatactagaaacggcactaaaaagtttaagaaaagttacggtaaacttgcatgcacatcatacagaaaagtaacattttaaatataaaaaagaaaaacttcctggaagcattatgccagtattaaggaacagtgctactctggatgtgacaaattctgtatgtgggtgttactctttcccaaaagactgtcagaggcgtgagtgctgcaaaagaacaacaacaaaaacaaacacacaaaaaaatgtgtcttacagtttgtaagcaagatgacactgcccaacacaaagaggggtctggagttcagttcacgcccgaagcctgccccctcggcctccaggggtcattcagagtgttctcaaatccaattccgacacacgacttgtcactactcctctccccttgaaaaaagcatgttagaagctgccctacaggtctcagcagtgggacaatctaattgaatcaccgcagccttctaatacagaagaaacggacgtgactgtcaccctcagcccgccagcaagggcgctgaggaagtcattaatccttcgaaactctgaaaagaaaccagtgttgaagtctggacagaaagccttaaaaaagtgacagcaccaatgcagctgctcagtgtacccgccgtgggctgtcagggtcagtggcttctttctagatgaaaggagcagaggcgagccgacgccaccgtcacagagaaccagccgagaaggaaaggccccacgatgctcctgtgcgctgcccccacagccggccgctcccccgacggctcacacaggcagcacctcactgccctgtggctggaggggcattgcaaggagcgccccccagccccaggcacccccggcttagggtgtacgtatcacccagccctgtgctggcagcacgttaccaaccagcctgcgtgaagacctgtcaactgtcgtgtgtgaattccttaaattcggtttaaatagtccattaaagatctgtttagaaaatacctttgaaaacgagggtaactttaaaaaatggaaactttcaaatccatttatatttttattataaacaaaacttaattaaaagtttaacaaactgaaaaaaaaaaaaaaaaaaaactcgagggggggcccggtacccaattcgcccggagttcaagagacatc

SEQ ID NO: 15 - DNA, 856 bp, Homo sapiens
tcctagccgccgactcacacaaggcaggtgggtgaggaaatccagagttgccatggagaaaattccagtgtcagcattcttgctccttgtggccctctcctacactctggccagagataccacagtcaaacctggagccaaaaaggacacaaaggactctcgacccaaactgccccagaccctctccagaggttggggtgaccaactcatctggactcagacatatgaagaagctctatataaatccaagacaagcaacaaacccttgatgattattcatcacttggatgagtgcccacacagtcaagctttaaagaaagtgtttgctgaaaataaagaaatccagaaattggcagagcagtttgtcctcctcaatctggtttatgaaacaactgacaaacacctttctcctgatggccagtatgtccccaggattatgtttgttgacccatctctgacagttagagccgatatcactggaagatattcaaaccgtctctatgcttacgaacctgcagatacagctctgttgcttgacaacatgaagaaagctctcaagttgctgaagactgaattgtaaagaaaaaaaatctccaagcccttctgtctgtcaggccttgagacttgaaaccagaagaagtgtgagaagactggctagtgtggaagcatagtgaacacactgattaggttatggtttaatgttacaacaactattttttaagaaaaacaagttttagaaatttggtttcaagtgtacatgtgtgaaaacaatattgtatactaccatagtgagccatgattttctaaaaaaaaaaataaatgttttgggggtgtttctccaaaaaaaaaaaaaaaa

SEQ ID NO: 16 - DNA, 1552 bp, Homo sapiens
ggcacgagcggctgcgggcgcgaggtgaggggcgcgaggttcccagcaggatgccccggctctgcaggaagctgaagtgagaggcccggagagggcccagcccgcccggggcaggatgaccaaggcccggctgttccggctgtggctggtgctggggtcggtgttcatgatcctgctgatcatcgtgtactgggacagcgcaggcgccgcgcacttctacttgcacacgtccttctctaggccgcacacggggccgccgctgcccacgcccgggccggacagggacagggagctcacggccgactccgatgtcgacgagtttctggacaagtttctcagtgctggcgtgaagcagagtgaccttcccagaaaggagacggagcagccgcctgcgccggggagcatggaggagagcgtgagaggctacgactggtccccgcgcgacgcccggcgcagcccagaccagggccggcagcaggcggagcggaggagcgtgctgcggggcttctgcgccaactccagcctggccttccccaccaaggagcgcgcattcgacgacatccccaactcggagctgagccacctgatcgtggacgaccggcacggggccatctactgctacgtgcccaaggtggcctgcaccaactggaagcgcgtgatgatcgtgctgagcggaagcctgctgcaccgcggtgcgccctaccgcgacccgctgcgcatcccgcgcgagcacgtgcacaacgccagcgcgcacctgaccttcaacaagttctggcgccgctacgggaagctctcccgccacctcatgacaggtcaagctcaagaagtacaccaagttcctcttcgtgcgcgaccccttcgtgcgcctgatctccgccttccgcagcaagttcgagctggagaacgaggagttctaccgcaagttcgccgtgcccatgctgcggctgtacgccaaccacaccagcctgcccgcctcggcgcgcgaggccttccgcgctggcctcaaggtgtccttcgccaacttcatccagtacctgctggacccgcacacggagaagctggcgcccttcaacgagcactggcggcaggtgtaccgcctctgccacccgtgccagatcgactacgacttcgtggggaagctggagactctggacgaggacgccgcgcagctgctgcagctactccaggtggaccggcagctccgcttccccccgagctaccggaacaggaccgccagcagctgggaggaggactggttcgccaagatccccctggcctggaggcagcagctgtataaactctacgaggccgactttgttctcttcggctaccccaagcccgaaaacctcctccgagactgaaagctttcgcgttgctttttctcgcgtgcctggaacctgacgcacgcgcactccagtttttttatgacctacgattttgcaatctgggcttcttgttcactccactgcctctatccattgagtactgtatcgatattgttttttaagattaatatatttcaggtatttaatacgaaaaaaaaaaaaaaaaa

SEQ ID NO: 17 - DNA, 1550 bp, Homo sapiens
ggcacgagcggctgcgggcgcgaggtgaggggcgcgaggttcccagcaggatgccccggctctgcaggaagctgaagtgagaggcccggagagggcccagcccgcccggggcaggatgaccaaggcccggctgttccggctgtggctggtgctggggtcggtgttcatgatcctgctgatcatcgtgtactgggacagcgcaggcgccgcgcacttctacttgcacacgtccttctctaggccgcacacggggccgccgctgcccacgcccgggccggacagggacagggagctcacggccgactccgatgtcgacgagtttctggacaagtttctcagtgctggcgtgaagcagagtgaccttcccagaaaggagacggagcagccgcctgcgccggggagcatggaggagagcgtgagaggctacgactggtccccgcgcgacgcccggcgcagcccagaccagggccggcagcaggcggagcggaggagcgtgctgcggggcttctgcgccaactccagcctggccttccccaccaaggagcgcgcattcgacgacatccccaactcggagctgagccacctgatcgtggacgaccggcacggggccatctactgctacgtgcccaaggtggcctgcaccaactggaagcgcgtgatgatcgtgctgagcggaagcctgctgcaccgcggtgcgccctaccgcgacccgctgcgcatcccgcgcgagcacgtgcacaacgccagcgcgcacctgaccttcaacaagttctggcgccgctacgggaagctctcccgccacctcatgaaggtcaagctcaagaagtacaccaagttcctcttcgtgcgcgaccccttcgtgcgcctgatctccgccttccgcagcaagttcgagctggagaacgaggagttctaccgcaagttcgccgtgcccatgctgcggctgtacgccaaccacaccagctgcccgcctcggcgcgcgaggccttccgcgctggcctcaaggtgtccttcgccaacttcatccagtacctgctggacccgcacacggagaagctggcgcccttcaacgagcactggcggcaggtgtaccgcctctgccacccgtgccagatcgactacgacttcgtggggaagctggagactctggacgaggacgccgcgcagctgctgcagctactccaggtggaccggcactccgcttccccccgagctaccggaacaggaccgccagcagctgggaggaggactggttcgccaagatccccctggcctggaggcagcagctgtataaactctacgaggccgactttgttctcttcggctaccccaagcccgaaaacctcctccgagactgaaagctttcgcgttgctttttctcgcgtgcctggaacctgacgcacgcgcactccagtttttttatgacctacgattttgcaatctgggcttcttgttcactccactgcctctatccattgagtactgtatcgatattgttttttaagattaatatatttcaggtatttaatacgaaaaaaaaaaaaaaaaaa

SEQ ID NO: 18 - DNA, 2416 bp, Homo sapiens
cccccgggctgcaggaattcggcacgagcccagccagaaccccgcctttgttcatgcctatgcgcagcatgaagttattgaaggactggttgttgatgttggtgagcgtatccttcatggccagcgcgaagtcggccaggtcagccaggtgctgccagcgctctctctcggacttgtcttccttgttggagctggcaaagccattggtgttgacatcgggggtgactcctgaagccgccatatacgtgctgccaatggttttgatcttggtgatcacccggaacttgggattgtccaggagagagtcaaaatctgagatgatttcattgaggaaacgcagacactcaataccaccattgttgatgctctcctctgtgtagaagtcagcaaagttgggcagggaggcaaacatgactccaatctcatcatacgtctggctatacagctcctcatctctcttcttggaccccaggaaatggcgtgccacgtgctcaggcaacatgttggtgaccaaggcctcgttccagcgtcgcatctcatagacacgttccttctggtcgtggacctcaatcttccacaagaaaagtgtccgtgccagtttttctacgtggcgggagaagtagtagaagctgagcatcatgaggaacaccatcaccgtcatagagtacttggaaggcaccaggggcagcctgtcagtgccattgagcccagggttgaatccttgcatctgctctaaggccaccataggtaagtcgtgctcccgaaaacgcttgtggtcgtattcatcaaagacgggacgccaggcatagaggttgatggtggccacggcgcctgcgacgagcagcatgagcgtgagcttcaccatgtggctgaccatgtccacgacatttgccatcaccaggatgaagatggcgagcatggcccaggtgttcctggcccagcgggtccggtcaatccaagttgagaaggccacaagcttcttaggaaaggcccggggaaagatggcagccagggagcagatggtcaggatgaggagcagaatctcccccaccatgaaggtcacatagtttgtcattagccaggggtcgatgagtatctcgaccagggccgtgcagagcaggacgacgcaggagcagctgaaggcagccccactctgcttctccttctccaccgagtagcgggtttccatctcggggtccatgaaccgcatggacaagaggaaggtgtttctcttctttactacttgggcggactctcgctcaagcagggcctcgttgagcagctggttgagctcgtgctcatcttcagaggcatccaccactcggtcagccaggtcctgcaggcgcagcctccggcgtgggttggggaatgaggggttgtcggcctgggcatcctgctcctcgggcttctccgacgtggacccactgctgtgggcactcccgttgggctccttggtctcaatgagggcaggggagctggactttgaggaagctggtgctccattgggcagggccgagccattgaggccattctgggtggctgttttcttcacctctggcttggaggcaatgatgaggtaggtttcaatacccttctcttctaggtaatcacagcggctgcccccatcgcctggctccacatcaaactcccctttcaggcagtccatggtgctctgggagatgtgcacgcgcccagggatgccgccggcctccatcttgttggctacagtgacatcagtcgaccacacgtcgtactgccagcgcttctggcccaggacgccccccagcacggtgcccgtgtgcacccccacacgcatgtccaccccagtcttggtcttctcccgcacatacgagatggcctccaccatggccagccccatgaggatggagcagacggcgtggtcctcccggtagtcgggcaagccgcagatgcagtagtagcagtcgcccaggatcttaatccgcagctggtggtatttagctgccagcttgtcaaagcgggcaaagagctcgttgagcagcttcacaagctcctgggcactgcaggcagaagacagctgggtaaagcccacgatgtcggcaaagaggatgctgacgttctcgtgacggtacatgtacatggtgttgaactgctgctggtccttctggctctcgtctttcttcatgtctttcagcatctcgtcagccacgtgcttgggcaggatggaaagcatgaggttctcctgctgctggctctgctcttccaggttcatcttcacctccagcgactggcgggcctccaggaaggccttgcggtgcttgcggtcagccatgtagtaggacatgatgcccacagcgatggcgcacaggtagaggaagacgttggccaggatagttcagcatggctgggaaggcctcaggaaagggggggcccggta

SEQ ID NO: 19 - DNA, 1083 bp, Homo sapiens
  misc_feature (1081)..(1081): n equals a,t,g, or c
ggcacgagctcgtgccgaattcggcacgagcccaaacggagccacgtgaggacgtctttggggatgtgtctccaagaaaagtgtgggctgccttcctcaccctggatgcctgtgggctgccttcctcaccctggatgcctgtgggcwgccttcctcaccctggatgcctgtgggcwgccttcctcaccctggatgcctgtgggctgccttcctcaccctggatgcctgtgggcagccttcctcaccctggatgcctgtgggctgccttcctcaccctggatgcctgtgggcwgccttcctcaccctggatgcctgtgggcwgccttcctcaccctggatgcctgtgggcagccttcctcaccctggatgcctgtgggcagccttcctcaccctggatgcctgtgacttggtttccatgggggcttcctaagctcagggaccccaagcctccatcaaatctaatgacccgccctgtctctgaacacacctgtgttgtccccgagcccctcaccaaccccctctgcaacccggcccacgcatttcccatcctgaagggtccagctcataggccggcccatgtgttccctttacccctgctttgtccctacctggtggggagctgtcccttctgggccctagtgtggcacttcacacacaaatgtgtcctgtgggtggtatctgggcctccccctgcagtgaggggatgaccaatgtgcagagctcactgggcctggatatgggctcgggtggcacagaacagagagaaagtgctccgtaaaagtgagctgcgatgcggaggtgggcaagctcttccctggagggggaagagctctcaacccagagggatctgaccaggaaggttcaccccccctccacccaggaagcccctgcagacagtatgtgttttaggctttgctggccaaatggtctctgccgtgactactcagctctgccattgtggctgcagagtgaccatagaccttctgaaagtgaatgagtatgactgtgttccaataaaactttattgacagaaaaaaaaaaaaaaaaaaaagggcggccgctctagaggatccctcgacgnac

SEQ ID NO: 20 - DNA, 1025 bp, Homo sapiens
  misc_feature (1003)..(1003): n equals a,t,g, or c
cgctggccggccgtggggcaatgcaacggcctcccagcacagggctataagaggagccgggcgggcacggaggggcagagaccccggagccccagccccaccatgaccctcggccgccgactcgcgtgtcttttcctcgcctgtgtcctgccggccttgctgctggggggcaccgcgctggcctcggagattgtggggggccggcgagcgcggccccacgcgtggcccttcatggtgtccctgcagctgcgcggaggccacttctgcggcgccaccctgattgcgcccaacttcgtcatgtcggccgcgcactgcgtggcgaatgtaaacgtccgcgcggtgcgggtggtcctgggagcccataacctctcgcggcgggagcccacccggcaggtgttcgccgtgcagcgcatcttcgaaaacggctacgaccccgtaaacttgctcaacgacatcgtgattctccagctcaacgggtcggccaccatcaacgccaacgtgcaggtggcccagctgccggctcagggacgccgcctgggcaacggggtgcagtgcctggccatgggctggggccttctgggcaggaaccgtgggatcgccagcgtcctgcaggagctcaacgtgacggtggtgacgtccctctgccgtcgcagcaacgtctgcactctcgtgaggggccggcaggccggcgtctgtttcggggactccggcagccccttggtctgcaacgggctaatccacggaattgcctccttcgtccggggaggctgcgcctcagggctctaccccgatgcctttgccccggtggcacagtttgtaaactggatcgactctatcatccaacgctccgaggacaacccctgtccccacccccgggacccggacccggccagcaggacccactgagaagggctgcccgggtcacctcagctgcccacacccacactctccagcatctggcacaataaacattctctgttttgtaraaaaaaaaaaaaaaaantcgagggggggcccggtaccca

SEQ ID NO: 21 - DNA, 1558 bp, Homo sapiens
aattcggcacgagcggctgcgggcgcgaggtgaggggcgcgaggttcccagcaggatgccccggctctgcaggaagctgaagtgagaggcccggagagggcccagcccgcccggggcaggatgaccaaggcccggctgttccggctgtggctggtgctggggtcggtgttcatgatcctgctgatcatcgtgtactgggacagcgcaggcgccgcgcacttctacttgcacacgtccttctctaggccgcacacggggccgccgctgcccacgcccgggccggacagggacagggagctcacggccgactccgatgtcgacgagtttctggacaagtttctcagtgcttggcgtgaagcagagtgaccttcccagaaaggagacggagcagccgcctgcgccggggagcatggaggagagcgtgagaggctacgactggtccccgcgcgacgcccggcgcagcccagaccagggccggcagcaggcggagcggaggagcgtgctgcggggcttctgcgccaactccagcctggccttccccaccaaggagcgcgcattcgacgacatccccaactcggagctgagccacctgatcgtggacgaccggcacggggccatctactgctacgtgcccaaggtggcctgcaccaactggaagcgcgtgatgatcgtgctgagcggaagcctgctgcaccgcggtgcgccctaccgcgacccgctgcgcatcccgcgcgagcacgtgcacaacgccagcgcgcacctgaccttcaacaagttctggcgccgctacgggaagctctcccgccacctcatgaaggtcaagctcaagaagtacaccaagttcctcttcgtgcgcgaccccttcgtgcgcctgatctccgccttccgcagcaagttcgagctggagaacgaggagttctaccgcaagttcgccgtgcccatgctgcggctgtacgccaaccacaccagcctgcccgcctcggcgcgcgaggccttccgcgctggcctcaaggtgtccttcgccaacttcatccagtacctgctggacccgcacacggagaagctggcgcccttcaacgagcactggcggcaggtgtaccgcctctgccacccgtgccagatcgactacgacttcgtggggaagctggagactctggacgaggacgccgcgcagctgctgcagctactccaggtggaccggcagtccgcttccccccgagctaccggaacaggaccgccagcagctgggaggaggactggttcgccaagatccccctggcctggaggcagcagctgtataaactctacgaggccgactttgttctcttcggctaccccaagcccgaaaacctcctccgagactgaaagctttcgcgttgctttttctcgcgtgcctggaacctgacgcacgcgcactccagtttttttatgacctacgattttgcaatctgggcttcttgttcactccactgcctctatccattgagtactgtatcgatattgttttttaagattaatatatttcaggtatttaatacgaaaaaaaaaaaaaaaaaac

SEQ ID NO: 22 - DNA, 1025 bp, Homo sapiens; identical to SEQ ID NO: 20
  misc_feature (1003)..(1003): n equals a,t,g, or c

SEQ ID NO: 23 - DNA, 1342 bp, Homo sapiens
  misc_feature (1338)..(1338): n equals a,t,g, or c
ggccacgagtggggatcggggattgcaattattccccatatgcagtctgggccacctctcggagctttgcggccttcctggcctccaggctgattgggggcatcagcaaagggaacgtcagcctctccacggccatcgttgctgacctgggctcgcctctggcccgcagtcaaggcatggcggtcattggggtggccttctcactgggcttcaccctgggccctatgctcggagcctccctgcccctggaaatggcaccctggtttgccctgctcttcgcagcctccgacctgctgttcatcttctgcttcctgccagagacgctgcccctggagaaacgggcgccctctatcgccctggggttccgtgatgcggctgatctgctcagccccctggccctgctgcgcttctcggctgtcgctcgtggccaggacccaccctctggagacaggctcagcagcctgcgccgcctgggcctagtctacttcctctacctcttcctgttctcgggcctggagtacacgctgagcttcctcacacaccagcgcttccagttcagtagcctacagcaggggaagatgtttttcctcatcggcctcaccatggccaccatccagggtgcctatgcccggcggatccaccctggcggggaagttgctgccgtgaagcgggccctcctgctgctggtgcccgccttcctcctcatcggctggggacgttctctgcccgtgctgggcctggggctgctgctctactcctttgccgccgccgttgtggtgccctgcctgtcctccgtggtcgctggctatggctcaccagggcagaagggcacggtcatgggtacactgcgcagcctaggtgctctggccagggccgcggggcccctggtggccgcttcagtgtactggctggccggggcccaggcctgcttcaccacgtggtccgggctctttttgctccccttcttcctcctgcagaagctgagttacccggcacagacgctcaaggctgagtagctgagccactgtgcccaggctgtgggcaccaggcagagtgggagcctaggtcaggcccctgcccactgcctgacccccaccccccgccagtccagggagaccctgtgggtgggggccggcccctaagcaggaagctcaggcagctcctccagacttactccttcagtgactccgagctgcagcactccaaggctgtcagggcttctgtttgttttttaaactatgcaccaggtttctgatgatgaaataaagcacctgtttgttttawaaaaaaacggcacgagggggggcccggtacccaattggccctagaagaggcganagga

SEQ ID NO: 24 - DNA, 635 bp, Homo sapiens
  misc_feature (632)..(632): n equals a,t,g, or c
  misc_feature (634)..(634): n equals a,t,g, or c
aacgtaycgacccatccawtgactacggggcggaaacgccgcaactcaactgtaaaatcgtaasccgtcttcagttaagagagcgagatgtatagaactcatcgacaacacagcctgttaagctctggtggagtgcccatcgtttattggtgggctggtggtgtttgtgtcggcagcgttcaatgcacaagctgaaacctggttcgatcctgcttttttcaaagatgatccctcaatggtggccgatttgtctcgtttcgaaaaaggacaaaaaataacgccaggggtttatcgtgtcgatattgttctgaatcagacaattgtagatacgcgcaacgtcaattttgttgagataacgccagagaaggggattgccgcctgtttgacgactgaaagcctggatgcaatgggtgttaatactgatgcgtttccggcttttaaacaactggacaaacaagcgtgtgtgccattggcggagattattccggatgccagcgtaacgtttaatgtgaataaactccgtctggaaatttcagtaccgcaaatcgccatcaaaagtaatgcccgtggttatgtcccccctgaacgttgggatgaagggggcccgtacccaattcccctatagtagcccntnc

SEQ ID NO: 25 - DNA, 1569 bp, Homo sapiens
  misc_feature (1429)..(1429): n equals a,t,g, or c
  misc_feature (1452)..(1452): n equals a,t,g, or c
ggcagagctagtgtggactccatccccctggagtgggatcacgactatgacctcagtcgggacctggagtctgcaatgtccagagctctgccctctgaggatgaagaaggtcaggatgacaaagatttctacctccggggagctgttggcttatcaggggaccacagtgccctagagtcacagatccgacaactgggcaaagccctggatgatagccgctttcagatacagcaaaccgaaaatatcattcgcagcaaaactcccacggggccggagctagacaccagctacaaaggctacatgaaactgctgggcgaatgcagtagcagtatagactccgtgaagagactggagcacaaactgaaggaggaagaggagagccttcctggctttgttaacctgcatagtaccgaaacccaaacggctggtgtgattgaccgatgggagcttctccaggcccaggcattgagcaaggagttgaggatgaagcagaacctccagaagtggcagcagtttaactcagacttgaacagcatctgggcctggctgggggacacggaggaggagttggaacagctccagcgtctggaactcagcactgacatccagaccatcgagctccagatcaaaaagctcaaggagctccagaaagctgtggaccaccgcaaagccatcatcctctccatcaatctctgcagccctgagttcacccaggctgacagcaaggagagccgggacctgcaggatcgcttgtcgcagatgaatgggcgctgggaccgagtgtgctctctgctggaggagtggcggggcctgctgcaggatgccctgatgcagtgccagggtttccatgaaatgagccatggtttgcttcttatgctggagaacattgacagaaggaaaaatgaaattgtccctattgattctaaccttgatgcagagatacttcaggaccatcacaaacagcttatgcaaataaagcatgagctgttggaatcccaactcagagtagcctctttgcaagacatgtcttgccaactactggtgaatgctgaaggaacagactgtttagaagccaaagaaaaagtccatgttattggaaatcggctcaaacttctcttgaaggaggtcagtcgtcatatcaaggaactggagaagttattagacgtgtcaagtagtcagcaggatttgtcttcctggtcttctgctgatgaactggacacctcagggtctgtgagtcccacatcaggaaggagcaccccaaacagacagaaaacgccacgaggcaagtgtagtctctcacagcctggaccctctgtcagcagtccacatagcaggtccacaaaaggtggctccgattcctccctttctgagccagggccaggtcggtccggccgcggcttcctgttcagagtcctccgagcagctcttncccttcagcttctcctgcttctnctcatcgggcttgcctgccttgtaccaatgtcagaggaagactacagctgtgccctttcaacaacttttgccggcattccacccatgctcagatacacgaatggcctctcactctga

SEQ ID NO: 26 - DNA, 1483 bp, Homo sapiens
cactatagaaggtacgcctgcaggtaccaggtccggaattcccgggtcgacccacgcgtccgcggacgcstksgctgccatggacatcctggtcccactcctgcagctgctggtgctgcttcttaccctgcccctgcacctcatggctctgctgggctgctggcagcccctgtgcaaaagctacttcccctacctgatggccgtgctgactcccaagagcaaccgcaagatggagagcaagaaacgggagctcttcagccagataaaggggcttacaggagcctccgggaaagtggccctactggagctgggctgcggaaccggagccaactttcagttctacccaccgggctgcagggtcacctgcctagacccaaatccccactttgagaagttcctgacaaagagcatggctgagaacaggcacctccaatatgagcggtttgtggtggctcctggagaggacatgagacagctggctgatggctccatggatgtggtggtctgcactctggtgctgtgctctgtgcagagcccaaggaaggtcctgcaggaggtccggagagtactgagaccgggaggtgtgctctttttctgggagcatgtggcagaaccatatggaagctgggccttcatgtggcagcaagttttcgagcccacctggaaacacattggggatggctgctgcctcaccagagagacctggaaggatcttgagaacgcccagttctccgaaatccaaatggaacgacagccccctcccttgaagtggctacctgttgggccccacatcatgggaaaggctgtcaaataatctttcccaagctccaaggcactcatttgctccttccccagcctccaattagaacaagccacccaccagcctatctatcttccactgagagggacctagcagaatgagagaagacattcatgtaccacctcctagtccctctctccccaacctctgccagggcaatctctaacttcaatcccgccttcgacagtgaaaaagctctacttctacgctgacccagggaggaaacactaggaccctgttgtatcctcaactgcaagtttctggactagtctcccaacgtttgcctcccaatgttgtccctttccttcgttcccatggtaaagctcctctcgctttcctcctgaggctayacccatgcgtctctaggaactggtcacaaaagtcatggtgcctgcatccctgccaagcccccctgaccctctctccccactaccaccttcttcctgagctgggggcaccagggagaatcagagatgctggggatgccagagcaagactcaaagaggcagaggttttgttctcaaatattttttaataaatagacgaaaccacgaaaaaaaaaaaaaaagggcggccgctctagaggatccctcgaggggcccaagcttacgcgtgcatgcgacgtcatagctctctccctatagkgagycgwatataagtaag

SEQ ID NO: 27 - DNA, 1383 bp, Homo sapiens
ccacgcgtccgttcttcttctgtaaaatggaaataatacttgtctcacagaattgtttaaagattaaatgaaaaaaaagattaaatgagatgtatgcaaaagagacacagcaagcatgcagtaaatgttagctgctagaatttgttggttaaaagaatgatctctgctaaccagtgctccttgctgttcatttcactggagaagcttgtaagacacagctacttgttcactgcctagaatctaagcccgacaagggcagagactttgccttatttattgctatatccccagcaactatcatatgactgggacatgataggtattccacaaatccctatttgttgatgaatgactggataaatgaatgaatacaggtaacacaggtataattttactgctattctgattttatgaatgaggaaactacgtctcagagaggtcaagctgcttgcataaagtcccacagagagttagagagggattaaaatacagttcccctgcctggttgtgcttctcttttaccatatcacttactagggctttgtttcattatccaaaaattcaggtacagcatctaattagttactaagtaacaattttcaaaggctaaacatgattcttaaattttaaaacttaccgtggtatccacagccttgactttctctgtgggaatgtgctttggctcaggttctgtctgtgacagcaccacacatccttcagcccctaaggtaatgattaccacctggcagccccttttcaagagcactaatgcagcctccccagcatctgcagcgctgcccaccgtgaggccagttaaaatctcagcctagaatacacaaaagtcaacagaaacagtggtgaaaataagtaacctgaatccacttccagatgcgtttttctagaaaatgtctcccttcttttttataacaaccaatgcaatgggaaccttgatagatactggtacaggaaaataaataaagcaataacagtgatgacaaaaaccatcaatgaaagacattctggggacaactggggaaatttgaatgtggcttggatattagatgatagcatggaattactgacaatcttcctaggtgtgataatggtattgtgtttcctcttaggagatgtatgccgaagtatttggggtgaggcatcatgttgtctgcaacttattctcaacaacaaaatacttttttttccacttacttttcaacaaaaacaaaactaaatacatacagggaagaggaaaagcaaatacagcaaaatgttagcaaatgtttaggtgaaatgtagagtgttcattcagcttttctgcacatataataattttaacaaagagttggggcaacaaagagaagtctaccaaaaaaaaaaaaaaaa

SEQ ID NO: 28 - DNA, 1671 bp, Homo sapiens
ccacgcgtccgggcaaagaattaaacctggtgtttggacttcaacttagcatggctagaattggaagtacagtaaacatgaacctcatgggatggctgtattctaagattgaagctttgttaggttctgctggtcacacaaccctcgggatcacacttatgattgggggtataacgtgtattctttcactaatctgtgccttggctcttgcctacttggatcagagagcagagagaatccttcataaagaacaaggaaaaacaggtgaagttattaaattaactgatgtaaaggacttctccttacccctgtggcttatatttatcatctgtgtctgctattatgttgctgtgttcccttttattggacttgggaaagttttctttacagagaaatttggattttcttcccaggcagcaagtgcaattaacagtgttgtatatgtcatatcagctcccatgtccccggtgtttgggctcctggtggataaaacagggaagaacatcatctgggttctttgcgcagtagcagccactcttgtgtcccacatgatgctggcctttacgatgtggaacccttggattgctatgtgtcttctgggactctcctactcattgcttgcctgtgcattgtggccaatggtggcatttgtagttcctgaacatcagctgggaactgcatatggcttcatgcagtccattcagaatcttgggttggccatcatttccatcattgctggtatgatactggattctcgggggtatttgtttttggaagtgttcttcattgcctgtgtttctttgtcacttttatctgtggtcttactctatttggtgaatcgtgcccagggtgggaacctaaattattctgcaagacaaagggaagaaataaaattttcccatactgaatgagaagttaaaatgaatgtgtcatgagaatgggcttaacacatcgttggtttgaaaacttccatttttaaaaatttagagtttagtcattagaaaaaataatggactggaaagttatatttatatccaaatatacctatttcaaagtgtatttgtgaggcctgttttagcctgtgtcttttgtattgtgtgttgctaaagaattctacttttagtaggctaatcaacaatgaaagggttagaaaattgctgtggaacatccaggtgaacttcaggaaagacagtgaaaaatggaaaacgttggagcttctgttgagataatcttcattaggtatatatcttagggatacagccttttctttatcttatagcaggaaaaaaaaacttttgagggaaatagaagggctgcgttacacaaaataaacaatggcattgtcataggccttccttttactagtagggcataatgctagggaatatgtgaagatgtttttttgaagtctctttctgatcacgaacaatagcttgcgctctactctgtagttatgtggattgccgagcaatgacccttttcaatttcttatttctgtgttactgaggaccctaatcacttagggatgtaattttatagtataaactttctgtacagtttttcttatagtctaataagtaaaaagtgtccttcaaattatgataattgcctatgtacatggataaattaaaacactgcacacggaaaaaaaaaaaaaaaaaaaaaaaaaaa

SEQ ID NO: 29 - DNA, 516 bp, Homo sapiens
ggcacgagattagctaccccttttgttatactttattatacatatatgtatgtatatatacagtatgtgtgtatgcatatatgtatgtatatatacagtatgtgcgtatacatatatgtatgtatatatacagtatgtgcgtatacatgtatgtatacatacagtatgtgcgtatacatgtgtgtatgcatacagtatgtgcgtatacatgtatgtatacatacagtatgtgcgtatacatgtatgtatgtatgcatacagtatgtgcatatacatgtatgtatgcatatatacatacgtatatatacagtcgggtcgaaaccaccctactgttttcaaatatgtgatgatactgataagaggcttggccctagtgtggtatatttatgggaacccagcaataggtaatttaactttttagcatattgtatttgtaattcaagttgaccagatttttattagtgaagaaaaggagacagtaaaatttatatattcccctggtggttaaaaaaaaaa

SEQ ID NO: 30 - DNA, 1019 bp, Homo sapiens
cccacgcgtccgcccacgcgtccgctcccgcagccgcagccgccgtgctcagcgcgagccccggagcccttgagcgcgaggcgcggagcccccggagcccccaaaccgcagacacatccccgcgccccagagccccggcctgcgcgcccagccgggcccgcgcgatgccctcagaccggcctttcaagcagcggcggagcttcgccgaccgctgtaaggaggtacagcagatccgcgaccagcaccccagcaaaatcccggtgatcatcgagcgctacaagggtgagaagcagctgcccgtcctggacaagaccaagtttttggtcccggaccatgtcaacatgagcgagttggtcaagatcatccggcgccgcctgcagctgaaccccacgcaggccttcttcctgctggtgaaccagcacagcatggtgagtgtgtccacgcccatcgcggacatctacgagcaggagaaagacgaggacggcttcctctatatggtctacgcctcccaggaaaccttcggcttctgagccagcagtaggggggctcggcctgggagtcggggggccccggtcaggccctgcccagagagctcctggttcctgaactgagctgcctctaccgtggtgggctgggcaggcatgtgcccccctagtcagagggcaccaacccacctactctgcccctgggtggatcctgggccggtcgtgttagggttgtccctctgggtgctggctggtgggatgggggagggtggggagcagctcccagcacccctgctgtgtggttcatcttttttttaggcccctgcctgtctgcccatctgcccctcacccacccgaggctctgcccaccgcctggacctgcccacccctgaaagactggcccctggctccccgcccctcggtctccacgtggtgtatggatctgtggtcattgtccctctgcagaataaagattgctcaggcctgcctggcaaaaaaaaaaaaaaaaaaaaaaaaaaaaaaaaaaaaaaaaaa

SEQ ID NO: 31 - DNA, 578 bp, Homo sapiens
gcacgagcttcattcggctctccctgaagctgtactgcctcgctgagaggatgaaggtctccgaggctgccctgtctctccttgtcctcatccttatcattacttcggcttctcgcagccagccaaaagttcctgagtgggtgaacaccccatccacctgctgcctgaagtattatgagaaagtgttgccaaggagactagtggtgggatacagaaaggccctcaactgtcacctgccagcaatcatcttcgtcaccaagaggaaccgagaagtctggcaccaaccccaatgacgactgggtccaagagtacatcaaggatcccaacctacctttgctgcctaccaggaacttgtccacggttaaaattattacagcaaagaatggtcaaccccagctcctcaactcccagtgatgaccaggctttagtggaagcccttgtttacagaagagaggggtaaacctatgaaaacaggggaagccttattaggctgaaactagccagtcacattgagagaagcagaacaatgatcaaaataaaggagaagtatttcgaaaaaaaaaaaaaaaaaaaaaaaa

SEQ ID NO: 32 - DNA, 717 bp, Homo sapiens
  misc_feature (47)..(47): n equals a,t,g, or c
  misc_feature (699)..(699): n equals a,t,g, or c
aaattaaccctcactaaagggaacaaaagctggagctccaccgcggnggcggccgctctagaactagtggatcccccgggctgcaggaattcgcacgagcttcattcggctctccctgaagctgtactgcctcgctgagaggatgaaggtctccgaggctgccctgtctctccttgtcctcatccttatcattacttcggcttctcgcagccagccaaaagttcctgagtgggtgaacaccccatccacctgctgcctgaagtattatgagaaagtgttgccaaggagactagtggtgggatacagaaaggccctcaactgtcacctgccagcaatcatcttcgtcaccaagaggaaccgagaagtctggcaccaaccccaatgacgactgggtccaagagtacatcaaggatcccaacctacctttgctgsctaccaggaacttgtccacggttaaaattattacagcaaagaatggtcaaccccagctcctcaactcccagtgatgaccaggctttagtggaagcccttgtttacagaagagaggggtaaacctatgaaaacaggggaagccttattaggctgaaactagccagtcacattgagagaagcagaacaatgatcaaaataaaggagaagtatttcgaaaaaaaaaaaaaaaaaaaaaaaactcgagggggggcccrgtacccaattcgnccctaatagtggaggcgt

SEQ ID NO: 33 - DNA, 1106 bp, Homo sapiens
ggcacgagcggcacgagctcttctgcttgggaggacatggccactgttttcagtattttaccagtacctggagcaatcaaagtatcgtgttatgaacaaagatcaatggtacaatgtattagaattcagcagaacagtccatgctgatcttagtaactatgatgaagatggtgcttggcctgttcttcttgatgaatttgttgagtggcaaaaagtccgtcagacatcatagcaagaactatgtgaagaaaatgcaaacctttcaattcccacgtgtatacaagctaatgtgatgagggggaaaaaaatccaacgggtgcattttcattcatatgaaagacttctcatagtacttttttttcctttttttaaaggaggtttttcttgttacatgtgatgggcattgagccacacctcttcttagactgaatattgaagtttttgttttgagttatgtttataacatttatttcagacaataaagattcagatttgtgacaaaggccttaaactcgtgccgaattcggcacgagttttttttttttttttcagaaaagccagttttttttttatttgtaaagctctgccataaacttttagcgtgtgccaatggtcacctgccacactcgcaccaggttgtccgtgtagccagcaaacagagtctggccatcagcagaccaggccagggaggtgcactggggtggttctgccttgctgctggtactgatactcgtgccgaattcggcacgagtgacgacctacgcacacgagaacatgcctctcgcaaaggatctccttcatccctctccagaagaggagaagaggaaacacaagaagaaacgcctggtgcagagccccaattcctacttcatggatgtgaaatgcccaggatgctataaaatcaccacggtctttagccatgcacaaacggtagttttgtgtgttggctgctccactgtcctctgccagcctacaggaggaaaagcaaggcttacagaaggatgttccttcaggaggaagcagcactaaaagcactctgagtcaagatgagtgggaaaccatctcaataaacacattttggataaaaaaaaaaaaaaaaaaaaaaa

SEQ ID NO: 34 - DNA, 566 bp, Homo sapiens
cccaggagtcctcggccagccctgcctgcccaccaggaggatgaaggtctccgtggctgccctctcctgcctcatgcttgttactgcccttggatcccaggcccgggtcacaaaagatgcagagacagagttcatgatgtcaaagcttccattggaaaatccagtacttctggacagattccatgctactagtgctgactgctgcatctcctacaccccacgaagcatcccgtgttcactcctggagagttactttgaaacgaacagcgagtgctccaagccgggtgtcatcttcctcaccaagaaggggcgacgtttctgtgccaaccccagtgataagcaagttcaggtttgcatgagaatgctgaagctggacacacggatcaagaccaggaagaattgaacttgtcaaggtgaagggacacaagttgccagccaccaactttcttgcctcaactaccttcctgaattatttttttaagaagcatttattcttgtgttctggatttagagcaattcatctaataaacagtttctcactttaaaaaaaaaaaaaaaaaagggcg

SEQ ID NO: 35 - DNA, 1544 bp, Homo sapiens
caagaaaatcccttttgccgatttaaggcagtaggttatagttgcatgcccagtaataaagatgaagatgggctagtggttttagttttcaacaaaaaagaaacagagattcgaagccaacaacaacagttggtagaatcattgcataaagttttgggaggaaaccagacccttactgtaaatgtagagggcactaaaacattgccagatgatcagacagaagttgttatttatgttgttgagcgttcgccaaatggtacttcaagaagagttccagctacaacgctatatgcccattttgaacaagccaatataaaaacacaattgcagcaacttggtgtaaccctttctatgactagaacagaactttctcctgcacagatcaaacagcttttacagaatcctcctgctggtgttgatcctattatctgggaacaggccaaggtagataaccctgattctgaaaagttaattcctgtaccaatggtgggttttaaggaacttctccgaagactgaaggttcaagatcagatgactaagcagcatcaaaccagattagatatcatatctgaagatattagtgagctacaaaagaatcaaactacatctgtagccaaaattgcacaatacaagaggaaactcatggatctttcccatagaactttacaggtcctaatcaaacaggaaattcaaaggaagagtggttatgccattcaggctgatgaagagcagttgcgagttcagctggatacgattcagggtgaactaaatgcacctactcagttcaagggccgactaaatgaattgatgtctcaaatcaggatgcagaatcattttggagcagtcagatctgaagaaaggtattacatagatgcagatctgttacgagaaatcaagcagcatttgaaacaacaacaggaaggccttagccatttgattagcatcattaaagacgatctagaagatataaagctggtcgaacatggattgaatgaaaccatccacatcagaggtggtgtctttagttgacagttcacaaacttgtgtaaaggtttgtgaaatgcatcttcttactgcatcagaccttccttaagaatgaaaccgaccacatggagggaaaaagaaaacaattctttcttggattggttttttgagaagtttactgacaaattactgttcatcaaatctgaaatagtcacctcacagctcttcaaagaaaacctttgaaagatttatatctaaaagctgtatttactttaaaagaagtgcataattaccaaaattgtatgtactattgtacatttttacaacagcattttcttaaacataatctgtgtttaatgattattgtccattgagcctgtactctgctttccataccaagtaaatatgaaataatctactttgcacataacagaagaaactataattacttggctgttggagatttgtacttgagtataaatgtacaccagtttttgtatttgtgaactcatctgtgggaggagtaaagaaaatccaaaagcaaaaaaaaaaaaaaaaaa

SEQ ID NO: 36 - DNA, 466 bp, Homo sapiens
ggcacgagtggacagtcactttgcggggctcttcacccacagactcaagcctgccttcttcctggagagtgtggacgcccacttgcagatcgggcccctcaagaagtcctgcatatccgtgctgaagaggaggtgatgccgggcacgggcgctcctgctgccgtctctgctccaggaagctgcctcctctgggccctctccttcgtctgggaaggcaccagcatgagtcccacacacccagccttctcatttctagaggcttccacctttttatacactcagccttccctctcccaggcaggaggacccccagaccctgttcccctgcagacctcacttctgggagacagagctacagctgggacagctccaagctaccctaacccctcctttcccaggtttctagaatagtgtctggcatgtagtagatgctcaataaacacttgttgaatgaaaaaaaaaaaaa

SEQ ID NO: 37 - DNA, 3962 bp, Homo sapiens
  misc_feature (11)..(11): n equals a,t,g, or c
  misc_feature (13)..(13): n equals a,t,g, or c
  misc_feature (3887)..(3887): n equals a,t,g, or c
tttgcatgcangngttaagttgggccccttcgaggaatctttagagcgccccccttttttttttttttgaagagaactccattttattatggaaagttaaaaaacaaacaaaacaaaacaggcaattgataaaggcggcacaatggggaaggagaggtgaggtgtctccttagccacccgacaccatctcaattcagttcaattgtgaaccactaggagaaacagaattaaataactatcaaggggtacagagttaagagttccagccttccctcttggggaaaactaaggcaaagtaatactgagaaaaagtggaggaagccacaccttcaggtcactccaatgaggagactggaggggacagaggagagaattccacgcagacacagcaagtaagcgtggcttgtaaacctgggactttggcaggtggggctgggagctgatggaatttgtaaaccaggctgtggtcaagggaggaggcaggagctgtaaacaaaggggcagtgacctaggaaatgaaggagatgtgcctataaatggagtggggtctgggcctcccagagagacgagtgcttaaatcccgagagtccccacgggatggtggggaggaaggctgtggggagagtgtaccctgccatggggggcaggtgctccatctccaccctccagggagttctgtgccccttctcaggacttggcgctcactcttggatgacctaggatgcaccagcacgtttaaccccacccacaccagggactttggattagggtagaaattgggcaattggctctgcccccagaaacagggtggggaaagcaagttacaagatgttggttgcccttccctgccaggctcattatcagggtctgtctgccctgaatcttccgggctccaggatcttcagttataagaaggagggaggtatatccctatgttggaagatggtcaccgccggcaggactcatccacaatcagggccttggtgcgcagcccgccctggagctctggctgcagcagcagcagctcttcctcatcctcttcgtcgtcgggttgggctgctggagggttgggggcactggggacctcaggctccgggcccagctcctccagtaccgaactctcggaggggtattggtacgtggtctccagggctgtctcgctgaaggagatcttaagctgtttgtggtgtctttcgggggaccccttggcaaggcagctgcggctgagacggaggtagccccccagaaccaagatctcctcggcagttgggtaccgcttcttcccagcccccgggactgcagcatcaactgtggctggagaggttggggtggctggggtcgcagggggcacagaccgccgggggttgacggtgaaggtgtgtccactgcggcggggggcccccacccctggccctgccttcaccccatagaacaggcggctcatgaggggatccccaggaggttggggggcagttggggctgggggtgggggagacagaggggctggtggtgggggctggagctccactgcttcctcttcctgctgtctcaggcctccagtcccagcgtcctctggtgggaggggggagggcacagagcagcagttctgcagggctctcagaggcctgccctgagcccccgcctcctccttctcagcctccccttctccagcctccacaccgggagattccagaagcttctctgctgactctggaggttctggtttctgagtttgagcctctatgtccctgggtgtccattctcgagccttcccggagttcagggtccatttccacccttctgttggcttcatgcccctctcgccatcttccacaggcctctgctctgctgcctccactcctgcggaactgttgccttgggcctcccttgtcagggtctcggacagctctgcagtctcttttggagctacccctggaactggccactcttcttttctcccacattcttccgagtagtcttgtctttcttctcctgacctcagcctccactctgttgcctccagttgtaccaaactctgttcctgagactctctggagtcaggtctccatttatgggcctctgtcaggcccaacttctggtaggcagattcccctgggctcagtctactttccacctcttttctcctggggctttgctctcgagactctgctagtctcagactccgctctggagtttctccaggactcagcctccatttccatgcctctgacagtcgggagctcctgtctcccacctctcctgggctttgcctccagtcccgagcctccagaggcctcaggctcaactcttgggctccccctatccccagcctcctctctctggtctccctcggacttagtctctcttctcttgactctcttcccttggggctctgatcccgcatctccccagggctgggtctccgctcccgggcctccagaggcccaggctttctctctgctagcagctcttcactccgttgttgttgctgctgctgctgctgccgctcctgccggatgaatcggttctggtgcactggcccgatggcctccagaaggaccgcagactcatccgggtctggaggtccagcctctacagtccctagcacagggctaggctccccaggggacagcccaagcttggcccggcggcgctccaggagccctcgtttccaggctggcatctgggacaggcgctcccgttctgctttctctcggcctcgaacggacgcctcctcctgccggcgccgggctagcagctgtagcttccagtctgggatggtggccatggtcgtcttgaggtgagggtagggagcactggggacagagaacaggaaggagaggctccagagagtgagacagcccgggggtgagactgagggtgggaggagaggaagtggagggggagaggtgggacacaaagcagggcagaggggctaaggatgaggacagagggaaagacggaaggcagagaactggggaaatggaaaaagtgaagagaagttgtgagcccaagttgggggtggtgggggtgatgtgagaggaagagtccggattggaggcaatgagggcaggagccagatgtggcagcacagggttaatgcgtattaaagaccgtctctaggatgtgagaaagagagagaagggcgaaaaggaaagttggcgtgagggagaagagagaaatgtggcaggggtgaggggaacctgggtgcaggccaggctgcctcagcgataccccagggaggctagtgtgggaaggaaggaccaggaatccctgaaaggaccaggaggcaacgggacctgagggggtgttggggaggcaaggaggggcggagagcgaacaggtctagaggagaagggaaaccagggaagaggggaaaggagggcggcggcagcagccgggcgcgtctcagcgcgggccccaaaggtcccggctccgcttccagcaccgctcgggccacgcctctccccagcccccacccctctgccccgcactccgcccccgaggcgggtcgggggaaatacccacccccgagactttcggaacccgggcgtcagggctgccagcgcgttcccagaaccctggcgtccacccccaccctgtcctgtcaccaccgcctgcctcccccaccgactgccccacgcgaccccagagtgccaagggccggctccatgtctcttctccccggcgcctgcaagtcctgcgccccgtccccgctctcatgaagccgtgacagagccggccgtctccaccccgctgtagccgcacagactgacaatctcggcacaaagaggagacagccaaggtccgggccagggacgggagcaaggacaggggcgaggagacacccactccccaagtctgagcccctcagtcaactcacaggnccgcgggaacccccgggggagggggtgcggaggagccgggcgtccagagagaggaagaggaggagagagggaccc

SEQ ID NO: 38 - DNA, 1369 bp, Homo sapiens
ggcacgagctccaatatgctcttttgacttaacgtcaagctttgggttgatgtgggtagggtagtgtcaaactgctttgagaggaatgggaccagttctgctgcctaagaaggtctgtctggatgtttataggcagcacctctgaagtggcctaaattcaccctgatctgatagttttcctgcttagaaagtgtgccttggccagatcagtatcccacatgggagtgttccctaggttgtagctgtgattgtttccagatgaccagattgtttttctgaaaatgagcatatttttagtcatgtcgattagctgttcttctacatcacattgttactctttctgatgatgattctagggttaacattggaaccatctcaaaataattacaaagttttagatgggtttacaatgtcttctaaacaatgtaatctaaaaataattgagtcagatgctaacgagatactgcaggcataactgctgtttttctgacaactgattgtgaaaccttaaaacctgcatacctcttcttacagtgaggagtatgcaaaatctggaaagatattctattttttttatataggtagataggatcgccatttatttcctatttagatatactgacattcatccatatgaaaatatgcaggtcattagcttactataatttacttttgacttaatggggcataaataaaactttcatagtacacatgaggtggatatttgatacacagaacatttgcggtgggctttctgtgggttagatgtaaagcccacatattttaatattcactattttaaatgagcaatgcatgaggggaatgcagtgtcagtacctggcctatttttaaactagtgtaatcaccctagtcataccattcagtatgtttgctttttaaaataagtaaccacaattaagttgttgtagcccttgcacttcaagagatctagtctttactttcagttgtctgttaggtccattctgtttactagacggatgttaataaaaactatgcgagcctgaatgaattctcagccaaatttagtcttgtctctcatcttgattggattaattccaaattctaaaatgattcagtccacaatagctctaggggatgaagaatttgccttactttgcccagttcctaagactgtgagttgtcaaatccctagactgtaagctcttcaaggagcaagaggcgcattttctccgtgtcatgtaatttttctaaggtgtttggcagcactctgtaccctgtggagtactcagtaccttttgtttgatgttgctgacaagacctgaaaaaaaatcccttaaaaaaaaaacccattaaagtgtagcaaaaccgaaaaaaaaaaaaaaaaaaa

SEQ ID NO: 39 - DNA, 677 bp, Homo sapiens
  misc_feature (4)..(4): n equals a,t,g, or c
  misc_feature (24)..(24): n equals a,t,g, or c
  misc_feature (60)..(60): n equals a,t,g, or c
  misc_feature (83)..(83): n equals a,t,g, or c
  misc_feature (114)..(114): n equals a,t,g, or c
tatngcccaatgattaaccccaanctcgaaatttaacccttaactaaaagggaacaaaangcttggagttcaaccgcggttgncggcccgctctagaactaktgratcccccgngctgcagaattcggcacgagctagttcaggggcggggactcccaggcctcagtgtggcagggtgtgttgaaggcctgtggtgccatctccccatggttcatgtggagccacgaacatcctttccctgcagtccatttgtctgtgtggcaggctggctggctgggggcatctgcctgtctatgtgctgttggtgtgcctatgcctgggggaggtcagtaggggccccctccccacatggccctcgctctgtctatgcaggggccccaaagcccgcactttgtccgtgtgtcttagccctgtggttttgtctgtgtgtgtgtgtgtgtgtgtgtgtgtgtgtgtgtgttcttggtgctgtggcctgtgtgtctctgtgcctatgtggctgtgctatggtttctatgagtctgctccatccatgtgtctgtttgggggtctatctctccatccctctgttggtgctgtgcccttggctatccctgaaagagggaggactccgctgcagctccaccaataaacttgtgtctcactgcaaaaaaaaaaaaaaaaaaactggggggggg

SEQ ID NO: 40 - DNA, 1525 bp, Homo sapiens
tcgacccacgcgtccgggaggatccccagccgggtcccaagcctgtgcctgagcctgagcctgagcctgagcccgagccgggagccggtcgcgggggctccgggctgtgggaccgctgggcccccagcgatggcgaccctgtggggaggccttcttcggcttggctccttgctcagcctgtcgtgcctggcgctttccgtgctgctgctggcgcagctgtcagacgccgccaagaatttcgaggatgtcagatgtaaatgtatctgccctccctataaagaaaattctgggcatatttataataagaacatatctcagaaagattgtgattgccttcatgttgtggagcccatgcctgtgcgggggcctgatgtagaagcatactgtctacgctgtgaatgcaaatatgaagaaagaagctctgtcacaatcaaggttaccattataatttatctctccattttgggccttctacttctgtacatggtatatcttactctggttgagcccatactgaagaggcgcctctttggacatgcacagttgatacagagtgatgatgatattggggatcaccagccttttgcaaatgcacacgatgtgctagcccgctcccgcagtcgagccaacgtgctgaacaaggtagaatatgcacagcagcgctggaagcttcaagtccaagagcagcgaaagtctgtctttgaccggcatgttgtcctcagctaattgggaattgaattcaaggtgactagaaagaaacaggcagacaactggaaagaactgactgggttttgctgggtttcattttaataccttgttgatttcaccaactgttgttttttgtttgtttgttttggtgggagaggggagggatgcctgggaagtggttaacaacttttttcaagtcactttactaaacaaacttttgtaaatagaccttaccttctattttcgagtttcatttatattttgcagtgtagccagcctcatcaaagagctgacttactcatttgacttttgcactgactgtattatctgggtatctgctgtgtctgcacttcatggtaaacgggatctaaaatgcctggtggcttttcacaaaaagcagattttcttcatgtactgtgatgtctgatgcaatgcatcctagaacaaactggccatttgctagtttactctaaagactaaacatagtcttggtgtgtgtggtcttactcatcttctagtacctttaaggacaaatcctaaggacttggacacttgcaataaagaaattttattttaaacccaagcctccctggattgataatatatacacatttgtcagcatttccggtcgtggtgagaggcagctgtttgagctccaatgtgtgcagctttgaactagggctggggttgtgggtgcctcttctgaaaggtctaaccattattggataactggcttttttcttcctctttggaatgtaacaataaaaataatttttgaaacatcaaaaaaaaaaaaaaaaaaaaaaaaaaaaaaaaa

SEQ ID NO: 41 - DNA, 2309 bp, Homo sapiens
ggtaagagagaaggtgtgaagtcacctgtctgttctagtcattccaatggacattgtactggcccaggaggaaagaaccagatgtggttgtccagtcatccaaagcaagtctctagcacaaagcccgttccactgaactgcccttctccagtgcctcctctgtatttggatgatgatggactcccctttcccacggatgtgatccagcataggttacggcaaatcgaagcagggtacaaacaagaggtggagcagctacgtcgacaggtgcgtgagcttcagatgaggctggacatccgtcactgctgtgcccctccagcagagccccccatggactatgaggatgattttacatgtttgaaggagtcagatggcagtgatactgaggattttggctctgatcacagtgaagactgcctttcagaagcaagctgggaacctgttgataagaaagagactgaggtgactcgctgggttccagaccatatggcatcacactgctataactgtgactgtgaattctggttggccaaacgaagacaccattgcagaaattgtgggaatgtattttgtgctggatgctgccacctgaagctgcccattcctgatcagcaactctatgacccagttctcgtctgtaactcatgttacgaacacattcaagtctctcgtgccagggaactcatgagccaacagctgaagaaacccattgctacagcttccagttgaatgccggggagaaacctgtccaattttagcaggtttgaagggaggatcttcttcagttgtagtttggaaggttccttggtgtggctcatgaaatcacagagctcagagataccatcttgagaaatcctccttggtatcatgaaactggagcagaggaattgcaatttagcaggaggtcctctactggtgataccctcaccttggggtaatggtcctaacccagacccagggtctggaagcttaatgttgagttggtgactccagcctctttctcctggaggtcacaagatgatgattgcgtagatgttgcctggtgcaaagtgccccaaacagcaatagaaaggcatatgtataaccaaactccaagtgataaccagacccatctctcctccaccttgacaaaagcagattatagtatacaaggtaggaattcctgtcctatttgagatgaactatatcctgtacctctgtgctctgtgtctgcatgaaggctcagcctttagaggcactccttctagttgcattagtactgtctttctgtggagtttggtttgaagactggctcagcaagtggaggtttcaatgtatttttcagttggctcatcagccagcattggtgaatattcagtttaggggaacagttctagggagtgagacatttttgggagcagaggaaaactctgctgatgttcggtcctggcaaacattgagttattttgagctgtgaaggcagtcgtctctgttacacagtggcagctcttgagttatgcactgtgaagaatgagaagggaaaagcaaaaattatccttgtgaaatatctgctgattgtgccctactctttgcacctgacttttcctagttgtcctggtgctaacacaggagctacaccttgatcctctcctggcatgaaaataaaacaaaggttttcgttgttgttgttccattgcccatttcccccatgttgtctttcccttggctgatgcctcctctgggtcacattgcttcttatcctgaacacttgacaccttgagggtagaatttagcgtttggtttttacctcctagcatatgctgtttggtatgtgagggtttcagtacaaatgctgctgtctatttctgtgcacttaacaatggaacccaaacagaagagaataaagccttgataccaaaattgggaaagaacatgtgtccatttggaccaaacgttgttggtttttaaaaaattttattttgtttttttgtttttgtttttgttttttttcatcttaatatgtaccagtggcacttaaccaaaagatacagtgatatagccatgtatctgtctacttagcgtggctgttttgagggactgtcccatcagtgaacaaactgcatggccttggagagagactctgggctcttggctcagatgtgttcatcaaatactcctttcagagctgttgtgggtgtaagtgacatgatgtggccaaaaatccaaactgtgcagttgcgttgtgacaaacatgcaatgtgctgtaaaaattcaatacagtttaaataaaatctctatattagtgcaaaaaaaaaaaaaaaaaactcgag

SEQ ID NO: 42 - DNA, 1071 bp, Homo sapiens
ggcacgagccccgcgcatggggaggtaggctcggaccggcccgcggagctgctgcagtccttcgcgccctcctcgccctccccaccgacatcatgctccagttcctgcttggatttacactgggcaacgtggttggaatgtatctggctcagaactatgatataccaaacctggctaaaaaacttgaagaaattaaaaaggacttggatgccaagaagaaaccccctagtgcatgagactgcctccagcactgccttcaggatatactgattctactgctcttgagggcctcgtttactatctgaaccaaaagcttttgttttcgtctccagcctcagcacttctcttctttgctagaccctgtgttttttgctttaaagcaagcaaaatggggccccaatttgagaactacccgacatttccaacatactcacctcttcccataatccctttccaactgcatgggaggttctaagactggaattatggtgctagattagtaaacatgacttttaatgagtagtgtcttctttatcgtttgcgatttttactaccttttttcaaaagaaaaattgatgagttttgtatagctggtcagatacaaataatagtgacttcacagtttagtaattataatgggtacttgttaaacatttggtactaaattatgttgctgcaaagtaattaaaattagtatctagagctagtttctggtgaattattcatttattttgtactgttgttaggcagctctgtagttgctaatttaaccaataagtcaatttgctattcatgaagaaacgattctgagaatcctgtcaggaattggggaatgaaaaaatacacaaaataatggtctttgtcccagtagagttcatagtctatttagtgtgcatgtttttccttaatgatgtatttgatctgacttttttccttctcaaaagaatcatacttgggattacaggtacatttgatgttatatgatggataagtgaaaagtttttaaaggagattttataccttttcacattaaaaaaggtatttatattattaaaaaaaaaaaaaaaaaaa

SEQ ID NO: 43 - DNA, 741 bp, Homo sapiens
aggtcccgaggagccaggaggagcaccccgcaggctgagggcaggtgggaagcaaacccggacgcatcgcagcagcagcagcagcagcagaagcagcagcagcagcctccgcagtccctccagagacatggatccccagacagcaccttcccgggcgctcctgctcctgctcttcttgcatctggctttcctgggaggtcgttcccacccgctgggcagccccggttcagcctcggacttggaaacgtccgggttacaggagcagcgcaaccatttgcagggcaaactgtcggagctgcaggtggagcagacatccctggagcccctccaggagagcccccgtcccacaggtgtctggaagtcccgggaggtagccaccgagggcatccgtgggcaccgcaaaatggtcctctacaccctgcgggcaccacgaagccccaagatggtgcaagggtctggctgctttgggaggaagatggaccggatcagctcctccagtggcctgggctgcaaagtgctgaggcggcattaagaggaagtcctggctgcagacacctgcttctgattccacaaggggctttttcctcaaccctgtggccgcctttgaagtgactcattttttttaatgtatttatgtatttatttgattgttttatataagatggtttcttacctttgagcacaaaatttccacggtgaaataaagtcaacattataagctttaaaaaaaaaaaaaaaaaa

SEQ ID NO: 44 - DNA, 352 bp, Homo sapiens
  misc_feature (316)..(316): n equals a,t,g, or c
  misc_feature (328)..(328): n equals a,t,g, or c
  misc_feature (341)..(341): n equals a,t,g, or c
  misc_feature (350)..(350): n equals a,t,g, or c
ctcggaagagtccaagcgtgagggaagagggctgtggattcagatactgtttttctcccgaaataggaaattggcttatttttttctcctcggcagcatcttaatttaaaatatgacacttgacctacggccctgcacggagcggttaagagggtcaccaaccagtttcttaaacaattaggtctacatcctaactggcaattcgttgatgtatatggaatggatcctgaactccttagcatggtaccaagamcagtctgtgcagtcttacttctctttcctattacagaaaakttgaaktwtcmgaacagaagangaagaaaaatwnaatctcaggacanattttctcntc

SEQ ID NO: 45 - DNA, 472 bp, Homo sapiens
  misc_feature (4)..(4): n equals a,t,g, or c
  misc_feature (136)..(136): n equals a,t,g, or c
  misc_feature (157)..(157): n equals a,t,g, or c
  misc_feature (214)..(214): n equals a,t,g, or c
gctnacggggctgctggagcgcatgcagacctatcaggacgcggagtcgaggcaggtgctggctgcctggatgaaagagcggcaggagctgaggtgcatcaccaaggccctgttcaatgcgcagttcggcagcatnttccgcaccttccacaacccnacctacttctcaaggcgcctcgtgcgcttctctgacctctacatggcctccctcagntgcctgctcaactaccgcgtggacttcaccttctacccacgccgtacgccgctgcagcacgaggcacccctctggatggaccagctctgcaccggctgcatgaagacccccttccttggtgacatggcccacatccgctgagggcacctttattgtctgggacaggccctcagcycctcctgccccatccacccagacaagcaataaaagtggtctcctcccwraaaaaaaaaaaaaaaaaaaaaaaaaaactcgagg

SEQ ID NO: 46 - DNA, 882 bp, Homo sapiens
  misc_feature (2)..(2): n equals a,t,g, or c
  misc_feature (22)..(22): n equals a,t,g, or c
  misc_feature (26)..(26): n equals a,t,g, or c
gnttccaccccggtggcggccngctnttggaacttgggggatcccccggggctgcaggaatttcggcacgagactttccacagtatacttagaatcaatattttaccmcctcagctggaatgtaggaggaatcctaccaccattttaggtcactttawtcttctccctttacatcctacttgtcttttattacttctgcatacattgaaaacctcattaaacaatgaggtttttgctcttagccaaaaaatatattttaataaacccgccttggcctcccaaggtgctgggattacaggcgtgagccaccacgcccagccttttttttttttatttaataatcagtttttcatcatctgagaatgtctctattttactttcattcctaaaggatgttttgctggatatagaaaattagttattttcaggccaggtgcagtggctcacacctgtaattccagcactttgggaggctgaggcaggcagatcagttgagctcaggagttcaagaccagcctgggcaacatggcaaaaccccgtcactacaaaaaatacaaaaattagccaggtgtggtggcacatgcctgtagtcccagctacttgaggggctaaggcacgaggatcgcttgagcccaggaggataaggctgcagtgagccatgttcatgccactgcactccagcctgggcaacaaagtaagaacctgtctcaaaaaataaataagaaaattagttattttctttcagtgcttgaaaatgttgttcacttccttttcgcctccatggtgtctgatgaaaaatctgcagtcagttgaatcattgttcatctatataaacagtgcctatttctctggttaaaaaaaaaaaaaaaaaaaaaactcgag

SEQ ID NO: 47 - DNA, 1536 bp, Homo sapiens
ggcacgagccaaccccggaaaatcctctgtctccagtctctggaggtgaagcagggacaataagctaaggtagtatcttggccatcccaggaaacttgtggcattaggacgatgaaggccatgcttcagtgttttcgtttctatttcatgagactttttgtcttcctgcttacaagtgggaagatgattgaagtgactctactatgcagggctgttggtaccaacctgagccctataggtggcagtccctggagaagtggtcacagaagatggagctctgatcccctgcttacctcttcacaacacttgtgtgcaaagatagttttagatttggtttagaagctatcctccagaacaggctcccatacttagaatgtttctagttaaggtaataaattaggcaacccaagtgtgactccactcaagtgtccttttctgtaggcaggaagggcccacaacatggcttaaaatgtagtccatggttctggcccacagtacagtgtgtatctataccaggtcacctgtgttcaatctgggagccttcctggccagtctgagtggcagccagaagggagctcatagtgtctaggagtctcaggcaaggtaggtcagggtactgtgggcaggggggatgtgtgtgataggagagggtaccctaaaccccataccttccctccctgacctgaaaagctgatctcaacagggattcacacagaattaggctgtgtttttgcattagctggtaggtgactttctcaaaattcttaaattcagaaagtatttagtaaacttgaggaaggtatgaaatctggaggaggcatccaggacccaggggtttgatagctttacaggtaggatcataccacaccaaaagagcagtggacaataagactatatgagctatatgaagcttttaggaatcatttaggacagacagagccctaaacaacccattcatgacttaagttgttggctcagtgtatgctggggacaaagaaaaactaacaagccgacctgcctttatgataaattctagtgtgcttacaagggatgacttcctgaggtgtgatctgtccaccttgaagaactccacaactgaagaaggggagctgtgagaacgtggattgttctacaacttgcacagggtaacagaggaagtggctgaggcctagagtcacgttttccagttcccttcgcaaactatatttcttggaacgcgaaaggaagctttacctatttcatagaagacctggaatccataacctcagaaggcaatattattgatagaaaatgtggaaggatcaggaagttcttagattcttggatgacagatgcatgttgatgccctatggagatgtccttgtgttttgaggtcactgaggtaggaagacctgtctactcttggtttcaccactagaacagtcttgggctggatgggttatagagctgagcggctgtgatggttctgtttttacattaacaaaaacaattaaaaacaccaaaaacaaaaaaaaaaaaaaaaaaaaaaaaaaaaaa

SEQ ID NO: 48 - DNA, 1260 bp, Homo sapiens
  misc_feature (1249)..(1249): n equals a,t,g, or c
  misc_feature (1251)..(1251): n equals a,t,g, or c
  misc_feature (1257)..(1257): n equals a,t,g, or c
gctttgcagataaatatggcacactagccccacgttttctgagacattcctcaattgcttagacatattctgagcctacagcagaggaacctccagtctcagcaccatgaatcaaactgccattctgatttgctgccttatctttctgactctaagtggcattcaaggagtacctctctctagaactgtacgctgtacctgcatcagcattagtaatcaacctgttaatccaaggtctttagaaaaacttgaaattattcctgcaagccaattttgtccacgtgttgagatcattgctacaatgaaaaagaagggtgagaagagatgtctgaatccagaatcgaaggccatcaagaatttactgaaagcagttagcaaggaaaggtctaaaagatctccttaaaaccagaggggagcaaaatcgatgcagtgcttccaaggatggaccacacagaggctgcctctcccatcacttccctacatggagtatatgtcaagccataattgttcttagtttgcagttacactaaaaggtgaccaatgatggtcaccaaatcagctgctactactcctgtaggaaggttaatgttcatcatcctaagctattcagtaataactctaccctggcactataatgtaagctctactgaggtgctatgttcttagtggatgttctgaccctgcttcaaatatttccctcacctttcccatcttccaagggtactaaggaatctttctgctttggggtttatcagaattctcagaatctcaaataactaaaaggtatgcaatcaaatctgctttttaaagaatgctctttacttcatggacttccactgccatcctcccaaggggcccaaattctttcagtggctacctacatacaattccaaacacatacaggaaggtagaaatatctgaaaatgtatgtgtaagtattcttatttaatgaaagactgtacaaagtagaagtcttagatgtatatatttcctatattgttttcagtgtacatggaataacatgtaattaagtactatgtatcaatgagtaacaggaaaattttaaaaatacagatagatatatgctctgcatgttacataagataaatgtgctgaatggttttcaaaataaaaatgaggtactctcctggaaatattaagaaagactatctaaatgttgaaagaycaaaaggttaataaagtaattataactaaaaaaaaaaaaaaaaaaaatcgagggggggcccgnanataatngcc

SEQ ID NO: 49 - DNA, 1320 bp, Homo sapiens
  misc_feature (1318)..(1318): n equals a,t,g, or c
ccagctcgaaattaaccctcactaaagggaacaaaagctggagctccaccgcggtggcggccgctctagaactagtggatcccccgggctgcaggaattcggcacgagccacgattcagtcccctggactgtagataaagaccctttcttgccaggtgctgagacaaccacactatgagaggcactccaggagacgctgatggtggaggaagggccgtctatcaatcaatgtgtaaacctattactgggactattaatgatttgaatcagcaagtgtggacccttcagggtcagaaccttgtggcagttccacgaagtgacagtgtgaccccagtcactgttgctgttatcacatgcaagtatccagaggctcttgagcaaggcagaggggatcccatttatttgggaatccagaatccagaaatgtgtttgtattgtgagaaggttggagaacagcccacattgcagctaaaagagcagaagatcatggatctgtatggccaacccgagcccgtgaaacccttccttttctaccgtgccaagactggtaggacctccacccttgagtctgtggccttcccggactggttcattgcctcctccaagagagaccagcccatcattctgacttcagaacttgggaagtcatacaacactgcctttgaattaaatataaatgactgaactcagcctagaggtggcagcttggtctttgtcttaaagtttctggttcccaatgtgttttcgtctacattttcttagtgtcattttcacgctggtgctgagacaggrgcaaggctgctgttatcatctcattttataatgaagaagaagcaattacttcatagcaactgaagaacaggatgtggcctcagaagcaggagagctgggtggtataaggctgtcctctcaagctggtgctgtgtaggccacaaggcatctgcatgagtgactttaagactcaaagaccaaacactgagctttcttctaggggtgggtatgaagatgcttcagagctcatgcgcgttacccacgatggcatgactagcacagagctgatctctgtttctgttttgctttattccctcttgggatgatatcatccagtctttatatgttgccaatatacctcattgtgtgtaatagaaccttcttagcattaagaccttgtaaacaaaaataattcttgtgttaagttaaatcatttttgtcctaattgtaatgtgtaatcttaaagttaaataaactttgtgtatttatataataawaaaaaaaaaaaaaaactcgagggggggcccgtacccaattcgccccctantg

SEQ ID NO: 50 - DNA, 376 bp, Homo sapiens
ggcacgagctggactctgccccgggggatgtggccggcactgggcagccccttggactgaggcagttttggtggatgggggacctccactggtgacagagaaagacaccagggtttgggggatgcctgggactttcctccggccttttgtatttttatttttgttcatctgctgctgtttacattctggggggttagggggagtccccctccctccctttcccccccaagcacagaggggagaggggccagggaagtggatgtctcctcccctcccaccccaccctgttgtagcccctcctaccccctccccatccaggggctgtgtattattgtgagcgaataaacagagagacgctaaaaaaaaaaaaaaaaaa

SEQ ID NO: 51 - DNA, 1068 bp, Homo sapiens
  misc_feature (943)..(943): n equals a,t,g, or c
  misc_feature (1055)..(1055): n equals a,t,g, or c
gtgggcgagttaggtgacgctgcggggcgggcggacagactgcgggacggacggtggacgctgggacgcgtttgtagctccggccccgccgttccgacccccgccgccgtcgccgccatgacggggctagcactgctctactccggggtcttcgtggccttctgggcctgcgcgctggccgtgggagtctgctacaccatttttgatttgggcttccgctttgatgtggcatggttcctgacggagacttcgcccttcatgtggtccaacctgggcattggcctagctatctccctgtctgtggttggggcagcctggggcatctatattaccggctcctccatcattggtggaggagtgaaggcccccaggatcaagaccaagaacctggtcagcatcatcttctgtgaggctgtggccatctacggcatcatcatggcaattgtcattagcaacatggctgagcctttcagtgccacagaccccaaggccatcggccatcggaactaccatgcaggctactccatgtttggggctggcctcaccgtaggcctgtctaacctcttctgtggagtctgcgtgggcatcgtgggcagtggggctgccctggccgatgctcagaaccccagcctctttgtaaagattctcatcgtggagatctttggcagcgccattggcctctttggggtcatcgtcgcaattcttcagacctccagagtgaagatgggtgactagatgatatgtgtgggtggggccgtgcctcacttttatttattgctggttttcctgggacagctggagctgtgtcccttagcctttcagaggcttggtgttcagggccctccctgcactcccctcttgctgcgtgttgatttggaggcactgcagtccaggccgagtcctcagtgcggggagcaggctgctgctgctgactctgtgcagntgcgcacctgtgtcccccacctccaccctcaacccatcttcctagtgtttgtgaaataaacttggtatttgtctgggtcaaaaaaaaaaaaaaaaaaaactcgagggggggnccggtacccaatt

SEQ ID NO: 52 - DNA, 1820 bp, Homo sapiens
  misc_feature (703)..(703): n equals a,t,g, or c
  misc_feature (1806)..(1806): n equals a,t,g, or c
tcgtacggcggccgcggcggcagggcggggccggagcagcgggcggcggcggaggcggcgcccgggagcgctcttcgcttccctcggggtcttgctcggacctcggccaccgcctgggatccccaggactcgtgcgtgcagcatgggcggcgtcggggagccgggaccgcgggagggacccgcgcagccgggggcaccgctgcccaccttctgctgggagcagatccgcgcgcacgaccagcccggcgacaagtggctggtcatcgagcgccgcgtctacgacatcagccgctgggcacagcggcacccagggggcagccgcctcatcggccaccacggcgctgaggacgccacggatgccttccgtgccttccatcaagatctcaattttgtgcgcaagttcctacagcccctgttgattggagagctggctccggaagaacccagccaggatggacccctgaatgcgcagctggtcgaggacttccgagccctgcaccaggcagccgaggacatgaagctgtttgatgccagtcccaccttctttgctttcctactgggccacatcctggccatggaggtgctggcctggctccttatctacctcctgggtcctggctgggtgcccagtgccctggccgccttcatcctggccatctctcaggctcagtcctggtgtctgcagcatgacctgggccatgcntccatcttcaagaagtcctggtggaaccacgtggcccagaagttcgtgatggggcagctaaagggcttctccgcccactggtggaacttccgccacttccagcaccacgccaagcccaacatcttccacaaagacccagacgtgacggtggcgcccgtcttcctcctgggggagtcatccgtcgagtatggcaagaagaaacgcagatacctaccctacaaccagcagcacctgtacttcttcctgatcggcccgccgctgctcaccctggtgaactttgaagtggaaaatctggcgtacatgctggtgtgcatgcagtgggcggatttgctctgggccgccagcttctatgcccgcttcttcttatcctacctccccttctacggcgtccctggggtgctgctcttctttgttgctgtcagggtcctggaaagccactggttcgtgtggatcacacagatgaaccacatccccaaggagatcggccacgagaagcaccgggactgggtcagctctcagctggcagccacctgcaacgtggagccctcacttttcaccaactggttcagcgggcacctcaacttccagatcgagcaccacctcttccccaggatgccgagacacaactacagccgggtggccccgctggtcaagtcgctgtgtgccaagcacggcctcagctacgaagtgaagcccttcctcaccgcgctggtggacatcgtcaggtccctgaagaagtctggtgacatctggctggacgcctacctccatcagtgaaggcaacacccaggcgggcagagaagggctcagggcaccagcaaccaagccagcccccggcgggatcgatacccccacccctccactggccagcctgggggtgccctgcctgccctcctggtactgttgtcttcccctcggccccctcacatgtgtattcagcagccctatggccttggctctgggcctgatgggacaggggtagagggaaggtgagcatagcacattttcctagagcgagaattgggggaaagctgttatttttatattaaaatacattcagatgtaaaaaaaaaaaaaaaaaaaactcgagggggggccccggnaaccaattcgccct

SEQ ID NO: 53 - DNA, 612 bp, Homo sapiens
ttaactgtcaaataattataaccttttaaagcataggactatagtcagcatgctagactgagaggtaaacactgatgcaattagaacaggtactgatgctgtcagtgtttaacactatgtttagctgtgtttatgctataaaagtgcaatattagacactagctagtactgctgcctcatgtaactccaaagaaaacaggatttcattaagtgcattgaatgtggcatatttctctaagttactcatattgtcctttgcttgaatgcaatgccgtgcagatttatgtggctgctatttttattttctgtgcattactttaacaccttaaagggagaagcaaacatttccttcttcagctgactggcaatggccctttaactgcaataggaagaaaaaaaaaaaggtttgtgtgaaaattggtgataactggcacttaagatcgaaaagaaatttctgtatacttgatgccttaagatgcccaaagctgcccaaagctctgaaagactttaagataggcagtaatgcttactacaatactactgagtttttgtagagttaacatttgataataaaacttgcctgtttaatctcwwtaaaaaaataaaaaaaaa

SEQ ID NO: 54 - DNA, 2082 bp, Homo sapiens
ccacgcgtccggagagctattcctgtttctgttttttctcagttgccttcagctcaaaatcatccttattccaatgtggcatttttgaggtgacatattctggttcccttaagtataatcattgtagagcaaatgcaggcacagtacctgtgatgtaaatatttagtgaatgttagtcctgtgtgaaatgctcctctccccgcccttctcattccttcccaccacttcacgcttagccacagcgcagcattcttacttttctcctcctgctcagcttggagaattcagatgtcgatgagacaaaatggatcctactctcctggagattacagtctagcaggggaaatgtatattaagcaaatatcacacaaatagttgttaagttgtgataactgctgtgaaaggaacgtatagagtgctttgaaaatgccctggcatggtggctcacgcctcagcctcccagtgtgctgggattgcaggagtgagccactttacccggccttagctggaaaacttgaagagttttgacaaatgtatacagtcatataactatcaccacaattgagatataaattgtttccttccttttcaaaagttccctagtatccctttgcagccggtccatttccccacccccagcctctggcaacctgattcctgtccatataattttgtattttgtagataccattctattcttatatggttggcttctctgctctggtataaaactttatttatttaaaatttctacatcttagtttggatacatagctctagactgtcatgatatttttaatcccaattctgtttttattttcttccctatctcataacatgcataaatttgatatgcattttagctgatcctccatgttattggggataaaaggccaaagataagagccaaggaggaaaaacccacaaaaattccttatttgacactagacaacattatcgaaagtgacatttattcattaatcattctcttttgatattgtgctttaatccactaaactttattattgttcagttcatacttatataggcatatgttggaggtattccaggttcagttccagaccaccagaataaagtgaaaatcactatatagcagccatcgacatcaaggcaagaccctgctggtgggtcttggaaaaagatgacaactcactgaagtgtctgatggttgttagcatgttttagcaataaagtatttttgattaaggtatgtacattgtttactagacataatgttattacacacttaatagactacagtatagtgtaaacataacatttttttttgagatggagtcttgctctgtcgcctaggctggagtgcagtggcacgatcttggctcaatgcaacctccacctcccaggttctagcacaggtgggcaccatcacaccctactaaaatacaaaaactagccgggcctggtggcacacacctgtagtttcagctacttgggagactgaggcaggagaatcacttgaacctgggaaatggaggctgcagtgataccgagatcgcgcctctgcactccatcttgggcgccagagcaagtcttcatctccaaaaaatatataaataaataaagtatgtgaaacttttaactgtatgtctggtatttttaaaaatttttatttttaaatttttatatatttacttatttttgagtcttaactgggttatgagactggctaatttttgtatttttggtagaaacagggtttcaccatgttgtccaggctggtctcaaactcctgagctcaagcgatccatcgccttatgcctgtaatcccagcattttgagagtctgaggcaggcggatcacctgaggtcaggagtttgagaccatcctggccaacatggtgaatctctactaaatatacaaaaacttagccaggcatggtgtcatgcgcctgtagtcctaggtacttgggaggctgaggccaggcatgagaaccacttgaacccaggagtcagcggttgcagtgagccaagatggcaccactgcatgccagcctgggtgacagagtgagactttgcctcaaagcaaaaaaaaaaaaaaaaa

SEQ ID NO: 55 - DNA, 955 bp, Homo sapiens
  misc_feature (716)..(716): n equals a,t,g, or c
  misc_feature (942)..(942): n equals a,t,g, or c
  misc_feature (953)..(953): n equals a,t,g, or c
tacgccagctcgaaattaaccctcactaaagggaacaaaagctggagctccaccgcggtggcggccgctctagaactagtggatcccccgggctgcaggaattcggcacgagtgcgggggacagcggcggccggaagctggctgagccggcctttggtaacgccacctgcacttccgggggcgtcgagcctggaggtagaatcttcccagtaggcggcgcgggagggaaaagaggattgaggggctaggccgggcggatcccgtcctcccccgatgtgagcagttttccgaaaccccgtcaggcgaaggctgcccagagaggtggagtcggtagcggggccgggaacatgaggcagtctctcctattcctgaccagcgtggttcctttcgtgctggcgccgcgacctccggatgacccgggcttcggcccccaccagagactcggtaaagacccaggggagttggcttaggccggcgcctggagcgctcgtttgagggaagagcaggggagctgggtctatcaggtgtttgggggcggggtattggcgatggtggcgcgtccctaagttttcagtgtagaagggggtgtggctctcggagtttggggaaagaataaaggagatgggcctgtctctgagtgggaaagggctactggacgggctccatgtagtgactgagcgcctgagaggggtttgctccctagctttgtgttcggngagggtgttgggaaagcggtaaggagtagggtggctggatcttgtttggagagggagatgtggtcagggttcttgccttagtagggaacaaatctagtgttgkgtgttcctaccagagccwgaaaggaagggcccaaagctycagaattcttcctggcctcgaaggagggaactagaatttctgctgtaggaggtacttatgcagtaatctcgttggraggcgganactggagttgnag

SEQ ID NO: 56 - DNA, 565 bp, Homo sapiens
  misc_feature (17)..(17): n equals a,t,g, or c
  misc_feature (545)..(545): n equals a,t,g, or c
  misc_feature (559)..(559): n equals a,t,g, or c
gcattagtgaccgtaangtacctgcagtacggtccggaattcccggtcgacatggaatcttctgcgatacaacaattcgtatctacagaaggtaactatgtttccacaatgcaaattttcccgcgagtttctacatcctcgctactggctcacatggtttgggcttggtgtactctggctttgggtacagcttccttatcctgttctctgctttctcggcacgcgtattggcgcaatggcgcgaccattcctgaaacgtcgtgaatctatcgcccgtaaaaacctggaactttgtttcccgcagcattctgcggaagaacgcgagaagatgattgccgaaaactttcgttcactcggcatggcgctggtagaaaccggcatggcatggttctggcccgacagtcgcgtacgtaaatggtttgatgttgaagggttggataaccttaaacgcgcacaaatgcaaaatcgcggcgtaatggttgtcggcgtccattttatgtcgctggaactgggcggccgctctaraagatcctccaagggccaancttaccctgcatcnactcta

SEQ ID NO: 57 - DNA, 1841 bp, Homo sapiens
  misc_feature (5)..(5): n equals a,t,g, or c
  misc_feature (7)..(7): n equals a,t,g, or c
  misc_feature (1539)..(1539): n equals a,t,g, or c
  misc_feature (1647)..(1647): n equals a,t,g, or c
  misc_feature (1811)..(1811): n equals a,t,g, or c
  misc_feature (1822)..(1822): n equals a,t,g, or c
  misc_feature (1830)..(1830): n equals a,t,g, or c
  misc_feature (1839)..(1839): n equals a,t,g, or c
acacngncagtgaccggtccggaattcccgggtcgacccacgcgtccgggggaagggcaggggctggttctggcttgtggggtgggagccagcgtagcaactgaccatggcacccacctcatccacagctggaccgagagcacagggtggcaggaatcttcccccgcctatccttcaaggacaagtccacgtatatcgagtcctcgaccaaagtgtatgatgatatggcattccggtacctgtcctggatcctcttcccgctcctgggctgctatgccgtctacagtcttctgtacctggagcacaagggctggtactcctgggtgctcagcatgctctacggcttcctgctgaccttcggcttcatcaccatgacgccccagctcttcatcaactacaagctcaagtctgtggcccaccttccctggcgcatgctcacctacaaggccctcaacacattcatcgacgacctgttcgcctttgtcatcaagatgcccgttatgtaccggatcggctgcctgcgggacgatgtggttttcttcatctacctctaccaacggtggatctaccgcgtcgaccccacccgagtcaacgagtttggcatgagtggagaagaccccacagctgccgcccccgtggccgaggttcccacagcagcaggggccctcacgcccacacctgcacccaccacgaccaccgccaccagggaggaggcctccacgtccctgcccaccaagcccacccagggggccagctctgccagcgagccccaggaagcccctccaaagccagcagaggacaagaaaaaggattagtcgagactggtcctcacctgctccggctcctggcgaccactacccctgcgtcccggccccctcgcctcccctccctgtcgccctttccctggacagatcaggccggggcggtgggaggcccgcctcaggtcagggcccagcgtgtgacgtaggggccggggcaggccagggtttgtttgtggaggcgctgtctgtccctctgtccctctgtgtttccagccatctcgccctgccagcccagcaccactgggaatcatggtgaagctgatgcagcgttgccgagggggtgggttgggcgggggtggggccgggcccccctacgggatgcccacggccgttcatcatcttgtccctcgtccccctaccacactccccctcctagaccgccgccctttaacacagtctggatttaataaattcatatgggtgtttaacttaaactcaaaaaaaaaaaaaaaaaaaaaaaaaaaaaaaaaaaaaagggcggccgctctagaggatccctcgaggggcccaagcttacgcgtgcatgcgacgtcatagctctctccctatagtgagtcgtattataagctaggcactggccgtcgttttacaacgtcgtgactgggagatctgctagcttgggatctttgtgaaggaaccttacttctgtggtgtgacataattggacaaactacctacagagatttaaagctctaaggtaaatataaaatttttaagngtataatgtgttaaactagctgcatatgcttgctgcttgagagttttgcttactgagtatgatttatgaaaatattatacacaggagctagtgattctaattgtttgngtattttagattcacagtcccaaggctcatttcaggcccctcagtcctcacagtctgttcatgatcataatcagccataccacatttgtagaggttttacttgctttaaaaaacctcccacacctccccctgaacctgaaacataaaatgaatgcaattgttgntgttaacttgnttattgcngcttataangg

SEQ ID NO: 58 - DNA, 3396 bp, Homo sapiens
  misc_feature (1776)..(1776): n equals a,t,g, or c
  misc_feature (2705)..(2705): n equals a,t,g, or c
  misc_feature (2903)..(2903): n equals a,t,g, or c
gcttttaaaggggacatttagcccatttacatttgaagttagtattgttatgtgtgcttttgtcaccgtgatgctagctggttatttttcagacttgtttatgtggttgctttgcagtgtcactggtctgtgtgctgcaggccgggtcaagaatcactgccatcaatattacataaagagcaaccgaaggataagaagtgaagaaggagtggagttttctaatatttgacctatcttggtgctgaacaggaacagagaaatactggtgaataatgaacctgggctttggaatccagagtttgaattcagctaattcactttcctactctgtggatactagattttaagccccagaggtcaggggccacatctgtcttttgcatgtaggtatccctagactgacattaaatgacttaaccttaagacccctgtgtccttatctgagaattaatttatatgacatatgggtaccggtatggcaatatgagctcaacaagtggttactgtttttttgtgtatgtacatatggcatcctcaaatatggtccctacctattttttattcatgccattctcatgtgaattctctattccagccatatggactgatttactaatccttgaaataatcctgtattttcctgccttttgctttacaaatattctttacctctctatatacacctataatctccctggcccacaatgtaaagtgatcattcttaaaaaaaagttcttatagttgcatttatgttggtacttgatcatgggctatttggcacttgatcacgtgctacttgtatcttttttcctattttgagactgaactgccatgtctcttattgtkgttgagctttccttgcttttatatatatagctcctcagctagactgtatttaaacaaacattggacctcaaaggcagagacagtactaaattatatttcatgtagcaaagctcagtaaagatgtgttgatttgggaaaaaatgatttgactgtatatatttttttgactcctttttccttcacaggtttttgatcacaaagtttttgttgaaactcagacatacgtattgctggcccctgactagaagatagtttgagcacatagaatgtttagggaacaagctatgatttgggaattcttaggttttgagaagtaggatatattctccttctttcctgkttgccttcttggggatctcccatttgctcttgaagcctcacctctgttctcctcgcttttccaaaacctgcccaggaagagtgggttctttttccacctgagctcatagaacctttattatgaaacattgctttgtatctctttgtttattcattyatttctccactggcctctgtgttgctaaggacattaattttgtcttggtcatcttagtatcacgggcattaagcatagtactttacctataggaagaactgattaaccactgaatcagtgtaaaagcacgggactcatattcaagttgtagatacaagatatggcaaaaagatggtaaccataaaacggaaaagcatgtcaaaaatgtggtgctttccctgtatgaaaggggagccatggaagatatttgaatgtatgtgtattggggaaggggaggtgagcagtattctgaaaaatgkcttattttggcatttcttgaagaattggtaatttattcacagaaaagagtgcttatgaggaaggacgctctagaacctggcacaaaagcccctttctagggaagattggctttggagaagtggggggtatcttgngtgacagtgatggttcaagaaatgatggtatgatatgtgacggtcatcaggatgtgacatcagtcacctcattgatagcaaggttctattcagccgggttggctaggttaagtccccttcctctcctatacgcacgtgtggtccctatcccagaagctgtgagattggtcaaagcaagtggtctttccaattggaggaggtctacccttggtcaaaggcatgcgagtctgtatgctcccctattggagcactaggagaactacagtatttgagccaaacaaactttcaagaaatttgaaagtggctcagtaagttgtgggacatacagattgccgtttctccatcatacctcccttctgctcttttcgctgctagaaaaattcttcgcaattaggaattccatcaaaccctaaattctttgatgattccctgtaacagtgtctcttgaagtgtgggacagatattcctggktaaatgcaagatttaggtggtactcagacatggtgttaaataattttaaakyacacagtgaaaaatttatttcattttaagttcyctttcaatccttctccttctgacaatgaggatgtataagtggaagaccagagtaacattttctaatctcagtttttagtaaggagaagagccttcaagctaagtgttccaattacaagcatatcatgccataatgktaataacattttcttttaaaaatttgkggcaaattatttcagkttttaawatatgacagtgatgtaaaattttaatgttctggatgtaagatgatatttaggaattgttattaatttttttaggtgtgatgatggcgttatagtcattatcctttacagatacaaattatatatagatggaaagatataatgtctgtgatctgcttaaagtaattcaggaagggtgtgcttgtgtgngtgctgatggaggtggaggtagcggtggtgcttaggggagtacaaaggaaacaagattggtcatgggctgatatttgctgtgctgagtacatgtagattaattatactattgtctctattgygtatatttcaaagttttcataaggaaatgyttgagytaaaataaaatttcaggcctgcctcggcctcctaaagtgntaggattacaggcatgagccactgcgcccggcctattttggwtctctgagaagcaatttttatactgacatgctggataggaaggatttgatctaaaaataacattgttctttcatcatactgggacttccattaagtgaatgacggtttagttataccattgtcctttctaacacctgtcctaatatctcccctcccttcactggcaacagaaattaggtaccagttctactgagatgttttgcaattgtcatcattttactttgtaagcaaaaagcatgtttttctttgtatttcaaactaaggaatgcatgattaccactttggacctccttgtgagcataagattttacactatttgcactgtaataatttatgacatttttatagcttactgttagggcttgtacaaagtagaaggaatgaatctgtagagaaaaaaaaaaaaaaagggcggccgctctagaggatccctcgaggggcccaagcttac

SEQ ID NO: 59 - DNA, 1353 bp, Homo sapiens
ccacgcgtccggggatctggggtcaggcagcccggggggcttggagagacttccagaggaggcgcggactcggtagcgcggcgggcaaggcaggcgccatgaccctgattgaaggggtgggtgatgaggtgaccgtccttttctcggtgcttgcctgccttctggtgctggcccttgcctgggtctcaacgcacaccgctgagggcggggacccactgccccagccgtcagggaccccaacgccatcccagcccagcgcagccatggcagctaccgacagcatgagaggggaggccccaggggcagagacccccagcctgagacacagaggtcaagctgcacagccagagcccagcacggggttcacagcaacaccgccagccccggactccccgcaggagcccctcgtgctacggctgaaattcctcaatgattcagagcaggtggccagggcctggccccacgacaccattggctccttgaaaaggacccagtttcccggccgggaacagcaggtgcgactcatctaccaagggcagctgctaggcgacgacacccagaccctgggcagccttcacctccctcccaactgcgttctccactgccacgtgtccacgagagtcggtcccccaaatcccccctgcccgccggggtccgagccccggcccctccgggctggaaatcggcagcctgctgctgcccctgctgctcctgctgttgctgctgctctggtactgccagatccagtaccggcccttctttcccctgaccgccactctgggcctggccggcttcaccctgctcctcagtctcctggcctttgccatgtaccgcccgtagtgcctccgcgggcgcttggcagcgtcgccggcccctccggaccttgctccccgcgccgcggcgggagctgctgcctgcccaggcccgcctctccggcctgcctcttcccgctgccctggagcccagccctgcgccgcagaggactcccgggactggcggaggccccgccctgcgaccgccggggctcggggccacctcccggggctgctgaccctcagcccgcactgggagtgggctcctcggggtcgggcatctgctgtcgctgcctcggccccgggcagagccgggccgccccgggggcccgtcttagtgttctgccggaggacccagccgcctccaatccctgacagctccttgggctgagttggggacgccaggtcggtgggaggctggtgaaggggagcggggaggggcagaggagttccccggaacccgtgcagattaaagtaactgtgaagttttcaaaaaaaaaaaaaaaaaaaaaaaaaaaaaaaaaaaaaaaaaaaaaaaaaa

SEQ ID NO: 60 - DNA, 1227 bp, Homo sapiens
ccacgcgtccggtcaagacggatgtgccagatatggtggtggaggcctgtggctgcagctagcaagaggacctggggctttggagtgaagagaccaagatgaagtttcccaggcacagggcatctgtgactggaggcatcagattcctgatccacaccccaacccaacaaccacctggcaatatgactcacttgacccctatgggacccaaatgggcactttcttgtctgagactctggcttattccaggttggctgatgtgttgggagatgggtaaagcgtttcttctaaaggggtctacccagaaagcatgatttcctgccctaagtcctgtgagaagatgtcaggggactagggagggagggagggaaggcagagaaaaattacttagcctctcccaagatgagaaagtcctcaagtgaggggaggaggaagcagatagatggtccagcaggcttgaagcagggtaagcaggctggcccagggtaagggctgttgaggtaccttaagggaaggtcaagagggagatgggcaaggcgctgagggaggatgcttaggggacccccagaaacaggagtcaggaaaatgaggcactaagcctaagaagttccctagtttttcccaggggacaggacccactgggagacaagcatttatactttctttcttcttttttatttttttgagatcgagtctcgctctgtcaccaggctggagtgcagtgacacgatcttggctcactgcaacctccgtctcctgggttcaagtgattcttctgcctcagcctcccgagcagctgggattacaggcgcccactaatttttgtattcttagtagaaacgaggtttcaacatgttggccaggatggtctcaatctcttgacctcttgatccacccgacttggcctcccgaagtgatgagattataggcgtgagccaccgcgcctggcttatactttcttaataaaaaggagaaagaaaatcaacaaatgtgagtcataaagaagggttagggtgatggtccagagcaacagttcttcaagtgtactctgtaggcttctgggaggtcccttttcaggggtgtccacaaagtcaaagctattttcataataatactaacatgttatttgccttttgaattctcattatcttaaaattgtattgtggagttttccagaggccgtgtgacatgtgattacatcatctttctgacaaaaaaaaaaaaaaa

SEQ ID NO: 61 - DNA, 658 bp, Homo sapiens
  misc_feature (505)..(505): n equals a,t,g, or c
  misc_feature (632)..(632): n equals a,t,g, or c
gggcggccagcatgcggccccgcagcgccctgccccgcctgctgctgccgctgctgctgctgcccgccgccgggccggcccagttccacggggagaagggcatctccatcccggaccacggcttctgccagcccatctccatcccgctgtrcacggacatcgcctacaaccagaccatcatgcccaaccttctgggccacacgaaccaggaggacgcaggcctagaggtgcaccagttctatccgctggtgaaggtgcagtgctcgcccgaactgcgcttcttcctgtgctccatgtacgcacccgtgtgcaccgtgctggaacaggccatcccgccgtgccgctctatctgtgagcgcgcgcgccagggctgcgaagcctcatgaacaagttcggttttcagtggcccgagcgcctgccctgcgagcacttcccgcgccacggcgccgagcagatctgcgtcggccagaaccactccgaggacgcaggcctagaggtgcaccanttctatccgctggtgaaggtgcagtgctcgcccgaactgcgcttcttcctgtgctccatgtacgcaaccgtgtgcaccgtgctggaacaggccatcccgccgtgccgctctatctgtgcgcatcggngtcttctccgtgctctacacagtgcc

SEQ ID NO: 62 - DNA, 700 bp, Homo sapiens
ccacgcgtccggtccttgcttatgttttgggagacccagccatctaccaaagcctgaaggcacagaatgcgtattctcgtcactgtcctttctatgtcagcattcagagttactggctgtcatttttcatggtgatgattttatttgtagctttcataacctgttgggaagaagttactactttggtacaggctatcaggataacttcctatatgaatgaaactatcttatattttcctttttcatcccactccagttatactgtgagatctaaaaaaatattcttatccaagctcattgtctgttttctcagtacctggttaccatttgtactacttcaggtaatcattgttttacttaaagttcagattccagcatatattgagatgaatattccctggttatactttgtcaatagttttctcattgctacagtgtattggtttaattgtcacaagcttaatttaaaagacattggattacctttggatccatttgtcaactggaagtgctgcttcattccacttacaattcctaatcttgagcaaattgaaaagcctatatcaataatgatttgttaatattattaattaaaagttacagctgtcataagatcataattttatgaacagaaagaactcaggacatattaaaaaataaactgaactaaaacaaaaaaaaaaaaaaaaaaaaaaaaaaa

SEQ ID NO: 63 - DNA, 1276 bp, Homo sapiens
  misc_feature (761)..(761): n equals a,t,g, or c
  misc_feature (794)..(794): n equals a,t,g, or c
gcggtaaccacctccttataaagggcagtagtaagaagctaatcaacaggaccgcgaaacgtgaaagtgcttcatgaactggaaagccaacgcagaccttagttattatattarawgttagctttagattctttctgtggaaacaaagatcctctctttttctaactgctctcctggacacctggtcatttgttgtggatgaacattagtacattacaggcactactcttcatctttgcacttaacacatcagcagccacaaaaggcattctgatgagagcttaaagattcaacaacaaatctcttgctgacagacccttctaagtttacaacccctgaaactgttcttctataaygacagaaaaaaaggctacagggagttctaaaaatgggattagaagtacctgcaatttttcacaagcttgtgacccatcaaaccttctggttcctaccaggatctgcactttcaaatcatgactcattaagttctcaatagrgataaagagctaagatmcaacaagtctaatttaaaraatacatgtattagaactttggaaatgtgtgtgtcagacaaccagcttagattgactaaacgcagccagtctcttttcctttaaatcagaattaaaatgtcatacacagkaacgcaggcttcatagaaactttatggwtctatggtttcttgggttaggggtttcttgaaataggcaaaacctcttcctggctccataatcccattttattggttgtttaactttagntgtggtacctttacatgcgttacttcatttaancccccaaacagtgctatgaaataggcactatttttaccttcattatataaatggggaaattgctctaagggtttaaataactggcccaagaattcaaacccagacattctgattccagagcctctttttcaccaataaaggaactcagctgaagtaatgcagcatttcactaattcaaaccccgttattctggcattgacagtttaaaaaaaaacaagtctggctgaaatgagcttttgagatgtcaagtaaggctggatttgttaggaggttagaaaggttttagagctactaaagagatacaactattctcaaggaccttcaaatatctcagagcacccactctaaaagcaactgtcacttgtagtcccagcattttgggagactgaggtgggaggatggcttaaggccagaagttcaagaacagactgggcaacaaagcaatacctcaacttaaaaaaaaaaaaaaaaaaaaaaaaaaa

SEQ ID NO: 64 - DNA, 818 bp, Homo sapiens
  misc_feature (797)..(797): n equals a,t,g, or c
  misc_feature (810)..(811): n equals a,t,g, or c
gcccacgcgtccgggagttgtgagtttccaagccccagctcactctgaccacttctctgcctgcccagcatcatgaagggccttgcagctgccctccttgtcctcgtctgcaccatggccctctgctcctgtgcacaagttggtaccaacaaagagctctgctgcctcgtctatacctcctggcagattccacaaaagttcatagttgactattctgaaaccagcccccagtgccccaagccaggtgtcatcctcctaaccaagagaggccggcagatctgtgctgaccccaataagaagtgggtccagaaatacatcagcgacctgaagctgaatgcctgaggggcctggaagctgcgagggcccagtgaacttggtgggcccaggagggaacaggagcctgagccagggcaatggccctgccaccctggaggccacctcttctaagagtcccatctgctatgcccagccacattaactaactttaatcttagtttatgcatcatatttcattttgaaattgatttctattgttgagctgcattatgaaattagtattttctctgacatctcatgacattgtctttatcatcctttcccctttcccttcaactcttcgtacattcaatgcatggatcaatcagtgtgattagctttctcagcagacattgtgccatatgtatcaaatgacaaatctttattgaatggttttgctcagcaccaccttttaatatattggcagtacttattatataaaaggtaaaccagcaaaaaaaaaaaaaaaaaaaaaaaaaaanaaaaatgacccgnnacccccg

SEQ ID NO: 65 - DNA, 1144 bp, Homo sapiens
atacgccagctcgaaattaaccctcactaaagggaacaaaagctggagctccaccgcggtggcggccgctctagaactagtggatcccccgggctgcaggaattccgtttatctttcaagattcattctccctgaatcttaccaacaaaacactcctgaggagaaagaaagagagggagggagagaaaaagagagagagagaaacaaaaaaccaaagagagagaaaaaatgaattcatctaaatcatctgaaacacaatgcacagagagaggatgcttctcttcccaaatgttcttatggactgttgctgggatccccatcctatttctcagtgcctgtttcatcaccagatgtgttggtgggttctgaagtgacatttcgcatctttcaaacctgtgatgagaaaaagtttcagctacctgagaatttcacagagctctcctgctacaattatggatcaggttcagtcaagaattgttgtccattgaactgggaatattttcaatccagctgctacttcttttctactgacaccatttcctgggcgttaagtttaaagaactgctcagccatgggggctcacctggtggttatcaactcacaggaggagcaggaattcctttcctacaagaaacctaaaatgagagagttttttattggactgtcagaccaggttgtcgagggtcagtggcaatgggtggacggcacacctttgacaaagtctctgagcttctgggatgtaggggagcccaacaacatagctaccctggaggactgtgccaccatgagagactcttcaaacccaaggcaaaattggaatgatgtaacctgtttcctcaattattttcggatttgtgaaatggtaggaataaatcctttgaacaaaggaaaatctctttaagaacagaaggcacaactcaaatgtgtaaagaaggaagagcaagaacatggccacacccaccgccccacacgagaaatttgtgcgctgaacttcaaaggacttcataagtatttgttactctgatataaataaaaataagtagttttaaatgttataattcaaaaaaaaaaaaaaaaaaaaaaggaattcgatatcaagcttatcgataccgtcgacctcgagggggggcccggtacccaattc

SEQ ID NO: 66 - DNA, 487 bp, Homo sapiens
ggcacgagccaggccagctctcctcccacaacagcttcccacagcatgaagatctccgtggctgccattcccttcttcctcctcatcaccatcgccctagggaccaagactgaatcctcctcacggggaccttaccacccctcagagtgctgcttcacctacactacctacaagatcccgcgtcagcggattatggattactatgagaccaacagccagtgctccaagcccggaattgtcttcatcaccaaaaggggccattccgtctgtaccaaccccagtgacaagtgggtccaggactatatcaaggacatgaaggagaactgagtgacccagaaggggtggcgaaggcacagctcagagacataaagagaagatgccaaggccccctcctccacccaccgctaactctcagccccagtcaccctcttggagcttccctgctttgaattaaagaccactcatgctcaaaaaaaaaaaaaaaaaa

SEQ ID NO: 67 - DNA, 512 bp, Homo sapiens
  misc_feature (6)..(6): n equals a,t,g, or c
  misc_feature (8)..(8): n equals a,t,g, or c
  misc_feature (450)..(450): n equals a,t,g, or c
  misc_feature (469)..(469): n equals a,t,g, or c
  misc_feature (484)..(484): n equals a,t,g, or c
  misc_feature (490)..(490): n equals a,t,g, or c
gccacnangtggaggacgtctacaactatggtcccccgggactgcaggaattcggcacgagttaaattttcaatagttaatggaaagttgtctttgaccttgaatttacagcattgggtcacattttgccttgctgtgtatgtattcaagagacttccaactagacaaagaaaaaattgttgttttaatggaatgtaaacctgaaattggtgtgtctgcaatctgtttggcccatgaccttttacctagtcccagttattacctgagtctcccatggatgacttgctgccaaggagtgtttgtggatatattttctttggcttaattttcttattctgtgcattaacaaaattatccagttgtctgattttggaattctatgagtcaatctttttggcagaattcagaatattaaaaagttcatacatttgcgggccattgtaccttttnkttkttkttttttttttgnasggagtttcccccntttttnccccggggggattgcagggggg

SEQ ID NO: 68 - DNA, 2701 bp, Homo sapiens
  misc_feature (1)..(1): n equals a,t,g, or c
  misc_feature (9)..(9): n equals a,t,g, or c
  misc_feature (17)..(17): n equals a,t,g, or c
  misc_feature (2699)..(2699): n equals a,t,g, or c
ncattcatnttttcaangctcgtgatctcacggcccggctgccggcccccgctctgccctgcagcataataaaatggctaatcaggtgaatggtaatgcggtacagttaaaagaagaggaagaaccaatggatacttccagtgtaactcacacagaacactacaagacactgatagaggcaggcctcccacagaaggtggcagaaagacttgatgaaatatttcagacaggattggtagcttatgtcgatcttgatgaaagagcaattgatgctctcagggaatttaatgaagaaggagctctgtctgtactacagcagttcaaggaaagtgacttatcacatgttcagaacaaaagtgcatttttatgtggagttatgaagacctacaggcagagagagaaacaggggagcaaggtgcaagagtccacaaagggacctgatgaagcgaagatcaaggccttgcttgagagaactggttatactctggatgtaaccacaggacagaggaagtatggtggtcctccaccagacagtgtgtactctggcgtgcaacctggaattggaacggaggtatttgtaggcaaaataccaagggatttatatgaggatgagttggtgcccctttttgagaaggccggacccatttgggatctacgtcttatgatggatccactgtccggtcagaatagagggtatgcatttatcaccttctgtggaaaggaagctgcacaggaagccgtgaaactgtgtgacagctatgaaattcgccctggtaaacaccttggagtgtgcatttctgtggcaaacaacagactttttgttggatccattccgargaataagactaaagaaaacattttggaagaattcagtaaagtcacagagggtttggtggacgttattctctatcatcaacccgatgacaaaaagaagaatcgggggttctgcttccttgaatatgaggatcacaagtcagcagcacaagccagacgccggctgatgagtggaaaagtaaaagtgtggggaaatgtagttacagttgaatgggctgaccctgtggaagaaccagatccagaagtcatggctaaggtaaaagttttgtttgtgagaaacttggctactacggtgacagaagaaatattggaaaagtcattttctgaatttggaaaactcgaaagagtaaagaagttgaaagtggakgccgctcmtkagaactagtggatcccccgggctggcaggattwcggcacgagaatgaatggcaaagaaatagaaggggaagaaattgaaatagtcttagccaagccaccagacaagaaaaggaaagagcgccaagctgctagacaggcctccagaagcactgcgtatgaagattattactaccaccctcctcctcgcatgccacctccaattagaggtcggggtcgtggtggggggagaggtggatatggctaccctccagattactacggctatgaagattactatgatgattactatggttatgattatcacgactatcgtggaggctatgaagatccctactacggctatgatgatggctatgcagtaagaggaagaggaggaggaaggggagggcgaggtgctccaccaccaccaagggggaggggagcaccacctccaagaggtagagctggctattcacagaggggggcacctttgggaccaccaagaggctctaggggtggcagagggggtcctgctcaacagcagagaggccgtggttcccgtggatctcggggcaatcgtgggggcaatgtaggaggcaagagaaaggcagatgggtacaaccagcctgattccaagcgtcgtcagaccaacaaccaacagaactggggttcccaacccatcgctcagcagccgcttcagcaaggtggtgactattctggtaactatggttacaataatgacaaccaggaattttatcaggatacttatgggcaacagtggaagtagacaagtaagggcttgaaaatgatactggcaagatacgattggctctagatctacattcttcaaaaaaaaaaaattggcttaactgtttcatctttaagtagcattttgctsccatttgtattgggctgaagaaatcactattgtgtatatactcaagtctttttatttttcctcttttcataaatgctcttggacattattgggcttgcagagttcccttattctggggattacaatgcttttatcgtttcaggcttcattttagcttcaaaacaagctgggcacactgttaaatcatgattttgcagaacctttggttttggacagtttcatttttttggatttgggatagattacataggagtatggagtatgctgtaaataaaaatacaagctagtgctttgtcttagtagttttaagaaattaaagcaaacaaatttaagttttcttgtattgaaaataacctatgattgtatgttttgcattcctagaagtaggttaactgtgtttttaaattgttataacttcacacctttttgaaatctgccctacaaaatttgtttggcttaaacgtcaaaagccgtgacaatttgttctttgatgtgattgtatttccaatttcttgttcatgtaagatttcaataaaactaaaaaatctattcaaaaaaaaaaaaaaaaaatgaccctcgagaaaaaaaaaaaaaaaaaaaaaaaaaaaaanaa

SEQ ID NO: 69 - DNA, 1914 bp, Homo sapiens
  misc_feature (37)..(37): n equals a,t,g, or c
  misc_feature (1894)..(1894): n equals a,t,g, or c
gggggggaaatttgagggcccccggcccgtttagganaaattttgggggagttttggaatttttttttttttttttaaaagaaagctggagctggtggcttaggccatcacccttcccttggctggaactactggacagacccttttgagatgtgcctgtggtgctgtggagatgtgtgtagtggtcttagctctttgttgagcttgtgtgtgtgttgtgtagtcttagctgtatgctgaaattgggcgtgtgttggagggcttcttagctctttggtgagattgtatttctatgtgtttgtatcagctgaatgttgctggaaataaaaccttggtttgtcaaggctcttttttgtgggaagtaagtaggggaaarggtctttgagggttcctaggctcctttgtacaacaggaaaatgcctcaaagccttgcttcccagcaacctggggctggttcccagtgcctggtcctgccccttcctggttcttatctcaaggcagagcttctgaatttcaggccttcattccagagccctcttgtggccaggccttcctttgctggaggaaggtacacagggtgaagctgatgctgtacttgggggatctccttggcctgttccaccaagtgagagaaggtacttactcttgtacctcctgttcagccaggtgcattaacagacctccctacagctgtaggaactactgtcccagagctgaggcaaggggatttctcaggtcatttggagaacaagtgctttagtagtagtttaaagtagtaactgctactgtatttagtggggtggaattcagaagaaatttgaagaccagatcatgggtggtctgcatgtgaatgaacaggaatgagccggacagcctggctgtcattgctttcttcctccccatttggacccttctctgcccttacatttttgtttctccatctaccaccatccaccagtctatttattaacttagcaagaggacaagtaaagggccctcttggcttgattttgcttctttctttctgtggaggatatactaagtgcgactttgccctatcctatttggaaatccctaacagaattgagttttctattaaggatccaaaaagaaaaacaaaatgctaatgaagccatcagtcaagggtcacatgccaataaacaataaattttccagaagaaatgaaatccaactagacaaataaagtagagcttatgaaatggttcagtaargatgagtttgttgttttttgttttgttttgttttgtttttttaaagacggagtctcgctctgtcactcaggctggagtgcagtggtatgatcttggctcactgtaacctccgcctcccgggttcaagccattctcctgcctcagtctcctgagtagctgggattacaggtgcgtgccaccatgcctggctaatttttgtgtttttagtagagacagggtttcaccatgttggtcgggctggtctcaaactcctgacctcttgatccgcctgccttggcctcccaaagtgatgggattacagatgtgagccacccgtgcctagccaaggatgagatttttaaagtatgtttcagttctgtgtcatggttggaagacagagtaggaaggatatggaaaaggtcatggggaagcagaggtgattcatggctctgtgaatttgaggtgaatggttccttattgtctaggccacttgtgaagaatatgagtcagttattgccagccttggaatttacttctctagcttacaatggaccttttgaactggaaaacaccttgtctgcattcactttaaaatgtcaaaactaatttttataataaatgtttattttcacattgaaaaaaaaaaaaaayttaaaaactsgggggggccccgwaccccattngcccctaagggggggggttt

SEQ ID NO: 70 - DNA, 1813 bp, Homo sapiens
gcacgagcgatgtcgctcgtgctgctaagcctggccgcgctgtgcaggagcgccgtaccccgagagccgaccgttcaatgtggctctgaaactgggccatctccagagtggatgctacaacatgatctaatccccggagacttgagggacctccgagtagaacctgttacaactagtgttgcaacaggggactattcaattttgatgaatgtaagctgggtactccgggcagatgccagcatccgcttgttgaaggccaccaagatttgtgtgacgggcaaaagcaacttccagtcctacagctgtgtgaggtgcaattacacagaggccttccagactcagaccagaccctctggtggtaaatggacattttcctacatcggcttccctgtagagctgaacacagtctatttcattggggcccataatattcctaatgcaaatatgaatgaagatggcccttccatgtctgtgaatttcacctcaccaggctgcctagaccacataatgaaatataaaaaaaagtgtgtcaaggccggaagcctgtgggatccgaacatcactgcttgtaagaagaatgaggagacagtagaagtgaacttcacaaccactcccctgggaaacagatacatggytcttatccaacacagcactatcatcgggttttctcaggtgtttgagccacaccagaagaaacaaacgcgagcttcagtggtgattccagtgactggggatagtgaaggtgctacggtgcagctgactccatattttcctacttgtggcagcgactgcatccgacataaaggaacagttgtgctctgcccacaaacaggcgtccctttccctctggataacaacaaaagcaagccgggaggctggctgcctctcctcctgctgtctctgctggtggccacatgggtgctggtggcagggatctatctaatgtggaggcacgaaaggatcaagaagacttccttttctaccaccacactactgccccccattaaggttcttgtggtttacccatctgaaatatgtttccatcacacaatttgttacttcactgaatttcttcaaaaccattgcagaagtgaggtcatccttgaaaagtggcagaaaaagaaaatagcagagatgggtccagtgcagtggcttgccactcaaaagaaggcagcagacaaagtcgtcttccttctttccaatgacgtcaacagtgtgtgcgatggtacctgtggcaagagcgagggcagtcccagtgagaactctcaagactcttccccttgcctttaacsttttctgcagtgatctaagaagccagattcatctgcacaaatacgtggtggtctactttagagagattgatacaaaagacgattacaatgctctcagtgtctgccccaagtaccacctcatgaaggatgccactgctttctgtgcagaacttctccatgtcaagtagcaggtgtcagcaggaaaaagatcacaagcctgccacgatggctgctgctccttgtagcccacccatgagaagcaagwgaccttaaaggcttcctatcccaccaattacagggaaaaacgtgtgatgacctgagcttactatgcagcctacaaacagccttagtaattaaaacattttataccaataaaattttcaaatattgctaactaatgtagcattaactaacgattggaaactacatttacaacttcaaagctgttttatacatagaaatcaattacagttttaattgaaaactataaccattttgataatgcaacaataaagcatcttcagccaaaaaaaaaaaaaaaa

SEQ ID NO: 71 - DNA, 2382 bp, Homo sapiens
tttggctccaccttacttattattattgccgtgttaggctatatctattcaattcagactacagagtgggcgattttaatctatggactggtgatgatcttctttttatacatgtatgtttgcttcgcgtcggcggtttatatcccggagctttggccaacgcatttacgcctgcgcggttcgggtttcgttaatgccgtcggacggatcgtcgcagtcttcacgccctatggcgttgcggcattattaacacattatgggtcgatcacggtgtttatggtacttggtgttatgttattgctctgtgcgctggttctctccattttggcatcgaaacgcggaaggtgtcgttggaagagatttctgaggtgaattaaatctttcgttgatggcatcaattgccagatgtgccactgacgtgttttatttggcctacaatgccagtacagaattgtaggccagcgtaaaattagccctgtgtctcttcccagtctgccagcgtatatagcgttgccccagctgctgacatctccataaacgcgtgcgcactgtcctggggctggatattcacgccacgacaaccatcggtaatcacgtttaccttataacctaactgtaacgcgtccagcacggtaaacttcacgcaatagtcagtagccaggcccataacgatcaattcatcgatttcatgatcgcgtaaccagtcatcgacagaggttttctgccgacggccgttatcaaaaaaggcactgtaactgtcaactaaaggattttcgcctttatggaacaccgctgcgatcgctttttggtgcagtaacggatgtaattgtgcgccttcactgttctgcacacagtgatctggccacaaggtttgtggcaaaccgtcgaattggcctggcgtataaggctctacaccgtgctgactggcaaaactgccgtgattcgccgggtgccagtcctgactggcgataaccgcttcaccgtcgcgactggcaccagctcaatcaggcggtctagcgacatccaccgtactgtcaccttccggcacggcgacgcgccaccaccacagaaatcatttggtaaatcaaccattaacagggcgcgagggggcattacagtctccttaatcatccggcgtcagttcgccgcgcaggttttggctcatggtcttgcgaatggtttcagtatccagttcctggctaagcaggtaatgcagtttggttagcgtggcttctacagtcatatctgcaccgccaattacgccggcatgggcgagggcgttaccggtggcataaccacccatgttcactttaccggacatacattgtgtcaggttgaccaccacaataccgcgatcgctggcttcttgtaattcctgcaggaaggctttgttttgtggcgcattacccacgccataggagcgcagaatcaatgctttcaccggttggcgcagaaaattgcgcacgacgtcagcagaaatccctggataaatcgtcactacgccaattggttgtggggtgattggatgaacgattaattccccttcaccgtgcggggcgggtggcgtattcaaacgacgaatatggatacctgcttccagtaacggaggaaggtttggagaggcaaacgcatcaaaaccatcggcatgggctttggtagtgcggttgccgcgatacaatcggttattgaaaaagagcgttacttcgttgatcggataattcgccgcaacgtacaacgcattcagcagattaatttgtccgtcagagcgtaactcagccagcgggatttgtgaccctgtcacaatgaccggtttaccgagattctcgagcatgaacgacagcgcagaggcggtaaacgccatcgtgtcggtgccgtgcagaatgacaaaaccatcatagtcgtcatagtgcgctttaatatcttcagcaatatgctgccagtcttccggcgtcatatctgaagaatccatcagcggcgtatattcatgaatggtgaaatctggcatctccgggcgatggaattccggttttaccgccgaagccgaccaactggagttactgtcgcgtagtaaaaccgtcaccgtgcctaaggtttgggcagttggcgctgaccgtgactacagttttctggtgatggattatctcccacctcgtccgctggatgcgcatagcgcatttattcttggtcagcaaattgcgcgtttacatcaatggagcgaccaaccacaatttggccttgatttcgataacgcgctctccacaactccacagcccaacacctggcaacgtcgctggtcaacgttttttgctgaacaacggattggctggcagttggaactggctgcagaaaaagggatcgctttcggcaatatcgacgccatcg

SEQ ID NO: 72 - DNA, 1937 bp, Homo sapiens
ttttttttaagctccatcactaacaactaatgaattttatttcaggtaaataaattcccacatacagtaggacgtttataccatgaaacaattagcattttattgctagtgcatataatgtcacatttgatacaattttagtacaagtgaaaaaatacactgtggctaacattgaaaagctgcaatcacatttatatatcatatatatttctttacaaattgccagtagtttgagataatagagaagtataaactactgacattcatatggctccacttcaaatatatgaattgttcgactataaatatattttgaaatacatttgttttctaaagaaacgtaaaaaaaaatgtgcacaaaaatatatataaaaaaatgccttgcaaaaagttacaaataccaccaggaccttctgtggatcgcatttatgcatggaaatgtcaccttgccaacagttctgattggaacctgaaaccctgctgtggcttcaggagggggtagtggcaagatgatggtttattcactgattttttcgcttctgatttcggaaacctcagagtttgttagtgcctccatggcatacataggcttcagaggcaatcacaaaacccagtcactcaaagcgagctctcagatttaaaattgcatttgattctgtaaagacttgtcttttgcgggtaagcagggggaccattacacatccccaggagagggccagctccattctggaggaggccaaagacggatctcacagagggcccgagctgtggggcaggccctgggaggagagggatgcagggcacgagccccagcaatcaccctcttcccggctggtgcggcgctgatcaggctacagaaatgagaagcagaagcaagattaagcatgctctcggagtcggggagagagtaggaatagctgggagaggggtctctgagcacagtcccagtaatagtggcttctacatggagcccacagagccaatcactgaggttgaaagaggaggtgaaggcagtggcggcgcccagccccagtcggtatctgagtgccacagaggccttcctcttgggaggggcgctgctgcgggagcctcagtgtctgaagaaaggacactttttccagctccctgttaagccaccacctgactgtgcccagactccccaggggagcagaggagatgctccaaacaagccaaattcagatcttgaagtactcgttgatttaaaaaatgagaatgagaatgatgatgattgtgatgatcatgaaggaactaactgcttgaaaatgctgttgataatacaatttctttcttagaaaaaccccagtaataaaagttccaacgtgcacaggtacagggcatggatgaatataagctgcaatatcataccgtatgctataaatgcagggtctaaatgctggcaaacctcaggcccgatcccagatcaatgtgcccaccccacacacacacctggtcctcatggttaaggccccctcccccacgtctttgccctttcatctctcacaaggttttagttttcctcgagtgggtctagcggaaagtcctttttggctgttgtgcttacttgtttaaagctttctccaggtactcctgaatccactttagcttcgggtcaatgcacacttgtctgttgttgttcttcagccgggctacaatctgaagggcacagtttggagtgttgagaattttgagatgcttgacgttggctctggcaacatggctttcgaagaatcggcatgggcatctgtagctcaggctgacgggcttcccgtcgctgaggcagagcgcggtcagcacgaggaccagcacgaccacgaccttggcgttcatggcgcgggcgggcgggcgggcgggcggacgagcgcgggtcgggggccggacgccgagcgggcaatgcggctgacgcgtgggtcgacccg

SEQ ID NO: 73 - DNA, 1393 bp, Homo sapiens
ggcacgaggaacacttgaaaactcctcaccaactatttttaaaggcttactttgtttttgtttttattttttcactggctattttggataagaggatgtttacatcttaatgtaaaaaaatgaaaacaggtataaatgttttatgtatagaaatgttttctttcattatttggtgcctgtatctccgtgtttatatcatttccccacctgtatcatgctgccaaaaaaagaactttgaatttagaaaaagaaattggtgtaaagtccgggccgggcacggtgggctcatgcctgtaatcccagcactttggggagctcaaggtgggtggatcacgaggtcaggagtttgagaccagcctggtcaacatagtgaaaccccgtctctactaaaaataccagaaaaataagctgggcgtggtggcaggcgcctatagtaccagctgcttgggaggctgaggcagaagaatcactttaggcctccatggtgtatgatcttctgtttctattgcacttctaagagcaagcctgagtttacctcctcactctaagggggaggacacagaggtgatcagatggtaatggcttagccagttcacatagctaagcacacacaaccctgatctagtgcagggctcttcgcactagcatggaactagtgaaggtgaccagtgttatattcagggaatatgactgttcttggtaaagccaaggagttgaggggttctgaaattggtgagtccaggcctgctgctggagtattttatcctaataggtgtattttattttaatttagataattcctaaatactgctttttgattaaggtgtaccatgagagcgaagataccctcttttatatactaagataattgcaatatttgcttgcttttttcagtctgtatttgaaatatatttacattaatacctggcctctttcccaaaagcacttgaagcagcataccaagaaaagacatatacagccatgttaatgaaatatgaacagaaagggaagaaaaacaaatgaaaattgaagggagggtttacatacattattgtatgtaaaatttgactctggaactttctggaaatcaaggctaagggtagggaaagaagttatgcactgccctatcaggtgaaaagcataccagttccttaggggagagcctttcctgatgccttctagtaaaggtgttctcactgggggtcctgtgaagtgctaaaatgaacagaattctcgattttcacacatttacatgttatgattgtgccttggatccttaccttgtaccagctttcaaaggcttccatttcaggatttggggggatttgtgtaggtgtggttaataaaggattttgttttcataggtaagaatcctaaaaaaaaaaaaaaaaaa

SEQ ID NO: 74 - DNA, 2002 bp, Homo sapiens
ggcacgagctgctccaccgtcctactgcgccgagcttctgtgcgctgggaggctgggctcctaatcccgacacatactgtcttctccttgtaagtgcggtggttggggaagtggctgtgctgtggcaccctggaaaccctgcccatatccgcatgcgccgagacttgacccacagcagatctcagtcttggcagaatgcctgcctgtggctctccttgaacacaacagcacgggacaattgcaaagagctgctacaagggcatttctcactcgtttccttacatataccaaggaggccgtcctgagacagctgctcgtctccttgggttctgatgagatatgaggccttttgcctcacccctcaagatgctgctgcaggccataaagctgcttagctgcagagggcgttggctcctctacaataggcatcctgtcattggtgcttctgacatgtggccccttttactctggtgtcaccctgcacaagggccgcaggaccttgcacttttggctcctcctcctctcactccacacaggtggtgaatggagtctgaaaaggcttagctgtttctttaccagctgaatcctctgtcaggcttggccttgccttgtgcttggcagttgccaagtacacgtctttgctggttccctagggctgctgaaacaaagtgccataaagtgggtggctttcacaatagacgtctactgtctcacagtcctggaggctagaatctgagaacaaggagccagcagggttgcttccttctaagggctctgacggaaggatccacgccaggcctctctgcctggagtgtgggtggctgtcttctctgtctcttcacatagagtccctgagtgtgccttggcatggaaattacccctttgtataggacaccagtcatactggattagggcctgcccttgcgacctcatcttaactaattccatctgcaatgaccctatttccagacaaggtcacatgctgaggtactgggggttagacttcacataaaaatttagggaaaatacagttcaaccatagcaacatctttgtccccaactagactataagctcctgggtcaagagagcctcagtaagtgctggacaagtgggttcggtaacaaagagaaggaagggaactgaataaggtcttgtcaggagacacctgtggagggcctggcgtggtcttaccccagcaatagtccctcagccttgtcatgacccggaactggcagggctcaaaaagacagataaaggatgtaaggaagactcctagcttagtgatttacaatggggacatccattttaggaacaggacagctcttttctcccagccatggcatttattaccttctctgggggtggtctcctgggaagccacactggtcacgctggctgacagcctcaggcggggggccaaggtggggcccctgaggacagttcacccaggttctgggggaacctgaggaggaaacagagatgatatcatccacctccaacattataggtaaggaagcggaggcaagagactgagtgagttgtctccttttggtgacagggtgacaaccctgtgagtgacagagctgggacaaaatctcaggtgtcctgacctcctgttgagtgcttttaccatgccgagctcttcagccagcagttcatcttccctcagactcgctgtcctcagcataatggagcgcatgccttcatgcccctcccacaccacgcagggccttgaagccgtggacgcacgtcccagaggaggagggcaggctgcaggagctggtcagagaggaatctcccaaacaccttgctctgcaatggactctgcttgccccagaagtgggaggattcccaaacatgtctatatccaggcatagaatttactgtggtccttgcacacctagtgccagctttcgatggagagaccaagaggccaagactactttccgcactcagcactgccccctatgctttgttcatgataaaaaaaaaaaaaaaaaa

SEQ ID NO: 75 - DNA, 1750 bp, Homo sapiens
  misc_feature (1638)..(1638): n equals a,t,g, or c
  misc_feature (1655)..(1655): n equals a,t,g, or c
  misc_feature (1703)..(1703): n equals a,t,g, or c
  misc_feature (1726)..(1726): n equals a,t,g, or c
  misc_feature (1730)..(1730): n equals a,t,g, or c
ttccactgggaaccagggatgggtaagccttgggcttaggaaaaattagtaattagagcagcaatgccctagactcatttattccagggcccctttgtaagagaaccttttaactttatataaaactaggtaattctgcacttatgctgttcttcatacgtcaagacagcaaaatcctctcacctctctactttcatgtatactttgaatagataatscattcaaatgactcaacactcaagtgccagagtggagagatgtccagtgaaaagcttcctccgcctctgtccctttcttgtctgggggagtccccattgcctgtttcttggtagccttcagagagtctgttcatatgagggacatgcatatttatcctccctcccccacctcttctacaaatggtgccacatcataccatgcggacacgcagcaagcacctcatccttcatttttgtggctacataaatgtttcgttgaacggatgcagcctagtaatgtccgcgttgtcatacccactgtcgcttccgcagctggtgtgattggcccgtgccatgtgccttcatgaacagttgtgataatggcaatgtcagtagcgaacatgagggcagatgtgcagaggcagcgaggccccatctctgaagctgagtctttgaggctggcaaggcccaggctggctcaccctggctctgacgccagcctcctccacccaccccccgcaggctgggtgctggagtggcgctggctggctgtgctgggctgcgtgcccccctccctcatgctgcttctcatgtgcttcatgcccgagaccccgcgcttcctgctgactcagcacaggcgccaggaggccatggccgccctgcggttcctgtggggctccgagcagggctgggaagacccccccatcgggctgagcagagctttcacctggccctgctgcggcagcccggcatctacaagcccttcatcatcggcgtctccctgatggccttccagcagctgtcgggggtcaacgccgtcatgttctatgcagagcaccatctttgaagaggccaagttcaaggacagcagcctggcctcggtcgtcgtgggtgtcatccaggtgctgttcacagctgtggcggctctcatcatggacagagcagggcggaggctgctcctggtcttgtcaggtgtggtcatggtgttcagcacgagtgccttcggcgcctacttcaagctgacccagggtggccctggcaactcctcgcacgtggccatctcggcgcctgtctctgcacagcctgttgatgccagcgtggggctggcctggctggccgtgggcagcatgtgcctcttcatcgccggaggtcctcaggccctatggagccttctggcttgcctccgctttctgcatcttcagtgtccttttcactttgttctgtgtccctgaaactaaaggaaagactstsgwacaaatcacagcccattttgaggggcgatgacagccactcactaggggatggagcaagcctgtgactccaagctgggcccaagcccagagcccctgcctgccccaggggagccagaatccagccccttggagccttggtctgcagggtccctccttcctgtcatgctccctccagcccatgacccggngctaggaggctcactgnctcctgttccagctcctgctgctgctctgaggactcaggaacaccttngagctttgcagacctgcggcagncctncatgcgcaagactaaagcag

SEQ ID NO: 76 - DNA, 2380 bp, Homo sapiens
ctttctagcctccgcctccaggcgggtgaggaggtgacacctgagaattcctccctctcacccctgaccctgccggaaagcgaaactgagatgcgggcattgggmcctgggaagcgtggggaaggggaaaggagaaagccaggttaactacgtcaggattaatgtgttccacttctgctgcctgagaaaatggagaaattaagtcctttccatggrtcattccttctgtaaacagagatcacaaagcaagagcttcagcatcctcgtgaaaaagacattttgttctgggtgtcatcatctccttccactacagcttgcaattggaacaagcttcacatcctgggggtgctgcctatctctgtcttgatttctgtctgtctattcctcccattgacaggaatgtcgtttgtawcctccacgcagcagtttgcagaaatccagcaaggtttatggtttatgttgcccagcatgtataaacacaacgctctcaaatgctttttaaaaatctatgaatttgttagatgtcttcacatcctggkcctcctaccccaattctcaracacaaagtactctgttgccctattatagtcctgcgatagttctggctaggattaggttgacggtctaagccccaagaaaggcctggcattttcatagcaggctttccccagtgctttgagtcttcctctctcactccctttttctttttccctcggaggagggggtgttgggggtgggaggtgattagtaaatgtttcaggtaatctgtgaattcttaatagtcatatttccgtggtggaagatctccctatttctctgatgtgacaggttacagaaaccttggtgttgggggttttacagatatttacaagttctaggagtttgaactttgggtcaagatgttgattccttttaatgtgcgagggtgaaggaggttttattttgctttattcttttggatattatgagatgagattgtatccagtcttggctgtaacctataccataaatgcagagctgcaaccattatttctgtctctttctccttttatcacctacacttctagagatattactttcagttttattgcaaatcatctgtgtctttagtttaaaccattatttttcatataccccaggcacatttcccttataatgagacaaattttagattattaatgttccacctaaaaggatactgtacacttttcattgccaatatgggctttgaagcttaaatatcaacatttttataggaaatttacccatgtcaaatttaaatatatttgcttatatttcttggaaaaaagattttggataactatcaattaagcagccaattccatttggggtgcagaaaattttgagccccttgataagaaggaacaaaatttttcctctaaataaccaactctggatcagaaaaactgaacttttctaaatatttattattaacaaaacttttttttgtctgattccactagaagcattctatgktgtgaacactataaagktatcctatgktgtgaacaccataaagttatgagggaaaaaatgkcaaatctaaattttatttagaagtaacatattgkttttctggacttgcaatccaattcgaawgcatcgktagacttttctgttttcttatgattaaacaacaatggcttaaaatgatagcaagtcaactgaaaagttgctttggaataaaacaaaagtgggaatgccaactttcttttcttctctataacttcattamcatggtkgtatagacatttgcatgtaaaatgtagctamcaaaaattacacagaagtaaatttagtcctctagtgcctacctctatggtgaaatcagaccatttggcatagtttgaagtcttccaagaagcctggtttccacctggaaaataaattactaaatttgaatgtgttacttatactatggtgagttgtctatctgttacattttattttagtgcatatactagaaattgtatttagggtgttctaaaattgtcatctgtcaaggtagagaattataataatataattatactcagaaagcgttctgattttagattattttggcactgttacaaatatgatgaattttaaaaaaatgcagaatgtttattacaaattcatatgtttaattgtcaaattctgagattaatttagataagctataaccaaagtttattttctttgcatttattggtacatagttaatgcttatacacaggcttcagtgtaacacctatacactattacaatatttagctgtacttatttgctttatctttaaatggtactttgtcccaaaattttctgagyttgataaattattaaacatttatcaaatcamaaaaaaaaaaaaaaaaag

SEQ ID NO: 77 - DNA, 598 bp, Homo sapiens
cccacgcgtccgcaccccttcccagccccagccctggagacagcagcccctagactactgagggacagcgacagcatgaaggctccgggtcggctcgtgctcatcatcctgtgctccgtggtcttctctgccgtctacatcctcctgtgctgctgggccggcctgcccctctgcctggccacctgcctggaccaccacttccccacaggctccaggcccactgtgccgggacccctgcacttcagtggatatagcagtgtgccagatgggaagccgctggtccgcgagccctgccgcagctgtgccgtggtgtccagctccggccaaatgctgggctcaggcctgggtgctgagatcgacagtgccgagtgcgtgttccgcatgaaccaggcgcccaccgtgggctttgaggcggatgtgggccagcgcagcaccctgcgtgtcgtctcacacacaagcgtgccgctgctgctgcgcaactattcacactacttccagaaggcccgagacacgctctacatggtgtggggccagggcaggcacatggaccgggtgctcggcggccgctctagaggatccctcgaggggcccaagctta

SEQ ID NO: 78 - DNA, 605 bp, Homo sapiens
gatgctggccgcagaagcagcctgaagagagaaggagctgaggccatttaacctagacagcaggtgacctgacctcctgaactgaggggtaggcaagagcttggctggaagtccagccagccctaccagttccatgggggcctgttcctatgatggtgaaggtatggcttgagtggctgatgcttttattattgcctctgggtaagatgcctctgtgtgccagggcagtgggggagtggggatgagacctgtccacccctttctccattaawgttgataytccaarggccagaccaggaccaattccagaagtccccagggacacctgcctggcctatgtgtaaggagtgatgttttggttggtgagagtctttgcaagcctggagatgaacacatcagagggtggcgggggaggagagtgggatgcaggcttggggctgagagatgggcatgtggatttatcaggttccttcaaaccttgagatcctgtgattgacatccctaacatgacaccctaaaacagtaaaaaaaaaaaaaaaaaaaaaaaaaaaaaaaaaaaaaaaaaaaaaaaaaaaaaaaaaaaaaaaaaaaaaaaaaaaaaaaaa

SEQ ID NO: 79 - DNA, 1895 bp, Homo sapiens
cccacgcgtccggatagttttattggcatttccagtaagaatatttgaaagcctctgtctgaaattacaaagcttaatttttttgttttacaagattcctcaacctctactttttactctatactagtttcaaattggtttataaatagaacttaatgtttaatggctataattttgttattggcaaatattaaagtgttgttagctctacctaatcgtgatcaagctcttctttcacatttgtttcactttagtttcttaccattttggctatgtacccagaattctttaggtatgcatgaactgtttcagtaatgctcatcccctcttctcaatttaagttgaaaaagcaattttctccatttttaaagtacgttaaactggagcccagactcccccctgtgtagtgagttcataactctcattaaattaatctgcatttttatttttcacatccctctgcctccactcagaccaaccagggtcaaggagggccagggaattgggttctggattctcaagaccttgtagactccaaagagatggaaagactgtgaagcacaagaaagagaaaccagaacatccactggagaacttggaagagccagaacaacattgttcatcgaagagatccctgtcatcctctagctcgggcaaagggagggacaatccccatattaacaatgagcagcatgaaaggaaacggtccactcaggagaggcctcggagacctctgcttcccacgatcagtggtgaagtgtttctgagcactgaatgtgatgactgggagactaagattaaccatcagactcgaaattgggaaaaacagtctcgacaccaagatcgactttcacccaagtcctcacaaaaagcagggcttcactgcaaggaagttgtatatgggagggaccatgggcaaggtgagcacagaaaaaggagacacaggcccaggactcctccattctcagagagtgaggagcagctccacctccatgacgcaggtagaatgaagccaagagtgacgaaagaagctgtatctactccatcacgaatggcccacagggatcaggaatggtatgatgctgaaattgccagaaaactgcaagaagaagaacttttggctacccaggtggacatgagagccgctcaagtagctcaagatgaagaaatcgctcgacttctaatggctgaagaaaagaaagcttacaaaaaagccaaggagcgggagaaatcatctttggacaaaagaaagcaagaccccgagtggaagccaaaaacagctaaagcagcaaattcaaagtcaaaagagagtgatgaacctcaccattctaagaatgaaaggccagcacggccaccaccacctatcatgacagatggtgaagatgcggattacactcattttacaaaccagcagagttccacacggcatttctcaaaatcagagtcctctcataaaggttttcattacaaacattaaaaacctaggaatctgccttgaaaatggactcactatagcaaatattactgggtgatacagaatgaattctacacttactttttttctcctgtgtttgcattcctgggatttatcctcaagtgcatttctgaccataagtaattttaattcatttcaaatgttttggttattcatgatcacttgggcagtataagaaaatgtagcttctgaatattggccacctctatgctgcatatacttcttgggatatagtatctaagacctttgtaaactgccattttgttaggtatggagtttggtatctagggagtaggccttatttagcaattcaaattttatggagatgaatgatcaaagtgaaacaatgtttggatgcaacgcagaataaaagaatataagaaataaaaaaaaaaaaaaa

SEQ ID NO: 80 - DNA, 589 bp, Homo sapiens
gaaatgcttttcaccggtccggaattcccgggtcgacccacgcgtccgattctacacttcccttcccctgactcttttttttttttttttttcttttcgagacggagtctctctttgtcacccatgctggagtgcagtggcataatctcaactcactacaacctctgcctcctgggtcaagagattctcctgcctcagcctcccaagtagccgggattacaggcatgtgccaccacgtctggctaattttttttttatttttagtagagatggaatttcaccatgttagccaggctggtctcaaactcctgagctcaagtgatccacccgccttggcttcccaaagtgctgggactacaggcatgagccaccatgcccggctgcttcccctgacatttgatgatgaagtgtgacaaaaaaggtgtcacactgtacaccttttgatattgtggatttgttaacaaattattgtaggtatagatatttttagtacttttgttttttaacttttatatagatttaaatgttttacacaccaccattacaataaaagaatattctgaattttactatattcctacaccttatg

SEQ ID NO: 81 - DNA, 1045 bp, Homo sapiens
ccggacgcgtggggtctactaaaaatagaaaaattagccaggcgtggtggcaggcccctgtaatgccagctactcaggaggctgaggcaggagaattgtttgtatccgggaggcggagtttgcagtgagccgagatcgtgccactgcactccagcctakgcaacaaaccaagactccatctcaaaaaataaaaataaaaaaagcaggtgatgggatgacatggagtttttgttttgctttgttttgttttgttttgttttttgctgcttccctgataggctatatactgctcccttcagcctctccccgaaaccacaggcgcccaaacaatgaggccagggttggaacccctggccagctagatgatgagctgaaggggaggcaacctttagccagcagacttgagacatctcagtgtactcagggtctgctggctagcaggcccagtggggtctccaaagcccttctgtatccttaatggtccttaaaccctggttgaagatccccccagttgtgtttacttaagccagaaggctgggcaatctctatatcctttctccatcgatcatcctatgattgttttgttagagaattattattgttcagggtaccagatcttagtttcattccacagataataagttcggctccaggctgggcatggtggctcacacctgtaatccctgcactttgagaggccaaggtgagtggatcacttgaggccaggagcttgagaccagcctggccaacatggtgaaaacccatctctactaaaaatacaaaactttgcagggtgtggtgttgcgggaagtcagggaccccaaacggagggaccggctgaagccatggcagaacgtggattgtgaagacttcatggacatttattagytccccaaattaatacttttataatttcctatacctgtctttactgcaatcttggaacataaaattgtgaagatttcatggacacttaccacttccccaatcaatacccttgtatttcctatgcctgtctttactttactttcttaatcctgtcagc

SEQ ID NO: 82 - DNA, 3008 bp, Homo sapiens
cacgtatcaagataaagaggaagttgtcttatggatgaatactgttgggccctaccataatcgtcaagaaacatataagtacttttcacttccattctgtgtggggtcaaaaaaaaagtatcagtcattaccatgaaactctgggagaagcacttcaaggggttgaattggaatttagtggtctggatattaaatttaaagatgatgtgatgccagccacttactgtgaaattgatttagataaagaaaagagagatgcatttgtatatgccataaaaaatcattactggtaccagatgtacatagatgatttaccaatatggggtattgttggtgaggctgatgaaaatggagaagattactatctttggacctataaaaaacttgaaataggttttaatggaaatcgaattgttgatgttaatctaactagtgaaggaaaggtgaaactggttccaaatactaaaatccagatgtcatattcagtaaaatggaaaaagtcagatgtgaaatttgaagatcgatttgacaaatatcttgatccgtccttttttcaacatcggattcattggttttcaattttcaactccttcatgatggtgatcttcttggtgggcttagtttcaatgattttaatgagaacattaagaaaagattatgctcggtacagtaaagaggaagaaatggatgatatggatagagacctaggagatgaatatggatggaaacaggtgcatggagatgtatttagaccatcaagtcacccactgatattttcctctctgattggttctggatgtcagatatttgctgtgtctctcatcgttattattgttgcaatgatagaagatttatatactgagaggggatcaatgctcagtacagccatatttgtctatgctgctacgtctccagtgaatggttattttggaggaagtctgtatgctagacaaggaggaaggagatggataaagcagatgtttattggggcattccttatcccagctatggtgtgtggcactgccttcttcatcaatttcatagccatttattaccatgcttcaagagccattccttttggaacaatggtggccgtttgttgcatctgtttttttgttattcttcctctaaatcttgttggtacaatacttggccgaaatctgtcaggtcagcccaactttccttgtcgtgtcaatgctgtgcctcgtcctataccggagaaaaaatggttcatggagcctgcggttattgtttgcctgggtggaattttaccttttggttcaatctttattgaaatgtatttcatcttcacgtctttctgggcatataagatctattatgtctatggcttcatgatgctggtgctggttatcctgtgcattgtgactgtctgtgtgactattgtgtgcacatattttctactaaatgcagaagattaccggtggcaatggacaagttttctctctgctgcatcaactgcaatctatgtttacatgtattccttttactactattttttcaaaacaaagatgtatggcttatttcaaacatcattttactttggatatatggcggtatttagcacagccttggggataatgtgtggagcgattggttacatgggaacaagtgcctttgtccgaaaaatctatactaatgtgaaaattgactagagacccaagaaaacctggaactttggatcaatttctttttcataggggtggaacttgcacagcaaaaacaaacaaacgcaagaagagatttgggctttaacacactgggtactttgtgggtctctctttcgtcggtggcttaaagtaacatctatttccattgatcctaggttcttcctgactgctttctccaactgttcacagcaaatgcttggattttatgcagtaggcattactacagtacatggctaatcttcccaaaaactagctcattaaagatgaaatagaccagctctcttcagtgaagaggacaaatagtttatttaaagcatttgttccaataaaataaatagagggaaacttggatgctaaaattacatgaataggaatcttcctggcacttagtgtttctatgttattgaaaaatgatgttccagaaagattacttttttcctcttatttttactgccattgtcgacctattgtgggacatttttatatattgaatctgggttcttttttgacttttttttttcccaatccaacagcatccttttttttaaaagagagaattagaaaatattaaatcctgcatgtaatatatctgctgtcatcttagttggaccaacttcccatttatttatcttaaaactatacagttacatcttaattccatccaaagaagatacagtttgaagacagaagtgtactctctacaatgcaatttactgtacagttagaaagcaaagtgttaaatggagaagatacttgtttttattaaacattttgagatttagataaactacattttaactgaatgtctaaagtgattatcttttttccccccaagttagtcttaaatcttttgggtttgaatgaaggttttacataagaaattattaaaaacaaggggggtgggtaataaatgtatataacattaaataatgtaacgtaggtgtagattcccaaatgcatttggatgtacagatcgactacagagtacttttttcttatgatgattggtgtagaaatgtgtgatttgggtgggcttttacatcttgcctaccattgcatgaaacattggggtttcttcaaaatgtgtgtgtcatacttcttttgggaggggggttgttttcttctgtttattttctgagactcctacaggagccaaatttgtaatttagagacacttaattttgttaatcctgtctgggacacttaagtaacatctaaagcattattgctttagaatgttcaaataaaatttcctgaccaaaaaaaaaaaaaaaaaaaaaaaaaaaaaaaaaaaaaaaaaaaaaaaaaaaaaaaaaaaaa

SEQ ID NO: 83 - DNA, 683 bp, Homo sapiens
cggcacgagctccgggcctggtgaacggcctggccctgcagctcaggaacaccagccggtcggaggaggaccggaacagggacctggccactgccctggagcagctgctgcaggcctaccctagagacatggagaaggagaagaccatgctggtgctggccctgctgctggccaagaaggtggccagtcacacgccgtccttgctccgtgatgtctttcacacaacagtgaattttattaaccagaacctacgcacctacgtgaggagcttagccagaaatgggatggactgaacggacagttccagaagtgtgactggctaaagctcgatgtggtcacagctgtatagctgcttccagtgtagacggagccctggcatgtcaacagcgttcctagagaagacaggctggaagatagctgtgacttctattttaaagacaatgttaaacttataacccactttaaaatatctacattaatatacttgaatgaaaatgtccatttacacgtatttgaatggccttcatatcatccacacatgaatctgcacatctgtaaatctacacacggtgcctttatttccactgtgcaggttcccacttaaaaattaaattggaaagcaggtttcaaggaagtagaaacaaaatacaatttttttggtaaaaaaaaaaaaaaaaaaaaaa

SEQ ID NO: 84 - DNA, 1920 bp, Homo sapiens
  misc_feature (1912)..(1913): n equals a,t,g, or c
  misc_feature (1917)..(1917): n equals a,t,g, or c
gttgccgtagcagagccctctagctgtgtgtgtctgaggctcggccgcctgagccgcggacggtttgctgagcccgttagtgcgcccggccgagacacgccgccgccatgtcccgctacctgcgtccccccaacacgtctctgttcgtcaggaacgtggccgacgacaccaggtctgaagacttgcggcgtgaatttggtcgttatggtcctatagttgatgtgtatgttccacttgatttctacactcgccgtccaagaggatttgcttatgttcaatttgaggatgttcgtgatgctgaagacgctttacataatttggacagaaagtggatttgtggacggcagattgaaatacagtttgcccagggggatcgaaagacaccaaatcagatgaaagccaaggaagggaggaatgtgtacagttcttcacgctatgatgattatgacagatacagacgttctagaagccgaagttatgaaaggaggagatcaagaagtcggtcttttgattacaactatagaagatcgtatagtcctagaaacagtagaccgactggaagaccacggcgtagcagaagccattccgacaatgatagaccaaactgcagctggaatacccagtacagttctgcttactacacttcaagaaagatctgaaagcggaaaaagaaccaaagaagggcagttcaagcgaccaaagggtgggtggaaggtgctgcagtatgaatactgtacgaatattttgactctggtctgaaaagataaaagaatgttatcgaaaactacatggaataattgaagtcccttcaagtttgaaagtaagcattttaggacaaataaaaggaaattcaactttgtacttgtggaaactaatccctaaatatgaataggtttatattgattcatgggtaacaggtccataataaattattggaaactaggatgtctgaatatcaaggaagacagccatagtctcttacagtgcctctgttggtctgtctcaaactgaattgggtgggaaaaggtatggtccaatataaaagttccatttttgccattattggcaaatcttgcctttgtttattttggtgccagtgttttctgcttaatcatttgctttgttggcatctgtgtttatttacttgtacaccacatgcagtttacatctgtcttaactactccttcccaggtaaattccaattatatttgacatccagctaagagggcccatctcttctcacctctttcctagtcagtatattcagcaaatatttattgagcccttactgtgggcaaatcattgtactggataattgagaaaaatagataattcccttattcagtaaatgtctactgagcacaatctagtgaatcattacagtatggcctcattgttttgtttgaggtgtgttattcataacaatattttacaccattcgtatcaatgtaattatagaacacaatatacgatcaaggataagtaattgtgtggttatctgccatttaaaagtatccagtatttgatcacattattataaataatgaaaaaatgatttaatctgtaataaactggtttattgtgcagtgactgtaatatactagagttataataaattgtttactctgcctcaccaaacacatgctaggatataacccccaaaataagtatttaactttgcattaggtataaaggagactgggtgctataattagattattttgaggcagacagagagctgttatcctaactgatttagtatgttctgtaattgagaaaatgttcaccaaattatactttttagtgatttacatgtacattttataggggacatgttctgtgtatagcgaataaataacttttatagtatcacaaaaaaaaaaaaaaaaaaaactcgagggggggcccgaanncaantcg

SEQ ID NO: 85 - DNA, 1190 bp, Homo sapiens
ggcacgagctgaatgagaacttttaagatagtactggacagtaaccttattggaactggaatggcctttagactttttgtgtccagtttcttctcacctcctctttctcttcaaatgtgcaactgaaactgagagacctcagtcccatgtccaaggtcaggcagatacttagcggcagagtgaggactccagcccatttctgcagctctgctgtgcagtggaagatttgggacaagtacattatttaaaaatgcccacccactaaatattacattcctaacttttcccaatacacaaatatgcttgaacttttaaaagcttgtttttggtcgtgcttggtttggaatgtgaatgactaaaactacctttagcaatttcccaaagtgtaagttcaaatgtacagagaatttttttcctgaatgcccaacacaatatgcagttttacaacacataccagattcttagattcatttggtgaaggaagcctctgaattaaaacttttaaatatttctgatttgcaaccagacgaaaagaagaaaattgacaacttttttgatgcaactttgtgaaatcatggtgttcctggtttttctggtctggtttttgttgttgttttgttttgtttttgccacagtttagttcctcacctgatctttccttgtatccacttcagaatctctgaaatgttatctgtttgttggttcctgggaattgagaccttttcaaagacccatctagagcatatttaaaatgtgaaagaagcatttatgcgaccaacaacatatgaaaaaaagcttatcatcatgggtcattagagaaatgcacagcagaaccacaatgagataccatctcataccagttagaatggtgatcactaaaaagtcaggaaaggccaggggcggtgactcatgcctgtaatcccagcactttgggaggctgaggcgggtggatcacctgaggtcaggagtacaagactagcctggccaacatagtgaaaccccatctctactaaaaatacaaaaattagctgggtgtggtggcgggcacctgtaatcctggctactcaggaggctgaggcaggagaatcgcttgaatctgggaggcagaggttgcagtgagccgagattgtcccactgcaactccagcctgggtgacagactccatctcagaaaaaaaaaaaaaaaaaaaa

SEQ ID NO: 86 - DNA, 842 bp, Homo sapiens
  misc_feature (18)..(19): n equals a,t,g, or c
  misc_feature (49)..(49): n equals a,t,g, or c
ccacgcgtccgcccacgnncgtccgaaaaaaaaaaaaaagaaaaacagnaagatgaccttgatggaaaaaaatattttttaaaaaaaagatatactgtggaaggggggagaatcccataactaactgctgaggagggacctgctttggggagtaggggaaggcccagggagtggggcagggggctgcttattcactctggggattcgccatggacacgtctcaactgcgcaagctgctgcccatgtttccctgccccacttcacccccttgggggctgctcaagggtaggtgggcgtgggtggtaggaggttttttttttacccagggctctggaaggacaccaaactgttctgcttgttaccttccctccgtcttctcctcgcctttcacagtcccctcctgcctgctcctgtccagccaggtctaccacccaccccacccctcttctccggctccctgcccctccagattgcctggtgatctattttgtttccttttgtgtttctttttctgttttgagtgtctttctttgcaggtttctgtagccggaagatctccgttccgctcccagcggctccagtgtaaattccccttccccctggggaaatgcactaccttgttttggggggtttaggggtgtttttgtttttcagttgttttgtttttttgttttttttttttcctttgccttttttcccttttatttggagggaatgggaggaagtgggaacagggaggtgggaggtggattttgtttatttttttagctcatttccaggggtgggaatttttttttaatatgtgtcatgaataaagttgtttttgaaaataaaaaaaaaaa

SEQ ID NO: 87 - DNA, 488 bp, Homo sapiens
ggcacgagcattggtgacccagtgtcagaaaatggacatccctttccttggggaaatgcccgcagagcccatgacgattgatgaactgtatgagctggtggtggatgccatctttggcttcagcttcaagggcgatgttcgggaaccgttccacagcatcctgagtgtcctgaagggactcactgtgcccattgccagcatcgacattccctcaggatgggacgtggagaagggaaatgctggagggatccagccagacttgctcatctccctcacagcccccaaaaaatctgcaacccagtttaccggtcgctaccattacctggggggtcgttttgtgccacctgctctggaaaagaagtaccagctgaacctgccaccctaccctgacactgagtgtgtctatcgtctgcagtgagggaaggtgggtgggtattctccccaataaagacttagagcccctctcttccaaaaaaaaaaaaaaaaaa

SEQ ID NO: 88 - DNA, 905 bp, Homo sapiens
cgacggtttcaccttgttggccaggctggttttgttggccaattgtctctaaactgctgtcaaaaaaaggaatggatcagattgtcttgaatagggcagagctaacctgtaatcacctgtgtgatgagaaacagctttgactgcattttactcctgacctggcctaagctttctgtttacataagatttttcaagaattcaacttcaagtagcagccgagagagctgcctcaggattctctcaaaaactgggaataatatgggaacatttgtttcttctaaaaataaggcaaatgttacattgaatgatttggggggtgaggtttaattggaaatggtctctggggactgaaaactgatgtttttgcagattacctcagggaaacggaggtttgttgagtttacagacacattaaaccaaaggccgtgggaaaacccctctccagctccaggggattggtcaggaccacccactaaccagtgccttccttcttaacattcacttttagcagcttgtgtttattttacatgggcagttttgatgggaaattgccatgaccacaggggtttggagttctgctttttttttttcttcttctttttcgggggactgggggactcctcccaagatcacattttagcatctttctctcctactccatttagaaaaataagtaacaggtgaaatgtggtctcagtgttaacgggataattctgctaccggctcctccctgatgattctgaaatacactactgaacgagctctggctggtcctttctatcctggatgtggttcttctgtgtagcaattccttgatgtccagtttggaaagatgtactcttctcaacaagaaaaacttaaatccgtcgtgcccaaaaaaaaaaaaaaaaaaaaaaaaaactcga

SEQ ID NO: 89 - DNA, 1072 bp, Homo sapiens
ggcacgaggaaaatggcgcctcacggcccgggtagtcttacgaccctggtgccctgggctgccgccctgctcctcgctctgggcgtggaaagggctctggcgctacccgaggtacagaagcaagtttgaggtcgggctgaagcagggtcgctggccagccgtgcgtcgcgctcgccagcggctcccccttctcctcggcgggcctgcggttctgatttcgtccctgacgcttcccgaccctgcccagccagatatgcacccaatgtccagggagcgtgcaaaatttgtcaaaagtggccttttattgtaaaacgacacgagagctaatgctgcatgcccgttgctgcctgaatcagaagggcaccatcttggggctggatctccagaactgttctctggaggaccctggtccaaactttcatcaggcacataccactgtcatcatagacctgcaagcaaaccccctcaaaggtgacttggccaacaccttccgtggctttactcagctccagactctgatactgccacaacatgtcaactgtcctggaggaattaatgcctggaatactatcacctcttatatagacaaccaaatctgtcaagggcaaaagaacctttgcaataacactggggacccagaaatgtgtcctgagaatggatcttgtgtacctgatggtccaggtcttttgcagtgtgtttgtgctgatggtttccatggatacaagtgtatgcgccagggctcgttctcactgcttatgttcttcgggattctgggagccaccactctatccgtctccattctgctttgggcgacccagcgccgaaaagccaagacttcatgaactacataggtcttaccattgacctaagatcaatctgaactatcttagcccagtcagggagctctgcttcctagaaaggcatctttcgccagtggattcgcctcaaggttgaggccgccattggaagatgaaaaattgcactcccttggtgtagacaaataccagttcccattggtgttgttgcctataataaacacttttttcttttaaaaaaaaaaaaaaaaaaaaaa

SEQ ID NO: 90 - DNA, 1030 bp, Homo sapiens
  misc_feature (225)..(225): n equals a,t,g, or c
aaagaccatcactcttggccaaccaccaatcctttatgtccttcatggagctttggaaatgttagttccacacgtgttgggaaaaaaaaatattccacagggatctttgcatgatggtgtgtaaaaacttggttgaggatgttttcttgatgacagtgtgttgctgtggtgtgatgtgcacactctacttggcagtcttgttttgtgtctgtctgccagtatgtntttctctgttttatgtctccaaatataatcacatcactaaaatagaattaaatgtcctccagctaccttaatccttgtccaaaatccaaactaaaccacaaaacaaaccaaaacaagaacaaccttgtgggcaaagattgcagtccattgcaatggattcgattggaagtgaaatgttgagtakctgaggcatggtggtggccaactgtttgggtctggattatgatatatcggtattmtctaatgcctcgacttaaaactcattcgcttggttcgwttcttcgcttgaagaagtgacaattgttgagagcttgctcctccacccctgtgccttgtcactcaccctctcttttgcataggcttaaatcaagtgatgcttacaaaaaagcctggggcaataatcaggacggagtggtggccagccagcctgctcgtgtagtggacgaacgggagcagatggccatcagtggcggcttcatccgcagggtaacaaatgatgcccgagaaaatgaaatggatgaaaacctagagcaggtgagcggcatcatcgggaacctccgtcacatggccctggatatgggcaatgagatcgatacacagaatcgccagatcgacaggatcatggagaaggctgattccaacaaaaccagaattgatgaggccaaccaacgtgcaacaaagatgctgggaagtggttaaagtgtgcccacccgkgtctcctycaaatgctgkcgggcaagatagctccttcatgcttttctcatgggattatctagtaggkctggacacataamacmccattaag

SEQ ID NO: 91 - DNA, 2659 bp, Homo sapiens
ccacgcgtccggacccttgctattggtgatggtgccaatgatgttagcatgatacaagtggcagacattgggataggggtctcaggtcaagaaggcatgcaggctgtgatggccagtgactttgccgtttctcagttcaaacatctcagcaagctccttcttgtccatggacactggtgttatacacggcctttccaacatgattctctattttttctataagaatgtggcctatgtgaacctccttttctggtaccagttcttttgtggattttcaggaacatccatgactgattactgggttttgatcttcttcaacctcctcttcacatctgcccctcctgtcatttatggtgttttggagaaagatgtgtctgcagagaccctcatgcaactgcctgaactttacagaagtggtcagaaatcagaggcatacttaccccataccttctggatcaccttattggatgctttttatcaaagcctggtctgcttctttgtgccttattttacctaccagggctcagatactgacatctttgcatttggaaaccccctgaacacagccgctctgttatcgttctcctccatctggtcattgaaagcaagagtttgacttggattcacttgctggtcatcattggtagcatcttgtcttattttttatttgccatagtttttggagccatgtgtgtaacttgcaacccaccatccaacccttactggattatgcaggagcacatgctggatccagtattctacttagtttgtatcctcacgacgtccattgctcttctgcccaggtttgtatacagagttcttcagggatccctgtttccatctccaattctgagagctaagcactttgacagactaactccagaggagaggactaaagctctcaagaagtggagaggggctggaaagatgaatcaagtgacatcaaagtatgctaaccaatcagctggcaagtcaggaagaagacccatgcctggcccttctgctgtatttgcaatgaagtcagcaagttcctgtgctattgagcaaggaaacttatctctgtgtgaaactgctttagatcaaggctactctgaaactaaggcctttgagatggctggaccctccaaaggtaaagaaagctagataccctccttggagttgcaagtattctttcaaggttggaagagggattttgaagaggtatctctccaagcaagaatgacttgtttttccataagggacatgagcattttactaggcttggaagagctgacatgatgagcattattgtatgtttgtatatacatttgtgatagagggctagagtttgacctagagagagtttaaggaagtgaaatatttaattcagaaccaaatgcttttgtaaaactttttggattttgtaaaagcattttcattctcttagaaattcaagtattttcaaggggagtcatttgagatatatttattttactaggagatcttatattctagggaaatgctttaaatggtcaggctccagtcggaatttttttaagaaaaaagtagtttttaatacattggttaggactcagaggaaatacggaaaaaacattgtagatggttaatttacagataaaatcccaagagccttttaaacaacaaggtacctaaaatagggtataattatactgcttaaaatacagttagtgcctattaatagctttttatttcctatgggaagatgcttttggtcttctggctgaagatgtaggcatacctctcactcatttcatgttttcctgaggtggagccttcattggaaaggggaaagagggattctagggtttcatcagggaccaggaatgcattcctctgtcaggttccaatcaagagaagaccttttatgagatctgcctctgtatagatgttgtcagttaggaaactgaagccataggtcaggcagacatcagctcagcctgtggcccattgggtgatttcctgtattttaaaactgacagtagcctgatcaaagtgatacaatcaatttcaaaacaatcttccagagaccacttgaaggttcatagtttttacaataccctgagacttttcaggtgttggagcctctaaaatatgagatataaacagaaactaatacaagttgttctctggaggtttctatgaggttcttagaaaaatttggttttaaaatcatttgaggacaggaatgtctatagcaagtttactcctattgcgaatcatgtatgctggctttagttgtaacaaacgattttattctaagtaaggccaggtgctactataaaatcatatattcctgttgaagttcttttgaagtcctatctctatttattatatttgaaagttgtcagccaccagtcatccagaatttccttcctgaatctccatgctcatatgcaatgtctacatcaaggtcttcttaatgactattattctcagggtttagttttctaccttctgcctactattttggtctgacatttttgtagccttctgttattattggaaatagtctcttacataagctgatttcgagaactttcaaaatctcacatagctaatggaagttgctttctgctttcttatgactgtttttataaataaactgtttcataaataatgtaaaaaaaaaaaaaaaaaa

SEQ ID NO: 92 - DNA, 1716 bp, Homo sapiens
gaattcccgggtcgacccacgcgtccgcaagcaacagacttgatccagcagtgtcgaattccaagcaagttatgatgattcttattgtagttcaagtacagatgagtaagtggtgtgacttcagtttattatcttcttggtgacctactttagtatgtgttctgtagcgattcatattagttaagggacgttttcaatatgcttgaaataagaaatagcattttactctaaatacaagaaatgactgtacacaaatgctaatcagtgatttggggccttttaatgtctttaacagcaatcttttatttatttatttatttatttttgagacggagtcttgctgtgtcaccaggctggagcagtggcacgatctcgcctcactgcaacctccgcctcccaggttcaagctattctcctgcctcagcctcccaagtaactgggactgcaggcacatgccaccacatccagctaatttttgtatttttagtagagacggggtttcaccttgttggccaggatgatctcgatctcttgatctcgtgatctgcccgcattggcctcctgaagtgctgggattacaggcatgagccactgcgcccggcccaaatcttttattttttaacagccttagttatttataattcaaatgcactaaaatatcatcgctgtcatgaactttgctgtttacaggttctgtgtaattcagaatgctttgtacttagaaaataatttctaggcttatcttgttttgcagttttcatgttttgacaattgcccaccatttacaatactcaatttttgattatgaaatgaatagtaaaattcaaacatatctaataataatttgccttagtttgattaataaattatatcaaaaaacttggggatagaaagaggcttttttttccccctgtagtatttttaaaactttttagatgagctggatgaaaccttagtacattggagctggagttgtattgagtacagccccaactctgaagccttatattcatgtcttaagtaccattgattgttctgtgaattgttgttagtttcatatttgacattgtagtaatccaccttgcattttagtctttgcaaaaaggatattgctaggtatattcttatttctgattgagtattgaatttacatttttcagaatttcattctttgtcattataatccaaaaacaatgtccacatcagacttggaacttctcacttcaaaaatgaaatacagatttagcagtgttgtacataatgatgtccaagcatttttccacctgtttactgagttttccaaccatttactatgtgttgagattggtgggttttctggctgtttttctgaggtgaatgacttgttacagagcctcagtaagaaatttcaactaaaatcacaaaaacataaagtccaggaaaccaccagaagatggatttttagtgtttttgaaatcttgtatttccttttgatatcatttactcattttaattttacgactgccaacttgttacggtattaattatatgtatgtgtttatatgtatgcatataatatatgtatatgtatatgaagaataaagttaagatttggtcaaactatattttcccattcaagtacaaaaatgttttcaaggctgcaaaaagtgtacagttgttaaacaagttgtaaataaagacttgtataaaaattcaaaaaaaaaaaaaaaaaaaaaa

SEQ ID NO: 93 - DNA, 872 bp, Homo sapiens
ggcacgagctccacgaggctgccggcttaggacccccagctccgacatgtcgccctctggtcgcctgtgtcttctcaccatcgttggcctgattctccccaccagaggacagacgttgaaagataccacgtccagttcttcagcagactcaactatcatggacattcaggtcccgacacgagccccagatgcagtctacacagaactccagcccacctctccaaccccaacctggcctgctgatgaaacaccacaaccccagacccagacccagcaactggaaggaacggatgggcctctagtgacagatccagagacacacaagaccaccaaagcagctcatcccactgatgacaccacgacgctctctgagagaccatccccaagcacagacgtccagacagacccccagaccctcaagccatctggttttcatgaggatgaccccttcttctatgatgaacacaccctccggaaacgggggctgttggtcgcagctgtgctgttcatcacaggcatcatcatcctcaccagtggcaagtgcaggcagctgtcccggttatgccggaatcattgcaggtgagtccatcagaaacaggagctgacaacctgctgggcacccgaagaccaagccccctgccagctcaccgtgcccagcctcctgcatcccctcgaagagcctggccagagagggaagacacagatgatgaagctggagccagggctgccggtccgagtctcctacctcccccaaccctgcccgcccctgaaggctacctggcgccttgggggctgtccctcaagttatctcctctgctaagacaaaaagtaaagcactgtggtctttgcaaaaaaaaaaaaaaaaaaaaaaa

SEQ ID NO: 94 - DNA, 835 bp, Homo sapiens
ggcacgaggccgagtactgcatcgcccgcatggcgccataccagggccctgacgccgtgcccggtgccctcgactacaagtccttctccacggccttgtatggcgagagcgacctgtgaggccccagagacctgacccaacacccccgacggcctccaggaggggcctgggcagccccacagtcccattcctccactctgtatctatgcaaagcactctctgcagtcctccggggtgggtgggtgggcagggaggggctggggcaggctctctcctctctctctttgtgggttggccaggaggttcccccgaccaggttggggagacttggggccagcgcttctggtctggtaaatatgtatgatgtgttgtgcttttttaaccaaggaggggccagtggattcccacagcacaaccggtcccttccatgccctgggatgcctcaccacacccaggtctcttcctttgctctgaggtcccttcaaggcctccccaatccaggccaaagccccatgtgccttgtccaggaactgcctgggccatgcgaggggccagcagagggcgccaccaccacctgacggctggggacccacccagcccctctcccctctctgctccagactcacttgccattgccaggagatggccccaacaagcaccccgcttttgcagcagaggagctgagttggcagaccgggcccccctgaaccgcaccccatcccaccagccccggccttgctttgtctggcctcacgtgtctcagattttctaagaaccaaaaaaaaaaaaggaaaaaaaacacaaaacaacaaaaaccaaaaaaaaaaaaaaaaaa

SEQ ID NO: 95 - DNA, 434 bp, Homo sapiens
ggcacgagcagaggcttatgaagatattcagatactcttctatgccaggaagcacaaagactttgttgagatttgcctcagttcagtagatcttccttggcagccagccataggttgtttctttgtcttccgggtcctaaagagcacagagaaaatggaggtccccagtctaggtaggaagctgattggatgaggacttctttttttccgacagcaggatggggctcttgggctccacacaccagatgctttggttttctacaactgttgctatgtgtagagggtgctcagagcgtggcatgagagcaaggagaccatggctactctttgaaatggatggggaaaattagcttaaaaatttaatcacgagattgcgccactgcactccagcctgggcgacagagccagactccgtctcaaaaaaaaaaaaaaaa

SEQ ID NO: 96 - DNA, 1930 bp, Homo sapiens
cagactggtaccgccaccatgagggtgctttgtgccttccctgaagccatgccctccagcaactcccgcccccccgcgtgcctagccccgggggctctctacttggctctgttgctccatctctccctttcctcccaggctggagacaggagacccttgcctgtagacagagctgcaggtttgaaggaaaagaccctgattctacttgatgtgagcaccaagaacccagtcaggacagtcaatgagaacttcctctctctgcagctggatccgtccatcattcatgatggctggctcgatttcctaagctccaagcgcttggtgaccctggcccggggactttcgcccgcctttctgcgcttcgggggcaaaaggaccgacttcctgcagttccagaacctgaggaacccggcgaaaagccgcgggggcccgggcccggattactatctcaaaaactatgaggatgagccaaataactatcggaccatgcatggccgggcagtaaatggcagccagttgggaaaggattacatccagctgaagagcctgttgcagcccatccggatttattccagagccagcttatatggccctaatattgggcggccgaggaagaatgtcatcgccctcctagatggattcatgaaggtggcaggaagtacagtagatgcagttacctggcaacattgctacattgatggccgggtggtcaaggtgatggacttcctgaaaactcgcctgttagacacactctctgaccagattaggaaaattcagaaagtggttaatacatacactccaggaaagaagatttggcttgaaggtgtggtgaccacctcagctggaggcacaaacaatctatccgattcctatgctgcaggattcttatggttgaacactttaggaatgctggccaatcagggcattgatgtcgtgatacggcactcattttttgaccatggatacaatcacctcgtggaccagaattttaacccattaccagactactggctctctctcctctacaagcgcctgatcggccccaaagtcttggctgtgcatgtggctgggctccagcggaagccacggcctggccgagtgatccgggacaaactaaggatttatgctcactgcacaaaccaccacaaccacaactacgttcgtgggtccattacactttttatcatcaacttgcatcgatcaagaaagaaaatcaagctggctgggactctcagagacaagctggttcaccagtacctgctgcagccctatgggcaggagggcctaaagtccaagtcagtgcaactgaatggccagcccttagtgatggtggacgacgggaccctcccagaattgaagccccgcccccttcgggccggccggacattggtcatccctccagtcaccatgggcttttttgtggtcaagaatgtcaatgctttggcctgccgctaccgataagctatcctcacactcatggctaccagtgggcctgctgggctgcttccactcctccactccagtagtatcctctgttttcagacatcctagcaaccagcccctgctgccccatcctgctggaatcaacacagacttgctctccaaagagactaaatgtcatagcgtgatcttagcctaggtaggccacatccatcccaaaggaaaatgtagacatcacctgtacctatataaggataaaggcatgtgtatagagcagaatgtttcccttcatgtgcactatgaaaacgagctgacagcacactcccaggagaaatgtttccagacaactccccatgatcctgtcacacagcattataaccacaaatccaaaccttagcctgctgctgctgctgccctcagaggaagatgaggaaggaaaaaaactgggtggacctaaaaaaacccatcctctcccaaaaaaaaaaaaaaa

SEQ ID NO: 97 - DNA, 498 bp, Homo sapiens
acgcgtccgcggacggtgggagtcaccgttttctcactgtatcttcatatgactgagaacagcaaaagagaaagaagctctgccctgtctctgggcactaatcccacgaatgaggtctacacactcatacctaattaccacccaaggccccttcaaatgccatcatattgtggataaggcttcaatatataagttttgagggcatgtacatatttagtttatagcagagactaaattttctttccttttagtaaaaagggacattttcttaaaatgttttgtggttgtttgtggtgttttgtgtgtgtgtgtgtgtgtatcagagagtgtgtttgtgtggcatgtgttttgtggaatagatgtaataattattactttagaatataatgcaaagatgaaaatattccagtgctttttttgaccagtgcctttttttgactatgtaaaaaataatttatttctgcctgaggatcactctgcaaacacaaaagaaagggc

SEQ ID NO: 98 - DNA, 1077 bp, Homo sapiens
  misc_feature (43)..(43): n equals a,t,g, or c
  misc_feature (906)..(906): n equals a,t,g, or c
  misc_feature (914)..(914): n equals a,t,g, or c
  misc_feature (989)..(989): n equals a,t,g, or c
  misc_feature (1020)..(1020): n equals a,t,g, or c
  misc_feature (1022)..(1022): n equals a,t,g, or c
  misc_feature (1055)..(1055): n equals a,t,g, or c
ctagtttaggtgacactatagaaggtacgcctgcaggtaccgngtccggaattcccgggtcgacccacgcgtccgctcacatcccgaaacttggcagycagaatcttccagcgctccccgaaggggatgcccccattcgggagtgatcggaggccacctgctccctgaagccactgctgtctgcaaagatgagaaaccgctgataaatttttgtgttcgtatctgtgctgtgaccagccaccctggtctatgaaaccctgttgctatgagataatgcttcatgtctattatatattgatatatctctctatatattgtttgtgaagtaccttcctttgaagttttggtttctttgtgttggaatttggttttttaatttggttcttttgttttcttttcatttgggggaaaaaaatcaacagagggaaaagaaccagccctgtttatatttaaatggttttcctttttttttctttttttctttctttccttctttctttcttccttcctgcttttctttttctcctccgcatcctgtcttcccctcccaacctcaccccacctcacccctcgcatctccctcccgccgccactgccgccccctccccagtccgccgcgtggccccgcgcttctccatcctgcccatgagccacgagatcatgccagggggcaacgtgaacatcacctgcgtggccgtgggctcgcccatgccatacgtgaagtggatgcagggggccgaggacctgacccccgaggatgacatgcccgtgggtcggaacgtgctggaactcacagatgtcaaggactcggccaactacacctgcgtggccatgtccagcctgggcgtcattgaggcggttgctcagatcacggtgaaatgtgagcagggcccatggggctcgtangtggaggngcaggctggagtcgatccccgacttcaggcacaggtgggaggcaaccgtgggagcaccttcgagttaccctcttngctttaagcattcatggctaggaaggggacngntgttcttttaacaggcattattaatgggttatnaatgaatcctggcttggcccaa

SEQ ID NO: 99 - DNA, 1245 bp, Homo sapiens
ggcacgaggcgctgtccatgtcgcgggcctcgctgggactccctgggagatgaggccgcgaggtctcccgccgctcctggtggtgctcctgggctgctgggcctccgtgagcgcccagaccgatgccaccccggcggtgacgacagagggcctcaactccaccgaggcagccctggccaccttcggaactttcccgtcgaccaggccccccgggactcccagggctccagggccctcctccggccccaggcctaccccagtcacggacgttgctgttctctgtgtctgtgacttatccccagcacagtgtgacatcaactgctgctgtgatcccgactgcagctccgtggatttcagtgtcttttctgcctgctcagttccagttgtcacgggcgacagccagttttgtagtcaaaaagcagtcatctattcattgaattttacagcaaacccacctcaaagagtatttgaacttgttgaccagattaatccatctattttctgcattcatattacaaactataaacctgcattatcctttattaatccagaagtacctgatgaaaacaattttgatacattgatgaaaacatctgatggttttacattgaatgctgaatcatatgtttccttcacaaccaaactggatattcctactgctgctaaatatgagtatggggttcctctgcagacttcagattcgtttctgagatttccttcgtccctgacatcatctctgtgcactgataataaccctgcagcgtttctggtgaaccaggctgttaagtgcaccagaaaaataaatttagaacagtgtgaagaaattgaagccctcagcatggctttttacagcagcccggaaattctgagggtacctgattcaagaaaaaaggtccctatcactgttcagtccatcgtcattcagtctctaaataaaacgctcacccgacgggaggacactgatgtgctgcagccgactctcgtcaacgctggacactttagcctttgcgtgaatgttgttcttgaggattcctgccagctcccaggggctttggttatagaagtgaagtggactaaatacggatccctgctgaatccacaggccaaaatagtcaatgtaactgcaaatctaatttcatcctcctttcctgagaatgctcagatgcatcagttccttaatatacacgtgaaatttgaaaactgtacattcggtgagattaaattttatatacaactagctaaaaa

SEQ ID NO: 100 - DNA, 730 bp, Homo sapiens
ggcagagggcagagggcggacggcgccggagcgggcgtcatggcgcggctcctctggttgctccggggcctgaccctcggaactgcgcctcggcgggcggtgcggggccaagcgggcggcggcgggcccggcaccgggccgggactgggggaggcagggtctcttgcaacgtgtgagctgcctcttgccaagagtgagtggcaaaagaaactaaccccggagcagttctacgtcacaagagaaaagggaacggaaccgcctttcagtgggatctacctgaataacaaggaagcaggaatgtatcattgcgtgtgctgcgacagtccactcttcagttctgagaaaaagtactgctctggcactgggtggccttcgttttcygaggctcatggtacgtctggctctgatgaaagccacacagggatcctgagacgtctggatacctcgttaggatcagctcgcacagaggttgtctgcaagcagtgtgaagctcatctaggtcacgtgtttcctgatggacctgggcccaatggtcagaggttttgcatcaacagtgtggctttgaagttcaaaccaaggaaacactgaccatcttcaagagtcccgttcccttgccaccccttcacgtgcaccctcaatttccacaattcacttgaatgacttgttttatttgcaataaaactgggctgaatttgcaaaaaaaaaaaaaaaaaaaaaaaaaaaaaaaaaa

SEQ ID NO: 101 - DNA, 471 bp, Homo sapiens
ccacgcgtccgtaataatttggatattttattttatttttggctgctcgggtaactttagcccttaaccaagcatatgtgggtttttttggttgtttttttttgtttttttttctttttcctttttgggtacagctgtaaaatatttggatataggaaatgttgtgttattcttgcagccttgatattcagggtggattgtaaaatataaatttttgtgagatttcaaagattaagattattttgataacattatttacagatttaaaagatgtggttatcacaagtctcgagggggaaactactgcataaaataactaacttggaataaatattttgcatcagtaaaaaaaaaaaaaaaaaaaaaaaaaaaaaaaaaaaaaaaaaaaaaaaaaaaaaaaaaaaaaaaaaaaaaaaaaaaaaaaaaaaaaaaaaaaaaaaaaaaaaaaaaaaaaaaaaaaaaaaaaaaaaa

SEQ ID NO: 102 - DNA, 2563 bp, Homo sapiens
gaatttttgcagcacgtctcttaataagacacattgcctgatgcgctacgcttatcaggcctacaggatatctggcaacttattaaaattgcatgaacttgtaggacggataaggcgttcacgccgcatccggcaaaaaagcccgcacgttgtcagcaacctgcttaatatcccttcctccctttcacccgaaagggaggcacaccagattcctctcatttaaaatcgcccctcctccagcatctatacttatctttttgctctattttctcactggaggagtcatgcggtggatcctgttcatcctcttctgcctgctgggcgcacctgcccacgcggtatccatacccggcgttacaaccacaacgacaacggactcaacgactgaaccggccccggaaccggatatcgaacaaaaaaaagcggcctatggcgcactggcggatgtgctggataatgacacctcgcgtaaagagttgatcgaccagttgcgcaccgttgccgctacgccccctgctgaaccggtaccaaaaatagtgccgccgacgctggtcgaagagcaaaccgtgctgcaaaaggtcaccgaagtcagccgccattatggtgaagccctttccgcccgcttcgggcaactttatcgcaatatcaccggctccccgcataagccgtttaatccacaaaccttcagcaatgcgctgacccatttttcaatgttagcggtattagtgtttggtttttactggctgattcgcctgtgcgcactgccgctgtatcgcaaaatgggtcagtgggcgcggcaaaaaaatcgtgagcgcagcaactggttgcagcttccggcgatgattatcggggcgtttattatcgacctgctgttactggccctgacattatttgtcggccaggtattaagcgacaacctgaatgcaggcagtcgcaccatcgctttccaacaaagtttgtttctcaacgcctttgccctcattgaatttttcaaagccgtactacgcctgattttttgcccaaacgtggcggagctgcgcccgttcacgattcaggacgagagcgcccgttactggagtcgtcgcctgagctggttaagcagtttgataggttatggcctgattgtggccgtgccgattatctctaatcaggtgaatgtacagataggtgcgctggcgaacgtcatcattatgctgtgcatgaccgtctgggcgttgtacctgatctttcgtaataaaaaagagattacccagcatttgctcaacttcgcggagcattcgctggcctttttcagcctgtttatctgcgcccggatgtagtagcgcatatttccgaccatgtgttctatgccaacgccaataaagcagccacgccgctggtgagtgcggaagtccgtgagaacccaggtatttatccgcctgcggatgttcgtgcgaagctgttcactctgaaagtgcaggatccgaaaatcgaccgtgtgcgcacccgcgcgtggaccaaagtgaagagcggaaaataatccgcagtcgtagatgccggaggggcgcaccacacccgccggcaattcgcaccattatggtgcgcttgcacacattcaatgccggagagcagccgtgaatgacgctatccctcgcccgcaggcgaaaacccgtaaggcgctgacgccgctattagaaatccgcaacctgaccaaatcctacgatggtcaacatgcggtggatgatgtcagcctgaccatctacaaaggtgaaatcttcgcgctgctgggcgcatccggctgtggcaagtccacgctgctgcgtatgctggcaggtttcgaacaaccttctgccggacagataatgcttgatggcgtcgatttgtcacaggttccgccttacctgcgccccatcaatatgatgtttcagtcttacgcgctgtttccgcatatgaccgtggaacagaacatcgcttttggcctgaaacaggacaaactaccgaaagcggaaattgccagccgggtcaatgagatgctcggcctggtgcatatgcaggagttcgccaaacgcaaaccgcatcagctttccggtggtcagcgacaacgtgtggccctggcccgaagccttgcgaagcgcccgaaactattactgctcgatgagccgatgggcgcgctggataaaaagctgcgtgacaggatgcagcttgaagtggtggatattctggagcgcgtcggtgtgacttgtgtgatggtcacccacgatcaggaagaggcgatgaccatggcggggcgcatcgccattatgaatcgtgggaaatttgtccagattggcgaaccggaagagatctacgagcatccgactacccgctatagcgccgaatttattggctcggtaaacgtctttgaaggcgtactcaaagagcgtcaggaagatggcctggtgcttgattcgccggggctggtgcatccactgaaagtcgacgcggatgcctcggtggtcgataacgtgccggtacatgtggcgctgcgcccggaaaaaatcatgctttgcgaagagccgcccgccaatggttgtaacttcgcggt

SEQ ID NO: 103 - DNA, 1270 bp, Homo sapiens
gggcgctgagagcagccgtagcagtgaggagagctcttcggactcaggcagctcggactcggaggaggagcgggccaccaggctggcggagctgcaggagcagcaagcgggaagaaacaggcagccaagtcgaaagaggagctagctcaggaaaagaagaaggagctggaaaagcgtctgcaggatgtcagcgggcagctgagcagcagcaagaagcccgcccggaaagagaagcccggctcagcaccctcagggggcccgtccaggctcagcagcagcagctcctccgagtctgggagcagcagctccagcgggtccagctctgacagcagtgactcagaatgaactggcttcggacagaacaggacagatggatgtcgcacacgccgagactctgccgtacccctctgtggttcatattactacttcygttccatggtgtgcaggtctgcttcttaattcagtgttatgatatcttccagtttttgctttcataggtcagagatctatcttgtgtgtgcgttagacttgatgagaaggtgtgaactctgcagaaagtctcttcttcatcactgaattcagtcacttggagatgacaacttcaaatgctaacccgatgaccccagaaaaccgtgtgagattcgtaccgaagaaccttgtggaatccctttgcttaggcccaacctggtcgatagctcgagaaagaattttttccaaggaaatgtctcggatatgggtactgtatttgaaagctgttagctttgtcaacacgcattgtccttgtcatttgggccccgagctctgaccctcgtgtctgacgcggccacctctttctggaggggctgaggacagatgtgcctgcttgtggagaccaggctgggcctaagcgaagggtcatcgcagccccagcccggagcgtggagcccttggggggtggtcgggtgggatgtgcgttctccgctcgtggtgatgtcaggagctcctcggagggaacagagcggctgtgtatgcagcctgcaggtttccatacactgaagcttttacctcaactttaaaaaaaaaaaaagaagaaaagatttaaaaaaaaaaaaaaaggagactttttttgtaaggttcggcaattttctacggaagtccagcccgctgtgagtccccgcctggtagcgctgcccctgctgctstgccgcgccacccttgggaaccacttcccgagcttatgtgtatataaatagttatttattaacatcattggtcatttttaaaaaaaaaa

SEQ ID NO: 104 - DNA, 1583 bp, Homo sapiens
  misc_feature (1561)..(1561): n equals a,t,g, or c
ccgaggcagtcgggctcggcgccgggggcgggagggggcggrgggagcacgccagccgccgagagtggggggcgatggcgaagctccgggtggcttacgagtacacggaagccgaggacaagagcatccggctcggcttgtttctcatcatctccggcgtcgtgtcgctcttcatcttcggcttctgctggctgagtcccgcgctgcaggatctgcaagccacggaggccaattgcacggtgctgtcggtgcagcagatcggcgaggtgttcgagtgcaccttcacctgtggcgccgactgcaggggcacctcgcagtacccctgcgtccaggtctacgtgaacaactctgagtccaactctagggcgctgctgcacagcgacgagcaccagctcctgaccaaccccaagtgctcctatatccctccctgtaagagagaaaatcagaagaatttggaaagtgtcatgaattggcaacagtactggaaagatgagattggttcccagccatttacttgctattttaatcaacatcaaagaccagatgatgtgcttctgcatcgcactcatgatgagattgtcctcctgcattgcttcctctggcccctggtgacatttgtggtgggcgttctcattgtggtcctgaccatctgtgccaagagcttggcggtcaaggcggaagccatgaagaagcgcaagttctcttaaaggggaaggaggcttgtagaaagcaaagtacagaagctgtactcatcggcacgcgtccacctgcggaacctgtgtttcctggcgcaggagatggacagggccacgacagggctctgagaggctcatccctcagtggcaacagaaacaggcacaactggaagacttggaacctcaaagcttgtattccatctgctgtagcaatggctaaagggtcaagatcttagctgtatggagtaactatttcagaaaaccctataagaagttcattttctttcaaaagtaacagtatattatttgtacagtgtagtatacaaaccattatgatttatgctacttaaaaatattaaaatagagtggtctgtgttattttctatttccttttttatgcttagaacaccagggtttaaaaaaaaaaaaaaggtgaggacatctgggtctcatttgcttctgctaggttaaacttttacttgacaacaaggattcctgctgaagtctgaaccttactgtgtaaccctcagtttccactattaaagagtatcttttgacgtctgcttggaaaatgaatagtatactggtaactcagtctccagtcacctctgtgtctcttaagcaagagattctaaaagattgggaaaacatatcctccaamacctgcctttgcctaaccattatttttcaccagattacttcttaagagagggaggtgattctgaagaaggcttctatctcaaaaagcactgggcttccttattcatctgttcttgttgtttttgacggagttaaaaaagtttgtgtgcaatacaatataaatgatgtgaaggacactcttaaaaaaaaaaaaaaaaaaaaaaatngctgcggccgacaagggaattc

SEQ ID NO: 105 - DNA, 1047 bp, Homo sapiens
  misc_feature (255)..(255): n equals a,t,g, or c
attttrattcctcctcctgctgcccatctataccaagcccagaaactgtctggaatatattttagtttcctgaatgacaccaagaagtagaacagtcttttcaaaaatgtattttaaaaataagctgaatctcaagaatctgatctatagtataatgaaaactgaaaagtgaagtagtcattgggatactctactgtctcacttaattctcacggcttccctgcaggtgggtaaaattgttcctacagatagtcnaattgagttttacagtyagaaaatgattgggctaggatttgagccaatgtctgtcagattcctgagtttctgctacttctactaaaatatgctgcttcttgtgtgtccggtcttctgtttgggacaagcagatgatatccctaacaaaatcaattttctttattattattctcttttaccttttgtttcccaggcagtacaagtcccagtttgaagctcaaaagatctggtatgagcataggctcatcgacgacatggtggcccaagctatgaaatcagagggaggcttcatctgggcctgtaaaaactatgatggtgacgtgcagtcggactctgtggcccaaggtacagaggtggagcctggcctgtaggaacagggtcattccagggtagttctctaatttgggaaggggagttttgtagtcctttgttgtaaaatcttggaatgttaaacctccaggtccaccgtcttacctgacagctaaggaaattaagctcagactagagaaatgatttactcaagaccacatgggaagtaaattagtggattgacactcctggctccagtgtcactccttgaagttttaaagcctacctgatctgaaaatcactccctttccctgccctccttgtcctttggtgaaaatgtaaaaaaccagggcactcaggcaaggagggataaagtgaggagcttgatcatgtcataaccaagctttggtgcctgcaaagctcatttattgggcagcaggacctactcatgtccctctgccagctgctgttctggtagaatat

SEQ ID NO: 106 - DNA, 559 bp, Homo sapiens
gaattcggcacgaggacattttgatatacattgacccttgaacaacacaggggtttggggtggtgaccccccacacagtcaaaaatctctgtttaacttttgactccccgaaaacttagctactaatagcctaatgttgatcagaagccttactgataacataaacagttaatgaacagatattttatatgtattactgttttttgttttttgttttttgtttttttgagacggggtctcactctgtcacccaggctggagtgcagtggtgtgatctcggctcactgcaacctccgccctctgagttcaagtgattctcctgcctcagcttcccaagtagctgggattacaggcaccagccactgcaccaggctaattttttgtattttttcagtagagacgggttttcaccatcttggccaggctggtcttgaactcctgaccttgtgatccgcccgcctcagcctcccaaagtgctgggattacaggtgtgagccaccgcgcccggcctacatactgtattcttacaataaactagaaaaaaaaaaaaaaaaaaaaa

SEQ ID NO: 107 - DNA, 2361 bp, Homo sapiens
  misc_feature (15)..(15): n equals a,t,g, or c
  misc_feature (28)..(28): n equals a,t,g, or c
  misc_feature (30)..(30): n equals a,t,g, or c
  misc_feature (40)..(40): n equals a,t,g, or c
  misc_feature (2357)..(2357): n equals a,t,g, or c
ccgaacgaccaagcncagcgagtcagtnancgagaagcgnaagagcgcccaatacgcaaaccgcctctccccgcgcgttggccgattcattaatgcagctggcacgacaggtttcccgactggaaagcgggcagtgagcgcaacgcaattaatgtgagttagctcactcattaggcaccccaggctttacactttatgcttccggctcgtatgttgtgtggaattgtgagcggataacaatttcacacaggaaacagctatgaccatgattacgccaagctcgamattaaccctcactaaagggaacaaaagctggagctccaccgcggtggcggccgctctagaactagtggatcccccgggctgcaggaattcggcacgaggttttccacagctctcatttctccaaaaatgtgtttgagccacttggaaaatatgcctttaagccattcaagaactcaaggagctcagagatcatcctggaagctgtggctcttttgctcaatagttatgttgctatttctttgctccttcagttggctaatctttatttttctccaattagagactgctaaggagccctgtatggctaagtttggaccattaccctcaaaatggcaaatggcatcttctgaacctccttgcgtgaataaggtgtctgactggaagctggagatacttcagaatggcttatatttaatttatggccaagtggctcccaatgcaaactacaatgatgtagctccttttgaggtgcggctgtataaaaacaaagacatgatacaaactctaacaaacaaatctaaaatccaaaatgtaggagggacttatgaattgcatgttggggacaccatagacttgatattcaactctgagcatcaggttctaaaaaataatacatactggggtatcattttactagcaaatccccaattcatctcctagagacttgatttgatctcctcattcccttcagcacatgtagaggtgccagtgggtggattggagggagaagatattcaatttctagagtttgtctgtctacaaaaatcaacacaaacagaactcctctgcacgtgaattttcatctatcatgcctatctgaaagagactcaggggaagagccaaagacttttggttggatctgcagagatacttcattaatccatgataaaacaaatatggatgacagaggacatgtgcttttcaaagaatctttatctaattcttgaattcatgagtggaaaaatggagttctattcccatggaagatttacctggtatgcaaaaaggatctggggcagtagcctggctttgttctcatattcttgggctgctgtaattcattcttctcatactcccatcttctgagaccctcccaataaaaagtagactgataggatggccacagatatgcctaccataccctactttagatatggtggtgttagaagataaagaacaatctgagaactattggaatagaggtacaagtggcataaaatggaatgtacgctatctggaaatttctcttggttttatcttcctcaggatgcagggtgctttaaaaagccttatcaaaggagtcattccgaaccctcacgtagagctttgtgagamcttactgttggtgtgtgtgtctaaacattgctaattgtaaagaaagagtaaccattagtaatcattaggtttaaccccagaatggtattatcattactggattatgtcatgtaatgatttagtatttttagctagctttccacagtttgcaaagtgctttcgtaaaacagttagcaattctatgaagttaattgggcaggcatttgggggaaaattttagtgatgagaatgtgatagcatagcatagccaactttcctcaactcataggacaagtgactacaagaggcaatgggtagtcccctgcattgcactgtctcagctttagaattgttatttctgctatcgtgttataagactctaaaacttagcgaattcacttttcaggaagcatattcccctttagcccaaggtgagcagagtgaagctacaacagatctttcctttaccagcacacttttttttttttcctgcctgaatcagggagatccaggatgctgttcaggccttatcccaaccaaattcccctcttcactttgcagggcccatcttagtcaaatgtgctaacttctaaaataataaatagcactaattcaaaatttttggactcttaaattagctacttgcaggttcttggtgaaaggtatataatattacattgtaaacaaatttaaaatatttatggatatttgggaaaagctgcattatgttaaataatattacatgtaaagctaaaaanaaaa

SEQ ID NO: 108 - DNA, 516 bp, Homo sapiens
ggcacgagcggcacgagcggcacgaggcaatatttgttatgaatgttatcacaagtcattcatcaagttatctttataatcactgtagttagatgtttcatgtccattcaagtgacttttattctgagtgcaatatttcaatagccttgtagtgataactagtgttgcttttgttttagatgatctatgtgcagggcaatgcaatgaagttgaaaacccttgtaaataggagaggttgcaaaccaaatcaagagtatttattactattactgctattattattaggcctgcctttaattttcagtgtaagtgttcagtatgccgcatcctgcctcagtattgatcttgtgttctttgtgccaatatgaaaaggagagggttggttctttcctttattgttgaatgctcccatttaatgctttatggcttttactgtattacttttttagactcccgtctgcacaaaatgcaataaaaataattttattatacccttaaaaaaaaaaaaaaaaaaaa

SEQ ID NO: 109 - DNA, 2843 bp, Homo sapiens
  misc_feature (2843)..(2843): n equals a,t,g, or c
ccacgcgtccgggcggccgagccccagctctccgagcaccgggtcggaagccgcgacccgagccgcgcaggaagctgggaccggaacctcggcggacccggccccacccaactcacctgcgcaggtcaccagcaccctcggaacccagaggcccgcgctctgaaggtgacccccctggggaggaaggcgatggcccctgcgaggacgatggcccgcgcccgcctcgccccggccggcatccctgccgtcgccttgtggcttctgtgcacgctcggcctccagggcacccaggccgggccaccgcccgcgccccctgggctgcccgcgggagccgactgcctgaacagctttaccgccggggtgcctggcttcgtgctggacaccaacgcctcggtcagcaacggagctaccttcctggagtcccccaccgtgcgccggggctgggactgcgtgcgcgcctgctgcaccacccagaactgcaacttggcgctagtggagctgcagcccgaccgcggggaggacgccatcgccgcctgcttcctcatcaactgcctctacgagcagaacttcgtgtgcaagttcgcgcccagggagggcttcatcaactacctcacgagggaagtgtaccgctcctaccgccagctgcggacccagggctttggagggtctgggatccccaaggcctgggcaggcatagacttgaaggtacaaccccaggaacccctggtgctgaaggatgtggaaaacacagattggcgcctactgcggggtgacacggatgtcagggtagagaggaaagacccaaaccaggtggaactgtggggactcaaggaaggcacctacctgttccagctgacagtgactagctcagaccacccagaggacacggccaacgtcacagtcactgtgctgtccaccaagcagacagaagactactgcctcgcatccaacaaggtgggtcgctgccggggctctttcccacgctggtactatgaccccacggagcagatctgcaagagtttcgtttatggaggctgcttgggcaacaagaacaactaccttcgggaagaagagtgcattctagcctgtcggggtgtgcaaggtgggcctttgagaggcagctctggggctcaggcgactttcccccagggcccctccatggaaaggcgccatccaggtgggctttactcccctccccatcccccatccccaccacatctctagcccatatcatccctatgcccctaagcagcctgcctttgaccaagccattcctcccctcagagtttgtggaaggaccacaaacatcccaccccttccagcccagcatcgtcctatgaggatctgcccagtttgcgtggggcaggagtggggttggtggaaagggaatgggggatgtgctgtgtctgggcagagagggccaagtagaaggtgggccctgggcacttgttctttgcttgagcctgacctcccctccacccgtccagtgtgctctggcacctgtcagctcacccagttccgctgcagcaatggctgctgcatcgacagtttcctggagtgtgacgacacccccaactgccccgacgcctccgacgaggctgcctgtgaaaaatacacgagtggctttgacgagctccagcgcatccatttccccagcgacaaagggcactgcgtggacctgccagacacaggactctgcaaggagagcatcccgcgctggtactacaaccccttcagcgaacactgcgcccgctttacctatggtggttgttatggcaacaagaacaactttgaggaagagcagcagtgcctcgagtcttgtcgcggcatctccaagaaggatgtgtttggcctgaggcgggaaatccccattcccagcacaggctctgtggagatggctgtcgcagtgttcctggtcatctgcattgtggtggtggtagccatcttgggttactgcttcttcaagaaccagagaaaggacttccacggacaccaccaccacccaccacccacccctgccagctccactgtctccactaccgaggacacggagcacctggtctataaccacaccacccggcccctctgagcctgggtctcaccggctctcacctggccctgcttcctgcttgccaaggcagaggcctgggctgggaaaaactttggaaccagactcttgcctgtttcccaggcccactgtgcctcagagaccagggctccagcccctcttggagaagtctcagctaagctcacgtcctgagaaagctcaaaggtttggaaggagcagaaaacccttgggccagaagtaccagactagatggacctgcctgcataggagtttggaggaagttggagttttgtttcctctgttcaaagctgcctgtccctaccccatggtgctaggaagaggagtggggtggtgtcagaccctggaggccccaaccctgtcctcccgagctcctcttccatgctgtgcgcccagggctgggaggaaggacttccctgtgtagtttgtgctgtaaagagttgctttttgtttatttaatgctgtggcatgggtgaagaggaggggaagaggcctgtttggcctctctatcctctcttcctcttcccccaagattgagctctctgcccttgatcagccccaccctggcctagaccagcagacagagccaggagaagctcagctgcattccgcagcccccacccccaaggttctccaacatcacagcccagcccgcccactgggtaataaaagtggtttgtggaaaaaaaaaaaaaaaaaaaaaaaaaaaaaaaaaaaaaaaaaaaaaaaaaaggaaaaaaaaaaaaaaaaaaaaaan

SEQ ID NO: 110 - DNA, 1783 bp, Homo sapiens
  misc_feature (1776)..(1777): n equals a,t,g, or c
tcgacccacgcgtccgagcggacttgctggcggcgaggccgcggcgacaaggtagccacccccgcagcatgcctcgaccgcggtccgcagctgcaccgcctctccccgccccccagggtgcgctggtcccggtcgcgcgctcagacctccgcatcccgggcgtggtcggttaagtccccggccgtgacccaggcccggggagctagtctccgcccttcgctcttacggatcccctcggagtacgccgcaccatgcagctcaggctcttccggcgcctccttctcgccgctttgctgctggtgatcgtctggaccctcttcgggccttcggggttgggggaggagctgctgagcctctcactagcctccctgctcccagcccccgcctcaccggggccgcccctggccctgccccgcctcttgatccccaaccaggaagcttgcagtggtcccggggcccctcccttcctgctcatcctggtgtgcacggctccggagaacctgaaccagagaaacgccattcgggcttcgtggggcgggctgcgcgaggcccgggggctcagggtacagacgctattcttgctgggagagccgaacgcacagcaccccgtgtggggttcccaggggagtgacctggcctcggagtcagcagcccagggggatatcttgcaggccgccttccaggactcctaccgcaacctcaccctaaagaccctcagcgggctgaactgggctgagaaacactgccccatggcccgatacgtcctcaagacggacgatgatgtgtatgtcaacgtccctgaactggtatcagagctggtcttgcgagggggccgttgggggcaatgggagagaagcacggaaccccagagagaggctgagcaggaaggaggccaggttttgcacagcgaggaagtgcctcttctgtacttgggccgggtgcactggcgcgtgaacccctctcggacaccggggggcaggcaccgcgtatcagaggagcagtggcctcacacctggggcccctttccaccctatgcctcaggcacggggtatgtgctgtcagcgtctgctgtgcagctcattctcaaggtggccagccgggcaccccttctcccattagaggatgtctttgtgggggtaagtgcccgacgaggaggcctcgccccaacacagtgtgtcaagctggctggtgccacccactacccgctagaccggtgctgctatgggaaattcctgctgacgtcccacaggctggacccctggaagatgcaggaagcctggaagctggtgggtggctctgacggggaaaggactgcgcccttttgctcctggttccagggagtcctgggcatcctgcggtgtcgagcaatagcctggcttcagagctgagagtgcctggggccacaggaaaggcaggaacaggaccttctctctcccaggcccaacgcaggggccctcactggctgcagctgatctgtttccttataccagatcctcagtctcactaaagacagcgatatgggagacacccaggggcctggcccgccagcccaaaagatggtcatcgggaagagaaaaagaaaaaaatgctgcagttgttctctcaagctagggcagaagaggggtgtcaagctcctcaataaacttgtctccacttcaaaaaaaaaaaaaaaaaaaaaaaaaaaaaaaaaaaaaaaaaaaaaaaaaaaaaaaaaaaaaaaaaaaaaaaaaaaaaaaaaaaaaaaaaaaaaaaaaaaaaaaaaaaaaaaaaaaaaannaaaaaa

SEQ ID NO: 111 - DNA, 1572 bp, Homo sapiens
tttgacgccagttcgaaattaaccctcactaaagggaacaaaagctggagctccaccgcggtggcggccgctctagaactagtggatcccccgggctgyaggaattcggcacgaggagctccgctggtgccacgtttatccccttacatcctcctargacccggtcggtagtcgtcgccccagcccgccgggggcgcagcgcccgagccgcggccctcgagacgggaccgagagcatcatgggcagcactgtcccgcgctccgcctccgtgctgcttctgctgctgctcctgcgccgggccgagcagccctgcggggccgagctcaccttcgagctgccggacaacgccaagcagtgcttccacgaggaggtggagcagggcgtgaagttctccctggattaccaggtcatcactggaggccactacgatgttgactgctatgtagaggacccccaggggaacaccatctacagagaaacgaagaagcagtacgacagcttcacgtaccgggctgaagtcaagggcgtttatcagttttgcttcagtaatgagttttccaccttctctcacaagaccgtctactttgactttcaagtgggcgatgagcctcccattctcccagacatggggaacagggtcacagctctcacccagatggagtccgcctgcgtgaccatccatgaggctctgaaaacggtgattgactcccagacgcattaccggctgcgggaggcccaggaccgggcccgagcggaagaccttaatagccgagtctcttactggtctgttggcgagacgattgccctgttcgtggtcagcttcagtcaggtgctactgttgaaaagcttcttcacagaaaaacgacccatcagcagggcagtccactcctagccccggcatcctgctctagggcccctcatgccccaggctggagcagctctcctaggtcacagcctgctgggctgggtcgcgtagcccagggtggaggcagaacgatgctgctgtggtagccctttgcctttcatgcccatgcttgattcttgcacctcagcagctgaaggtctcagagaccagtaatcagaaggcatccgactgcattaagtgtgcagcgctgaaaagacatttacaactaggccagggattagccactgtgggagggtggacaggcaatggttcagtggcctggctgttggcaggaactccaagtgcccaggcctcttgggcagcttagggccctgcctctgtttcatgatgcatgggtcatttgtcttgggtgtcctatcccatatggagaagaaaggggctctaagttctggctcttctttctttggggttctctgtacctgaggaaaccaggccctgggtgactttgcagatctgctcaccctcggtgagcaacagtgtcagccatgcaagcaggacagaatggtgactgggtgcccttggtgagctgtgtatttcctaggaggtagaaaactgtgggaaactgtggctaataaaaactaagtgtgagcgtcaaaaaaaaaaaaaaaaaaaaaaaaaaaaaaaaaaaaaaaaaaaaaaagtcgacc

SEQ ID NO: 112 - DNA, 1248 bp, Homo sapiens
ggcacgagacttgtcaagtgaattctttgcatgttcaaaacggaaaccattgattagaactacattctttaccccttgttttaatttgaaccccaccatatggatttttttccttaagaaaatctccttttaggagatcatggtgtcacagtgtttggttcttttgttttgttttttaacacttgtctcccctcatacacaaaagtacaatatgaagccttcatttaatctctgcagttcatctcatttcaaatgtttatggaagaagcacttcattgaaagtagtgctgtaaatattctgccataggaatactgtctacatgctttctcattcaagaattcgtcatcacgcatcacaggccgcgtctttgacggtgggtgtcccatttttatccgctactctttatttcatggagtcgtatcaacgctatgaacgcaaggctgtgatatggaaccagaaggctgtctgaacttttgaaaccttgtgtgggattgatggtggtgccgaggcatgaaaggctagtatgagcgagaaaaggagagagcgcgtgcagagacttggtggtgcataatggatattttttaacttggcgagatgtgtctctcaatcctgtggctttggtgagagagtgtgcagagagcaatgatagcaaataatgtacgaatgttttttgcattcaaaggacatccacatctgttggaagacttttaagtgagtttttgttcttagataacccacattagatgaatgtgttaagtgaaatgatacttgtactccccctacccctttgtcaactgctgtgaatgctgtatggtgtgtgttctcttctgttactgatatgtaagtgtggcaatgtgaactgaagctgatgggctgagaacatggactgagcttgtggtgtgctttgcaggaggacttgaagcagagttcaccagtgagctcaggtgtctcaaagaagggtggaagttctaatgtctgttagctacccataagaatgctgtttgctgcagttctgtgtcctgtgcttggatgctttttataagagttgtcattgttggaaattcttaaataaaactgatttaaataatatgtgtctttgttttgcagccctgaatgcaaagaattcatagcagttaattccccttttttgacccttttgagatggaactttcataaagtttcttggcagtagtttattttgcttcaaataaacttatttgaaaagttaaaaaaaaaaaaaaaaaaaa

SEQ ID NO: 113 - DNA, 679 bp, Homo sapiens
ggcacgagaggaatgttaaaaatatgtaggggaaaaaacagtaccagcacaaccatgcatcttgggattaagccagtgcagaatttcactcacttggtattatggtgggttttttttgttttttgtttttttgggacggagtctcgctccgtcgcccaggctggagtgcagtggcgcaatcttgactcactgcaagctccgcctcccgggttcacaccgttctcctgcctcggcctcccaagtggctgggactgcaggcacccgccaccatgcccggctcattttttgtatttttggtagagacggggtttcaccgtgttagccggcatggtctcgatctcctgacctcgtaatccacccgcctaggcctcccaaagtgctgggattacaggcgtgagccactggaattatggtgttttgcagctggtagaggccaggtaggtaggactaattttatgaatgtaattaaacaaaattttttattaatacatatgagcagaactaattaaaattgaagacacatttcttaggcccatcagtttatttttgtattcttttgtcaaaacaaaacaaaaaaagaaaccaaaatcataaacagttggggaggtactatacatggtgagcctggagcatcttgtagtgctggaaagtgaggaagtacttaaaaacaaaaaaaaaa

SEQ ID NO: 114 - DNA, 901 bp, Homo sapiens
  misc_feature (8)..(8): n equals a,t,g, or c
  misc_feature (57)..(57): n equals a,t,g, or c
  misc_feature (68)..(68): n equals a,t,g, or c
ttcccacngccggttgccgggccggctcttagaacctaagtgggttccccccggggntgcagraattnggcacgaggctgaactggctcctggggccatgaggctgtcactgccactgctgctgctgctgctgggagcctgggccatcccagggggcctcggggacagggcgccactcacagccacagccccacaactggatgatgaggagatgtactcagcccacatgcccgctcacctgcgctgtgatgcctgcagagctgtggcttaccagatgtggcaaaatctggcaaaggcagagaccaaacttcatacctcaaactctggggggcggcgggagctgagcgagttggtctacacggatgtcctggaccggagctgctcccggaactggcaggactacggagttcgagaagtggaccaagtgaaacgtctcacaggcccaggacttagcgaggggccagagccaagcatcagcgtgatggtcacagggggcccctggcctaccaggctctccaggacatgtttgcactacttgggggagtttggagaagaccagatctatgaagcccaccaacaaggccgaggggctctggaggcattgctatgtgggggaccccagggggcctgctcagagaaggtgtcagccacaagagaagagctctagtcctggactctaccctcctctgaaagaagctggggcttgctctgacggtctccactcccgtctgcaggcagccaggagggcaggaagcccttgctctgtgctgccatcctgcctccctcctccagcctcagggcactcgggcctgggtgggagtcaacgccttcccctctggactcaaataaaacccagtgacctcaaaaaaaaaaaaaaaaaaaaaaaaaaaaaaaaactcga

SEQ ID NO: 115 - DNA, 763 bp, Homo sapiens
ggcacgaggctcctggggccatgaggctgtcactgccactgctgctgctgctgctgggagcctgggccatcccagggggcctcggggacagggcgccactcacagccacagccccacaactggatgatgaggagatgtactcagcccacatgcccgctcacctgcgctgtgatgcctgcagagctgtggcttaccagatgtggcaaaatctggcaaaggcagagaccaaacttcatacctcaaactctggggggcggcgggagctgagcgagttggtctacacggatgtcctggaccggagctgctcccggaactggcaggacttagcgagggccagagccaagcatcagcgtgatggtcacagggggcccctggcctaccaggctctccaggacatgtttgcactacttgggggagtttggagaagaccagatctatgaagcccaccaacaaggccgaggggctctggaggcattgctatgtgggggaccccagggggcctgctcagagaaggtgtcagccacaagagaagagctctagtcctggactctaccctcctctgaaagaagctggggcttgctctgacggtctccactcccgtctgcaggcagccaggagggcaggaagcccttgctctgtgctgccatcctgcctccctcctccagcctcagggcactcgggcctgggtgggagtcaacgccttcccctctggactcaaataaaacccagtgacctcaaaaaaaaaaaaaaaaaaaaaaaaaaa

SEQ ID NO: 116 - DNA, 1373 bp, Homo sapiens
ggcacgagccatgggcagccacaagacgcagcgactgctgagtggcccgtgggtgccaggcagtggtgtgagtggacaagcactggcagtggccccggatggaaagcggctattcagcggtggccactgggatggcagcctgcgggtgactgcactaccccgtggcaagctgttgagccagctcagctgccaccttgatgtagtaacctgccttgcactggacacctgtggcatctacctcatctcaggctcccgggacaccacgtgcatggtgtggcggctcctgcatcagggtggtctgtcagtaggcctggcaccaaagcctgtgcaggtcctgtatgggcatggggctgcagtgagctgtgtggccatcagcactgaacttgacatggctgtgtctggatctgaggatggaactgtgatcatacacactgtacgccgcggacagtttgtagcggcactacggcctctgggtgccacattccctggacctattttccacctggcattggggtccgaaggccagattgtggtacagagctcagcgtgggaacgtcctggggcccaggtcacctactccttgcacctgtattcagtcaatgggaagttgcgggcttcactgcccctggcagagcagcctacagccctgacggtgacagaggactttgtgttgctgggcaccgcccagtgcgccctgcacatcctccaactaaacacactgctcccggccgcgcctcccttgcccatgaaggtggccatccgcagcgtggccgtgaccaaggagcgcagccacgtgctggtgggcctggaggatggcaagctcatcgtggtggtcgcggggcagccctctgaggtgcgcagcagccagttcgcgcggaagctgtggcggtcctcgcggcgcatctcccaggtgtcctcgggagagacggaatacaaccctactgaggcgcgctgaacctggccagtccggctgctcgggccccgcccccggcaggcctggcccgggaggccccgcccagaagtcggcgggaacaccccggggtgggcagcccagggggtgagcggggcccaccctgcccagctcagggattggcgggcgatgttaccccctcagggattggcgggcggaagtcccgcccctcgccggctgaggggccgccctgagggccagcactggcgtctgcggccgcagcagcactttttgcacagtctggggcggggttccccggcttccaagtcgctgtttcgtcaaagcacgagggccgcctgtggccttaattcctaacggcggccccggttctcccttctcggcaataaaccaggcctagttttgtaaaaaaaaaaaaaaaaaaaaaaaaaaaaaaaaaaaaaaa

SEQ ID NO: 117 - DNA, 735 bp, Homo sapiens
  misc_feature (653)..(653): n equals a,t,g, or c
  misc_feature (663)..(663): n equals a,t,g, or c
  misc_feature (675)..(675): n equals a,t,g, or c
  misc_feature (695)..(696): n equals a,t,g, or c
ctgcaggaattcggcacgagcaggcatcctccaaagcaaacccaaccctagggtgacatcaaggaaggtagcagtaggtggtatggtcagcatcttggttccaggcataatgccaatcatatcatatctatcatcatccttatggaggaaccgaagcccagagagatgaaatgatgagggcagtcctgatgcaaattttccttctggatcctgttgtttcaaggtgtgtatctcccatgctgaaggttaaatggggatcatttgccaacaaattttgggggttggktctctytgccatgtttccagccagtcccaggttggaatgttctgggcataaaatatcccttcagtggccatccctgatgcaatgtccacgtccatgccttggtcagtggctactttgcccagctgcatggcaatggggacctggggcaggacctcctggccagtgcttgtgcccagtggtaggcgacatcaccctcctcgttttaggccacagcatgattcaccaaccccagtgcccactcagtcgtcggcctgtgaagatgagctccttaccagggccacccccagcagtgtggcagccttgagtacctctggcctggaggagccctcagtggctctaatagtcatgattcaggaactgccctgangccaagcagncaagtcagctcnccagggaacctctaccatgnntgagtactttatccggacttatcacttaactaacttttg

SEQ ID NO: 118 - DNA, 763 bp, Homo sapiens
ggcacgaggaaaaaaatccaatctgatatcatagatttggaatcaaggctggtgagtggcataggttgaggaggctcttttggaaaagttattgacagaataaataaatgaatgaatgaagaatactccagcctggatttaagagtaaaccatatcacttgcttccttctcaagatggccttgtgtggattcttatgttattgaagctttggagcattttgctaggaaattctttccttctattgcaacatcgtggcgatcaggctgcactgtcagttgagcactggggactgagatgtttgtgaatgctgtggtcagtcaggtctgagttcaatgaaaagtcattgcctgagggttgcataacttgattgctacaggtagagaatggcctttcaccaacaccaaagatttattggcttttgggtgggaaaagtcagcttttatatttcaagagagtaaatcatctcttgttaattgtgaagcctttaaaggctatttaggatggtgaacttctgctagagcttcatgcagtaatatgtaaaatatgtagttgaccagaagtttacagttttgactaatagaagtattagtcaatgggtaatacttcaagtttgccaagtcccagcttataactggaccttcataagccagcctcatgttctaacagtcagaagcactctagacttgcaactttaaaccctagttagaaaaaaaattagcaaatactatattttagccaaaaaaaaaaaaaaaaaaaaaaaaa

SEQ ID NO: 119 - DNA, 395 bp, Homo sapiens
gagccggtgcagttacacgttttcctccaaggagcctcggacgttgtcacgggtttggggtcggggacagagcggtgaccatggccaggctggcgttgtctcctgtgcccagccactggatggtggcgttgctgctgctgctctcagcagctgagccagtaccagcagccagatcggaggaccggtaccggaatcccaaaggattcagcaccttggcwcagctgaagcagaggaacacgctgaaggatggtatcatcatgatccagacgctgctgatcatcctcttcatcatcgtgcctatcttcctgctgctggacaaggatkacagcaaggctggcatggaggaagatcacactacgaggcctggacattgaccagacagccacctatgagga

SEQ ID NO: 120 - DNA, 909 bp, Homo sapiens
ggagtttttaaatgattcagaggtctggggttaagaacagagctggctctgatccctgttgctcactggttccttcttccccagggacgaggatgggaagaccgcctgtggccatgagccctccccggtgctcctggggctaaggctggggctgcagccatggggctgggtcagccccaggcctggttgctgggtctgcccacagctgtggtctatggctccctggctctcttcaccaccatcctgcacaatgtcttcctgctctactatgtggacacctttgtctcagtgtacaagatcaacaaaatggccttctgggtcggagagacagtgtttctcctctggaacagcctcaatgaccccctcttcggttggctcagtgaccggcagttcctcagctcccagccccgcctgtgtggagaggagctgcttgtaggcagtgaggaggcggacagcatcaccttgggccggtatctccggcagctggcacgccatcggaacttcctgtggttcgtgagcatggacctggtgcaggtatggggagcagctcccggcccctctacagctgggctggacttcactcaaggggacagactcctcaagagctgggaactcggccacgcatggtggctcatgcctgtagtcccagcactttgggaggctgaggtgggtggatcacaaggtcaggagatcgagaccatcctggtgaatgaaaccccgtctctactaaaaatacaaaaaattagccgggcgtggcggcgggtgcctgtggtcccagctactcgggaggctgaggcaggagaatggcgtgaatccgggaggtggagcttacagtgagcggagatctggctactgcactccagcctgggcaacagagcgagactctgtctcaaaaaaaaaaaaaaaaaa

SEQ ID NO: 121 - DNA, 841 bp, Homo sapiens
ggcacgagcaaagacagccccaagaaggacggtggagtagtgtcctcgctaaaagacagtagatatgcaacgcctcttgctcctgccctttctcctgctgggaacagtttctgctcttcatctggagaatgatgccccccatctggagagcctagagacacaggcagacctaggccaggatctggatagttcaaaggagcaggagagagacttggctctgacggaggaggtgattcaggcagagggagaggaggtcaaggcttctgcctgtcaagacaactttgaggatgaggaagccatggagtcggacccagctgccttagacaaggacttccagtgccccagggaagaagacattgttgaagtgcagggaagtccaaggtgcaagacctgccgctacctattggtgcggactcctaaaacttttgcagaagctcagaatgtctgcagcagatgctacggaggcaaccttgtctctatccatgacttcaacttcaactatcgcattcagtgctgcactagcacagtcaaccaagcccaggtctggattggaggcaacctcaggggctggttcctgtggaagcggttttgctggactgatgggagccactggaattttgcttactggtccccagggcaacctgggaatgggcaaggctcctgtgtggccctatgcaccaaaggaggttattggcgacgagctcaatgcgacaagcaactgcccttcgtctgctccttctaagccagcggcacggagaccctgccagcagctccctcccgtcccccaacctctcctgctcataaatccagacttcccacagcaaaaaaaaaaaaaaaaaaa

SEQ ID NO: 122 - DNA, 1777 bp, Homo sapiens
gggccgccagcagacgccgtggaatcgcacccgtctcgcgtgtctcctggggcctcggcgagagacttcggctctcggagagtaggactgcgcctggaaagccgaggacgcgtccgcgccgagattcaaactagyggcgggaggctgtgagctgagcgrtggggtctgcgtacgcctggagtccttccccgctgtgctcagmatggaccctatccggagcttctgcgggaagctgcggtctctggccagcacgctggactgcgagacggcccggctgcagcgagcgctggacggagaggaaagcggtgcgtgaggcgggcggccagggcacgactttgaagattatccaatgagaattttatatgaccttcattcagaagttcagactctaaaggatgatgttaatattcttcttgataaagcaagattggaaaatcaagaaggcattgatttcataaaggcaacaaaagtactaatggaaaaaaattcaatggatattatgaaaataagagagtatttccagaagtatggatatagtccacgtgtcaagaaaaattcagtacacgagcaagaagccattaactctgacccagagttgtctaattgtgaaaattttcagaagactgatgtgaaagatgatctgtctgatcctcctgttgcaagcagttgtatttctgagaagtctccacgtagtccacaactttcagattttggacttgagcggtacatcgtatcccaagttctaccaaaccctccacaggcagtgaacaactataaggaagagcccgtaattgtaaccccacctaccaaacaatcactagtaaaagtactaaaaactccaaaatgtgcactaaaaatggatgattttgagtgtgtaactcctaaattagaacactttggtatctctgaatatactatgtgtttaaatgaagattacacaatgggacttaaaaatgcgaggaataataaaagtgaggaggccatagatacagaatccaggctcaatgataatgtttttgccactcccagccccatcatccagcagttggaaaaaagtgatgccgaatataccaactctcctttggtacctacattctgtactcctggtttgaaaawtccatctacaaagaacagcatagctttggtatccacaaattacccattatcaaaaacaaatagttcatcaaatgatttggaagttgaagatcgtacttcgttggttttaaattcagacacatgctttgagaatttaacagatccctcttcacctacgatttcttcttatgagaatctgctcagaacacctacacctccagaagtaactaaaattccagaagatattctccagcttttatcaaaatacaactcaaacctagctactccaatagcaattaaagcagtgccacccagtaaaaggttccttaaacatggacagaacatccgagatgtcagcaacaaagaaaactgaaattccagtggatctatccaacacagaaactgaacaaaatgagatgaaagccgagctggaccgattttaacattcacattgccctgcctctgtccccctttaaacgttgacccattttaaagacaaacatgaacattaacatcataatatgctttttatgaagtttcaataaggtttaaccttagtcttgttgacatgtagcccagtcattcactctttaaggattattagtgtttcattgatactaaattacccagcttaatcaacagaatggtttaagtagtaccaggaagtaggacaagtaatttc

SEQ ID NO: 123 - DNA, 1752 bp, Homo sapiens
cttttccccattgggtattaaatccttttagtggatcttgcttgggaagtctttattgagcttttcttccagtcagcatatcaattagatgtatcagaaataattgtttaaatgacttcagtcattaaatgaaggaaattcccttttagaatcytaactacctatctgtgtaatcatgtaataacagttatctactacaaagtggggagtttctgtttatctctccattttttctttagtagtagcaactatatattaggatttgcagatttgttttatatttcagaataagttatttttctttttcagctggctgcaataaaacttggccgatatggtgaagaccttctcttctatctctattacatgaatggaggagacgtattacaacttttagctgcagtggagctttttaaccgtgattggagataccacaaagaagaacgagtatggattaccagggcaccaggcatggagccaacaatgaaaaccaatacctatgagaggggaacatattacttctttgactgtcttaactggaggaaagtagctaaggagttccatctggaatatgacaaattagaagaacggcctcacctgccatccaccttcaactacaaccctgctcagcaagccttctaaaaaaaaaaaaaaaaaaaaaaaaaaagacttcccttttcttggggtatggctgtctcagcacaatactcaacataactgcagaactgatgtggctcaggcaccctggttttaattccttgaggatctggcaattggcttacgcaaaaggtcaccatttgaggtcctgccttactaattatgtgctgcccaacaactaaatttgtaatttgtttttctctagtttgagcagggtctgaattttttcatttatttccttttttgccagcagacagacttgagtctgtaaagacaagcaaatacactgacagaagtttaccatagtttctaaaatgtaaaaaagaaaacccccaaaagactcaagaaaattagaccacaaattttgcattgttcattgtagcactattggtaataaaataacaaatgtttgtgcatttttatgtgaagatccttctcgtatttcatttggaaagatgagcaagaggtctgcttccttcattttacttccccttctgtttttgaaaggcagtttcgccaagcttaatgcaagaatatctgactgtttagaagaaagatattgccacaatctctggatggttttccagggttgtgttattactgagcttcatctttccagaatgagcaaaacactgtccagtctttgttacgattttgtaataaatgtgtacattttttttaaatttttggacatcacatgaataaaggtatgtatgtacgaatgtgtatatattatatatatgacatctattttggaaaatgtttgccctgctgtacctcatttttaggaggtgtgcatggatgcaatatatgaaaatgggacattctggaactgctggtcaggggactttgtcgccctgtgcactaaaagggccagattttcagcagccaaggacatccatacccaagtgaatgtgatgggacttaaaagaagtgaactgagacaattcactctggctgtttgaacagcagcgtttcataggaagagaaaaaaagatcaatcttgtattttctgaccacataaaggcttcttctctttgtaataaagtagaaaagctctcctcaaaaactagttctagatcgcgagcggccgct

SEQ ID NO: 124 - DNA, 825 bp, Homo sapiens
  misc_feature (11)..(11): n equals a,t,g, or c
  misc_feature (25)..(25): n equals a,t,g, or c
  misc_feature (29)..(29): n equals a,t,g, or c
tggcagcttgncacggacaagtttncccngactggaaaagcgggcagttaagcgcaacgcaattaatgtgagttagctcactcattaggcaccccaggctttacactttatgcttccggctcgtatgttgtgtggaattgtgagcggataacaatttcacacaggaaacagctatgaccatgattacgccaagctcgaaattaaccctcactaaagggaacaaaagctggagctccaccgcggwggcggccgctctagaactagtggatcccccgggctgcaggaattcggcacgcgtccgccagcccgagtttcccatcgcactgagcactgagatcctgctggaagctctgccgcagcatgagctccgcagccgggttctgcgcctcacgccccgggctgctgttcctggggttgctgctcctgccacttgtggtcgccttcgccagcgctgaagctgaagaagatggggacctgcagtgcctgtgtgtgaagaccacctcccaggtccgtcccaggcacatcaccagcctggaggtgatcaaggccggaccccactgccccactgcccaactgatagccacgctgaagaatggaaggaaaatttgcttggacctgcaagccccgctgtacaagaaaataattaagaaacttttggagagttagctactagctgcctacgtgtgtgcatttgctatatagcatacttcttttttccagtttcaatctaactgtgaaagaacttctgatatttgtgttatccttatgattttaaataaacaaaataaatcaaaaaaaaaaaaaaaaaaaactcgagggggggcc

SEQ ID NO: 125 - DNA, 1187 bp, Homo sapiens
cccccgggctgcaggaattcggcacgagccctgctgtgtcagtcacggggttattttgacactttccttctgaccaaagaaggggcagcccatcccccactgcgtctgagatcaatcctcacacgccaaggattacacagtggagaatctcatccgcatgggcatggcaggcttggtcctggtgttcctcgggattctgttatttgaggctcagcacagccagagaaacccccaagatgcagccgggaggtgaacagcggagaggacaatgcacccttcagcgtggtggagcctcagggacagatctgatgatcccagaaggctctggaggacaatctaggacgtccagaggggggtgagatttcaggccacacactgtggaaggtaatcatgtctgatcacaaattttgggtctccaccttacttccaatctatgttgtgaatgcccagttgagacccacggaaaagagctcatgggtgagtgtgaagtgcttctctgtcttaagttcccagagatccttgcctcttggaggccagcaaacactaactcttgaggaattcatgacaatatcatctgattcctccttcccagcttgtatggcagtctcccaccctcatgtgttcaatctgatgatcccaggaggttctggaacaaaatctacagcctatgctttctggactatctgtcgatcattcctgaagagagggatcaatgttgaggtattcatttcacatgatgaaaatgacaatatcaaatgtcagaggtagtagggctcacgtagaaatccaatacatccatggtaggactgcaaattacttgaatcaatttggggaaaatatcagaagtacccagtgaaaaagaagaaacatggccgggcgcggtggctcatgcctgtaatcccagcactttgggaggctgaggcgggcggacacgagttcaggaattcgagtccagcttggccaacatggtgaaaccccgtctctactaaaaatacaaaacattagctgggcgtggtggcaggtgcctgtaatttcagctactcaggaggctgaggcaggagaattgcttgaacctgggagacggaagcaagttggcgccagttggtgcagtgagccaaggtggcgccattgcactccggcccaggtgacagtacgagacttcatctaaaaaaaaaaaaaaaaaaaaa

SEQ ID NO: 126 - DNA, 885 bp, Homo sapiens
ggcacgagggaatctgcaccatgccctgggttctgctcctcctgaccctcctcactcactctgcagtgtcagtggtccaggcagggctgactcagcccccctcggtgtccaaggacttgagacagaccgccacactcacctgcaccgggaacaacaacaatgttggcgaccaaggagcagcttggctgcagcagcaccagggccaccctcccaaactcctgtcctacaggaataataaccggccctcagggatctcagagagattatctgcatccaggtcaggagccacatcctccctgaccattactggactccagcctgaggacgaggctgactattactgcgcagcatatgacagcagcctcgcagtttggatgttcggcggagggaccaagctgaccgtcctaggtcagcccaaggctgccccctcggtcactctgttcccaccctcctctgaggagcttcaagccaacaaggccacactggtgtgtctcataagtgacttctacccgggagccgtgacagtggcctggaaggcagatagcagccccgtcaaggcgggagtggagaccaccacaccctccaaacaaagcaacaacaagtacgcggccagcagctacctgagcctgacgcctgagcagtggaagtcccacaaaagctacagctgccaggtcacgcatgaagggagcaccgtggagaagacagtggcccctacagaatgttcataggttctcatccctcaccccccaccacgggagactagagctgcaggatcccaggggaggggtctctcctcccaccccaaggcatcaagcccttctccctgcactcaataaaccctcaataaatattctcattgtcaatcagaaaaaaaaaaaaaaaaaa

SEQ ID NO: 127 - DNA, 820 bp, Homo sapiens
ctggctcctggggccatgaggctgtcactgccactgctgctgctgctgctgggagcctgggccatcccagggggcctcggggacagggcgccactcacagccacagccccacaactggatgatgaggagatgtactcagcccacatgcccgctcacctgcgctgtgatgcctgcagagctgtggcttaccagatgtggcaaaatctggcaaaggcagagaccaaacttcatacctcaaactctggggggcggcgggagctgagcgagttggtctacacggatgtcctggaccggagctgctcccggaactggcaggactacggagttcgagaagtggaccaagtgaaacgtctcacaggcccaggacttagcgaggggccagagccaagcatcagcgtgatggtcacagggggcccctggcctaccaggctctccaggacatgtttgcactacttgggggagtttggagaagaccagatctatgaagcccaccaacaaggccgaggggctctggaggcattgctatgtgggggaccccagggggcctgctcagagaaggtgtcagccacaagagaagagctctagtcctggactctaccctcctctgaaagaagctggggcttgctctgacggtctccactcccgtctgcaggcagccaggagggcaggaagcccttgctctgtgctgccatcctgcctccctcctccagcctcagggcactcgggcctgggtgggagtcaacgccttcccctctggactcaaataaaacccagtgacctcaaaaaaaaaaaaaaaaaaaaaaaaaaaaaaaaaaaaaaa

SEQ ID NO: 128 - DNA, 515 bp, Homo sapiens
  misc_feature (6)..(6): n equals a,t,g, or c
tctgcngagccctgcagaagcttgtcgacccacgcgtccgcccacgcgtccggtaggcagcaactcaccctcactcagaggtcttctggttctggaaacaactctagctcagccttctccaccatgagcctcagacttgataccaccccttcctgtaacagtgcgagaccacttcatgccttgcaggtgctgctgcttctgtcattgctgctgactgctctggcttcctccaccaaaggacaaactaagagaaacttggcgaaaggcaaagaggaaagtctagacagtgacttgtatgctgaactccgctgcatgtgtataaagacaacctctggaattcatcccaaaaacatccaaagtttggaagtgatcgggaaaggaacccattgcaaccaagtcgaagtgatagccacactgaaggatgggaggaaaatctgcctggacccagatgctcccagaatcaagaaaattgtacagaaaaaattggcaggtgatgaatctgctgattaatttgt

SEQ ID NO: 129 - DNA, 2264 bp, Homo sapiens
  misc_feature (2253)..(2253): n equals a,t,g, or c
  misc_feature (2255)..(2255): n equals a,t,g, or c
  misc_feature (2262)..(2262): n equals a,t,g, or c
cccacgcgtccggcccaggatgacagctggagaatggagtcagttttatccaagtatgaagatcagattactattttcactgactacctagaagaatatccagatacagatgagctggtatggatcttagggaagcagcatctccttaaaacagaaaaatctaagctgttgtctgatataagtgctcgtctatggtttacatacagaaggaaattttcaccaattggtggaacgggcccttcatcagatgctggttggggatgtatgctacgctgtggacagatgatgctggctcaagcccttatctgtagacacttgggaagggactggagctgggagaaacaaaaagaacaacccaaagaataccaacgcatcctacagtgcttcttagatagaaaagattgttgctactctatccatcaaatggcacaaatgggtgtaggagaagggaaatcaattggagaatggtttggaccaaatacagttgcacaggtgttaaaaaaacytgctttatttgacgaatggaattccttggctgtttatgtttcaatggataacmcagtggtcattgaagatwtcaaaaaaatgtgccgtgtccttcccttgagtgctgacacagctggtgacaggcctcccgattctttaactgcttcaaaccagagtaagggcacctctgcctactgctcagcctggaaacccctgctgctcattgtgccccttcgcctgggcataaaccaaatcaatcctgtctatgttgatgcattcaaagagtgttttaagatgccacagtctttaggggcattaggaggaaaaccaaataacgcgtattatttcataggattcttaggtgacgagctcatcttcttggaccctcatacaacccagacctttgttgacactgaagagaatggaacggttaatgaccagactttccattgcctgcagtccccacagcgaatgaacatcctaaacctggatccttcagttgcattgggatttttctgcaaagaagaaaaagactttgataactggtgtagccttgttcagaaggaaattctaaaggagaatttaaggatgtttgaattagttcagaaacatccatcacactggcctccctttgtacctccagccaagccagaagtgacaaccactggggcagaattcattgactctactgagcaactggaggagtttgatctggaggaagattttgagattctgagtgtgtagaatcctgggaactcaacttgaaggtctgtcttccatctggcaccataaaaacatgaacttattgcataaaacttttctagtcagcaagtgcctgatatgccaatagcatacaaactcaatagcaatcatgactgagccaatcactgtttctcagaaaaacaaaacaaaacaaaacaaatgacagtaacccttccccggaaagaaatagaacaatcatggagcctaggagcagagagatgaggaggagttcattgcttcccagcttgtgttatatggctacagcaagtcttcagctgctgcaatgaggaaatgggcatctggaagacaaacagcaactctcagcttgcttcaagaaccagcagataagagatggttaagctgttcttcaccctttcagatgtgacctcttttggactaagcagcaatctgttctcttgctcaaataataaagtgactgaatcagggaggaaaaggttcttgttaaattatttgattgtgtagttgaagtaattataatttatatcaaaacgtttgtcaaagaaacgatgtcaaatatacacttcttgatctcccttctgtttgcggggatcttactatttgatgggtcactgtccccattcttactgatacttttgtcagatatcaccctgtccttaaatcatgatcacttaaatcaggggtcagcaaactttttctgtaaagggccagacgggaaatattttgggctttgcaggccatgcggcctctgtcacatctactcaactctgctgttgacatgcaaaagcagcaatagacaatatgcgtgtaaatgagtgtggctgtaatccaagaaaactttatttacaaaagcaggtggagggctgggtttggcctgcaggctgtagcttgccaatcagtgacttaaattgttgatttttgtttgataaattaaaaataaattgtgtttgaagtataaaaaaaaaaaaaaaaaaaaaaaaaaaaaaaaaaaaaaactcgagggggggcccgtacccaatcgtcctnanatgtatngt

SEQ ID NO: 130 - DNA, 699 bp, Homo sapiens
  misc_feature (680)..(681): n equals a,t,g, or c
  misc_feature (683)..(683): n equals a,t,g, or c
gtacggctgcgagaagacgacagaaggggagagaaggagagcctgcagacagaggcctccagcttggtctgtctccccacctctaccagcatctgctgagctatgagccaaaccagggatttacagggaggaaaagctttcggactgctgaaggcccagcaggaagagaggctggatgagatcaacaagcaattcctagacgatcccaaatatagcagtgatgaggatctgccctccaaactggaaggcttcaaagagaaatacatggagtttgaccttaatggaaatggcgatattgatatcatgtccctgaaacgaatgctggagaaacttggagtccccaagactcacctagagctaaagaaattaattggagaggtgtccagtggctccggggagacgttcagctaccctgactttctcaggatgatgctgggcaagagatctgccatcctaaaaatgatcctgatgtatgaggaaaaagcgagagaaaaggaaaagccaacaggccccccagccaagaaagctatctctgagttgccctgatttgaagggaaaagggatgatgggattgaaggggcttctaatgacccagatatggaaacagaagacaaaattgtaagccagagtcaacaaattaaataaattaccccctcctccaraaaaaaaaaaaaaaaacnncnggggggggggcccccg

SEQ ID NO: 131 - DNA, 763 bp, Homo sapiens
gccaggtactttcattctattactcttctttaccatgtagagttcagtttattgcccagaatactttatgcattcaaaaccttacttgtttcagagtatctgatgctatgcatcaactgacgtttgacttatacactaataggagatgcttcaaaaacaatagttgatttaatgtcaaatgacatgagtatatccattcactgtggagatggctttgttctctggtcctagctccttcctatatggtggccagaagttttattgcaaagctatgactgcagccttttgtgtgacttgcggaggatgtgtgggggtcccatatttcttaggtgtgtaggtgtcttttgtagaaaattttgctaaaaggaaattttgattgaatcctgttttctaattttgattataatacctaaaccaaattgtggtttttaaaaaatgtagttgtaggccaggcacggtgggctcacgccctgtgaatccaagcacagtggggaaggccatgggcggggcatattcaccttgaaggtcccagggaggtttgaagaacccagcctggccaacatggtgaggctcctctctatgaaaaatacaaaaattaggtgggtgcggtggtgcacgcctgtaatcccagctactcgggaggtcgaggcaggagacttgcttgaactggggaggcggaggttgcggtaagttgaggtcgtgctgctgcactgcagcctgggcaacaatgagtgagagtctgtctcaaaaaaaaaaaaaaaaa

SEQ ID NO: 132 - DNA, 1223 bp, Homo sapiens
  misc_feature (11)..(11): n equals a,t,g, or c
  misc_feature (31)..(31): n equals a,t,g, or c
  misc_feature (1185)..(1185): n equals a,t,g, or c
  misc_feature (1210)..(1210): n equals a,t,g, or c
cagtgaccggntccgggaattcccgggtcgnacccacgcgtccgcttttttgatggggtgtgggggtatagtactcagcttatgccctaaaataacatgtataaaaacccctgaagtattgtgtgggtgtgtacgtgtgagtgtgtgtttgtatacgtctggcaattaaagctttgtcttctggaacttagtgaattcttttctctttttcctccagaagtatttgttacaagatttgtaaataagagctctacttagtttgtttaccatgaacatgttgcagcaaaccttatgcatctaattcctacaaggttaaagaaaggcttttagacttgccaggttaagcaacagccaagttctcagtaattgtttgccttgatttatcttttagacttcattttgccagctctaaaactcccagtcttccttgattttagtccttaatcttttatgttctgagcaggaagggtaaaagacaggaacctgcttcactgtattaactagtccatgggctgagaccggggcatctcttttcttcatactgcaatgttgctagatacatgatcagacaccagagggttgggcattcttgcaataccttaacagtgctgaaatctgcagcatggtactaaggaagttaaagtttgaatgtaaccactttatttaaaaggtttttttctttaatttaaatgaaatggggttgaagtgaacatgattttgttgaccatgttcgtgaattacagatgcaacatgcattggtagaatcgtgtgatggtcttttgtgatacttaatttttacatatcccagtctctgtatgtatctgcatagacaaagaaaaaacaaactcctgctttgcttttattgaagggtttccaggactgcgtgtctgctcctgagctctgttttaagtatgtgtatcctttgcttgtattttgtattaaaaaaataagaaaaagaagcctttattgttgagcatgttggcattgtcccctttatttttttctctttttgggacatatgaagcaagttattctttttctgtatctttttttcttttgtaaactttttttttgttttgtttaaaaatggctttataaaagggcttttataacccaaaaaaaaaaaaaaaaaaaaaaaaaaaaagggcggccgctctagaggatccaagcttacgtgacgcgtgncatgcgacgtcatgagctcttgctnataagtgtgcacc

SEQ ID NO: 133 - DNA, 2635 bp, Homo sapiens
ctggaaaggattcttgtagtgactgccatggaacacagacagacctatgggaacacacgggaacctcttttagaaaacctgacaagcgagtatgacttggatcttttccgaagagcacaagcccgggcttcagaggatttggagaagttaaggctgcaagccaaatcacagagggaagcaacatgattaaaacaattgcttttggccgctatgagcttgatacctggtatcattctccatatcctgaagaatatgcacggctgggacgtctctatatgtgtgaattctgtttaaaatatatgaagagccaaacgatactccgccggcacatggccaaatgtgtgtggaaacacccacctggtgatgagatatatcgcaaaggttcaatctctgtgtttgaagtggatggcaagaaaaacaagatctactgccaaaacctgtgcctgttggccaaactttttctggaccacaagacattatattatgatgtggagcccttcctgttctatgttatgacagaggcggacaacactggctgtcacctgattggatatttttctaaggaaaagaattcattcctcaactacaacgtctcctgtatccttactatgcctcagtacatgagacagggctatggcaagatgcttattgatttcagttatttgctttccaaagtcgaagaaaaagttggctccccagaacgtccactctcagatctggggcttataagctatcgcagttactggaaagaagtacttctccgctacctgcataattttcaaggcaaagagatttctatcaaagaaatcagtcaggagacggctgtgaatcctgtggacattgtcagcactctgcaagcccttcagatgctcaaatactggaagggaaaacacctagttttaaagagacaggacctgattgatgagtggatagccaaagaggccaaaaggtccaactccaataaaaccatggatcccagctgcttaaaatggacccctcccaagggcacttaaagtgacctgtcattccgagccagcgaaccccagcagtaggaatccgtaccctagggatctgtctgtcatttctctgttgctcttgtgattggcaagtacagtatcctttgggaaggccatccccctcaggactgtcctggctccgacctttgtgtacactgcagacgctggttctgaggaactgttgtttcggcctcagtgaggttgcctggatgggatctgtattagacttgagtgcaggtctctcagcactgacccaaggagttctgttatggtactgtacctgtccagtcactggttctctcctcatgtcctctcgccccatgaggttgtgttgtgtcttctaagcgtggtactagtgcttgccacctggtcaccagacctccaaatatggctgccaccaccaggacctttccagttactccttatatgtgtgttctatggaggggcagggaaaaggtggcacttgtgagtgtgtgtggattggcagggggtccattcactttgggttccatcttgctttaaatttcttcattttgattaagagacctctttttgatctgtattgggctaaccagagccaaatacttttgaagagtttcccagggactagtcatggtaatagcatataattgatctgaatgagatggagagaagaatgaaggggtggtggttctgggtttgatttgagttcacctgtgggcagtgggcagtgggcagtgtcttggtgaaagggaacggatactactttttgcctcaccgtaaagtactcactagtaaatatttccttctctctttactcccactttttacgtttgcaggtgccaaagtaatgtccacttttccctttcatgctgcatattaactggttaattatactgcagaaaccttttcacctccactagtctgatacagtacatctgtacttccatataccttgcactgattttgtctgagtgccctgggagaagtagaaaatgattgaaagtgacttccgtatctcagcccatgactcagcaaggcagaatggccacccctgccaaagtttgcttctcttttcaacagtgcctcaccctccctctaggattaaagtgcttctgcccttccacgaactcctcctccatttcctttttgggatttgtcaccatccttctattctctggtcttctatttttggtgttgttcaagtgaaggaagagatgttccctctaatttctctctagcccattataacctgctatcttggggcaacttttgatgtatgacatgtcacccttcccaacttggtctcctccaacatgctgtcttcatgtggagccctcaccacaatccctgactccggtcatttgtgcctttctcttgtcatctctgtacactacttatattcactgtgggttgggggagctaattttaagcatgttcagtggcagctcccctccagtttcagtgtcactgttaaaatttatcaaaaagcaacttcactaggggttttcttaagggataaaggccttttacagaagctaaacccttccccacatgtggtagaatgtgctcttctatatctactcctcaataaagcatgttctctgctcaaaaaaaaaaaaaaaaaaaaaaaaactcga

SEQ ID NO: 134 - DNA, 3453 bp, Homo sapiens
cccacgcgtccggagcaaccgcagcttctagtatccagactccagcgccgccccgggcgcggaccccaaccccgacccagagcttctccagcggcggcgcacgagcagggctccccgccttaacttcctccgcggggcccagccaccttcggcacgaggggttgcccacctgcaaactctccgccttctgcacctgccacccctgagccagcgcgggcgcccgagcgagtcatggccaacgcggggctgcagctgttgggcttcattctcgccttcctgggatggatcggcgccatcgtcagcactgccctgccccagtggaggatttactcctatgccggcgacaacatcgtgaccgcccaggccatgtacgaggggctgtggatgtcctgcgtgtcgcagagcaccgggcagatccagtgcaaagtctttgactccttgctgaatctgagcagcacattgcaagcaacccgtgccttgatggtggttggcatcctcctgggagtgatagcaatctttgtggccaccgttggcatgaagtgtatgaagtgcttggaagacgatgaggtgcagaagatgaggatggctgtcattgggggcgcgatatttcttcttgcaggtctggctattttagttgccacagcatggtatggcaatagaatcgttcaagaattctatgaccctatgaccccagtcaatgccaggtacgaatttggtcaggctctcttcactggctgggctgctgcttctctctgccttctgggaggtgccctactttgctgttcctgtccccgaaaaacaacctcttacccaacaccaaggccctatccaaaacctgcaccttccagcgggaaagactacgtgtgacacagaggcaaaaggagaaaatcatgttgaaacaaaccgaaaatggacattgagatactatcattaacattaggaccttagaattttgggtattgtaatctgaagtatggtattacaaaacaaacaaacaaacaaaaaacccatgtgttaaaatactcagtgctaaacatggcttaatcttattttatcttctttcctcaatataggagggaagatttttccatttgtattactgcttcccattgagtaatcatactcaactgggggaaggggtgctccttaaatatatatagatatgtatatatacatgtttttctattaaaaatagacagtaaaatactattctcattatgttgatactagcatacttaaaatatctctaaaatagttaaatgatttaattccatattgatgaagatgtttattggtatattttctttttcgtctatatatacatatgtaacagtcaaatatcatttactcttcttcattagctttgggtgcctttgccacaagacctagcctaatttaccaaggatgaattctttcaattcttcatgcgtgcccttttcatatacttattttattttttaccataatcttatagcacttgcatcgttattaagcccttatttgttttgtgtttcattggtctctatctcctgaatctaacacatttcatagcctacattttagtttctaaagccaagaagaatttattacaaatcagaactttggaggcaaatctttctgcatgaccaaagtgataaattcctgttgaccttcccacacaatccctgtactctgacccatagcactcttgtttgctttgaaaatattagtccaattgagtagctgcatgctgtcccccaggtgttgtaacacaactttattgattgaatttttaagctacttattcatagttttatatccccctaaactacctttttgttccccattccttaattgtattgttttcccaagtgtaattatcatgcgttttatatcttcctaataaggtgtggtctgtttgtctgaacaaagtgctagactttctggagtgataatctggtgacaaatattctctctgtagctgtaagcaagtcacttaatctttctacctcttttttctatctgccaaattgagataatgatacttaaccagttagaagaggtagtgtgaatattaattagtttatattactctcattctttgaacatgaactatgcctatgtagtgtctttatttgctcagctggctgagacactgaagaagtcactgaacaaaacctacacacgtaccttcatgtgattcactgccttcctctctctaccagtctatttccactgaacaaaacctacacacataccttcatgtggttcagtgccttcctctctctaccagtctatttccactgaacaaaacctacgcacataccttcatgtggctcagtgccttcctctctctaccagtctatttccattctttcagctgtgtctgacatgtttgtgctctgttccattttaacaactgctcttacttttccagtctgtacagaatgctatttcacttgagcaagatgatgtaatggaaaggtgttggcattggtgcctggagacctggatttgagtcttggtgctatcaatcaccgtctgtgtttgagcaaggcatttggctgctgtaagcttattgcttcatctgtaagcggtggtttgtaattcctgatcttcccacctcacagtgatgttgtggggatccagtgagatagaatacatgtaagtgtggttttgtaatttaaaaagtgctatactaagggaaagaattgaggaattaactgcatacgttttggtgttgcttttcaaatgtttgaaaacaaaaaaaatgttaagaaatgggtttcttgccttaaccagtctctcaagtgatgagacagtgaagtaaaattgagtgcactaaacaaataagattctgaggaagtcttatcttctgcagtgagtatggcccgatgctttctgtggctaaacagatgtaatgggaagaaataaaagcctacgtgttggtaaatccaacagcaagggagatttttgaatcataataactcataaggtgctatctgttcagtgatgccctcagagctcttgctgttagctggcagctgacgctgctaggatagttagtttggaaatggtacttcataataaactacacaaggaaagtcagccactgtgtcttatgaggaattggacctaataaattttagtgtgccttccaaacctgagaatatatgcttttggaagttaaaatttaaatggcttttgccacatacatagatcttcatgatgtgtgagtgtaattccatgtggatatcagttaccaaacattacaaaaaaattttatggcccaaaatgaccaacgaaattgttacaatagaatttatccaattttgatctttttatattcttctaccacacctggaaacagaccaatagacattttggggttttataataggaatttgtataaagcattactctttttcaataaattgttttttaatttaaaaaaaaaaaaaaaaaaaaaaaaaa

SEQ ID NO: 135 - DNA, 1535 bp, Homo sapiens
ggcacgagctggtctcgaactcccgacctcaggtgatccgcccaccttggcctctcaaaatgccgggatgacaggcgtgagccactgcacctggctgagcatgatgttttcaaggcacatctgtgccatagtgtgtatcagtacttcactctttttatggccaaataatattccattatatggatagacattttgttgatggacaattgggtttcattttattatttttagttgtactaattcagataatgtatgtttacatcctccatataaaagaagcaaataatatagatatccatgaagtaaaacattaaatcccctcacgcttctccttcagttctactcttctccccagaagtgactgcaggtgacaatctgccctgaatgtctctggccatatacattagattttttcacataacttcctagtcaactatgggcatcataggggatgggtcctcccttgcccggggtgatctatgtgtcttctgggtaaagtgggcgccgaatgttcatatgctcaatggatccctggggagtgtgggggagtcctgtagagagacgtttccttatctctgagcatccgtgttcaggtgtggacgggacagtgagtggctgggaggaagccagaatcaacagctccagccctctgcgctacaaccgccagatcggggagtttatagtcacccgggctgggctctactacctgtactgtcaggtgcactttgatgaggggaaggctgtctacctgaagctggacttgctggtggatggtgtgctggccctgcgctgcctggaggaattctcagccactgcggccagttccctcgggccccagctccgcctctgccaggtgtctgggctgttggccctgcggccagggtcctccctgcggatccgcaccctcccctgggcccatctcaaggctgcccccttcctcacctacttcggactcttccaggttcactgaggggccctggtctccccgcagtcgtcccaggctgccggctcccctcgacagctctctgggcacccggtcccctctgccccaccctcagccactctttgctccagacctgcccctccctctagaggctgcctgggcctgttcacgtgttttccatcccacataaatacagtattcccactcttatcttacaactcccccaccgcccactctccacctcactagctccccaatccctgaccctttgaggcccccagtgatctcgactcccccctggccacagacccccaggtcattgtgttcactgtactctgtgggcaaggatgggtccagaagaccccacttcaggcactaagaggggctggacctggcggcaggaagccaaagagactgggcctaggccaggagttcccaaatgtgaggggcgagaaacaagacaagctcctcccttgagaattccctgtggatttttaaaacagatattatttttattattattgtgacaaaatgttgataaatggatattaaatagaataagtcataaaaaaaaaaaaaaaaaaaaaaaaaa

SEQ ID NO: 136 - DNA, 1811 bp, Homo sapiens
  misc_feature (9)..(9): n equals a,t,g, or c
  misc_feature (17)..(17): n equals a,t,g, or c
  misc_feature (26)..(26): n equals a,t,g, or c
  misc_feature (1770)..(1770): n equals a,t,g, or c
  misc_feature (1803)..(1803): n equals a,t,g, or c
  misc_feature (1807)..(1807): n equals a,t,g, or c
caattgggnttgggggnccccccccngggttttttttttttttttttttttttttttttttttttttttcatgaaatggtgacgtttaatgagaaccgcccactccccccaccctgtatatacatctataaaaaattcaaatacagcaagttaccattgagtcagactagaagggactgacagggcattaaatactgtgggataggagcagggtcaggggaggggtatacaaaacagggcagaggggaggggactgaaaattgtgggtgctggggggagggggatggctgggcccccccagcatcaggagcttataatctgatggtggcaacagagaccctgggatagacaggaggctggggcaggaggagaaatcggatgtgagaggctcccctcacgtcccccaagggctcctgggagtcgctggcattggagggtccagcccaaggggccagggtgagggggtctttggtgggtgggttagctgcatggcccacctcccctgagggaggaaggagggccagcttggtgcggcagggctggggggcggcaggcccgggcccgccggggtctccacaaattgtgtctgaagagaatgcaaaaggtcctcctgcccgtgtgcaaaatagaaaccggggtctgcaggctcagctccggcctcctgctcctctgcaggtgctctgcatgtcctcatggggtgccgggctcagatcaagagactgctggcagtggcggcagcggcagccagggccagagtgatggggacgctgaccaagaagggtgccgagggtcccccgccgctgcccagctccccagggtcacagatcttcgtggtaggtgggggtgccagggagctggtggtgctggtcgtggtctccgcagcctgggcctccgtggtgaggtgtcgcggttcctcagtccagggcgtagcgtgggcggctacgctccagtcactccatgtcccaatctcattgtccttggctgccacctggataatgtactccttcccggcgtaggcatctgtgatggtgtgtgctgtgccgtcggacagctccacatgctgccactggtccaggatgaggggtcggtagcgcagaaagaacttgagaggaaaagactcagggtcaggccaggtcgagggggtctgccacgtcacctccagccggcgagggttgctgggcactggccgggctaccacattttctggaggatcaggcttcacaatggtgaactcgtcaaaggtgatagctgtggcattgtggcccagggcattgctgacacttatggagaccttgtacttgatggtggagaacaggtgcatgtagcgaatgtggcagcggttcttgagggctgggtccttctcacagaccataattttggagccatgcagcacagtcacattgaaggtgttgggaatgtaggtgggggtgggcagatgccagctgcagtagaagcccttggggtaagtgttggagcggcagctgagcacaggctcccgcggcggcaagcccacatgcagcaggacttggtggcgcaggtgccaggagtcacggtggaagcaggcgtagaggccactgtggcccagttccaggccatggagcaccagctgagagccgttgagcaggtcaggggccaggtctgtcccatttacccgccacgtcaccgcagcatcccagtttgctgtcccacatggcagtgtcacgtcagagcccaggcgctcgtactgcacatggggtgcctcctgtggaccttcgtgcccgaatcttgcanccccgggggaatccactaagttctagaagcggnccgncaac

SEQ ID NO: 137 - DNA, 1176 bp, Homo sapiens
ccacgcgtccggtgggttctttcaggggacatttctgtaatgtacaaaagaacctgcaaaaacaaaagcacctagggagacagaagactgggaaaggcccatgaagggcagagctctctcagtaatggaggaaactaataggactgctgctaatggagccccaggtgagccctgggattgcaaggccaccgctggcacaggcaaccatgcttgtgtggaggtgcaggcgtgagccctcctgcaagggggctctctgccagcacccatgcagggctcagaagggggcctggctgtggatcttgctgggttccagcagcacagaggcccactggcctctgacgcaacatacgcctggggaagtgtgcaggcccagcggagacagaactgccaagagtctggactcacggtagtcttcagactcgtccaggatctcggacctgatgatctcctcgatcacgtcctccagggtgaccaggcccaggacctcgtagaaggggtcgccttcaccctcgttgttcaccttctgcacgatggccaggtgggacttccctgtggggggaggacactcatggaacagcttgctgggccccccccagtttgattcatctcccctggtataggcccaccaaaaggacacggctaacgttcatgctcctacaacgtgccaggcacagagccacactcttttctaggtttttacttaagactcccagcgtgattatgagaactggcctttttttcacacaggttgaaaatgaagcagtgggctcatgcccatctgcacaaggccccccaggcagagctggcagagctgggatccagctccaggtccgtgcacctccatgacatggatgcagtttagacaaggatgcctccctccagtggagaacacaaatgcctcacacatcagccagcctgcacatgcaggctaacaagggcactgactctggaaacacaggctctcctgcgacagtccacacggggcagctgagtggggccacccagcctgactgtccttgggaggatttcctaagtctttttcttcttaaagtaaatatatatgctgtccatcctaaaaaaaaaaaaaaaaaaaaaaaaaaaaaaaaaaaaaaaaaaaaaaaaaaaaaaaaaaaaaaaaaaaaaaaaaaaaaaaaaaaaaaaaaaaaaaaaaaaaaa

SEQ ID NO: 138 - DNA, 3310 bp, Homo sapiens
  misc_feature (3282)..(3282): n equals a,t,g, or c
  misc_feature (3305)..(3305): n equals a,t,g, or c
gctatcagcgacgcaataaggatgtgttggcttgggttaaaaaacgcagagaactattcgtcgagaagatttgatcagcttcctgtgtggaaaagttcctccaccacgaaactctagagctcccccaagactgactgtagtgtcccctaaccgagctacttcaacggaaactagctcatctgtagagactgatttgcaacccttccgggaagccatagctctgcatggtcttagtggtgcaatggctagtataagcgtgcgttcgagtaccccaggctctcctacacatgtaagcagtggatcgaatgctagtcgaaggagaaatggactccatgatgtcgatttgaacactttcatatcagaagaaatggcactccacttggacaatggtggaactagaaagcgtacctcagcccagtgtggcgatgtcattacagactcaccaacccataaacgcaacagaatgatctaaactgcaaacattttcacacccaccatgctgcttgaaagccacttgatcctcaacatatactataattgcaaaggaaacatgaggccatcttcccttgttcactgtttaagacaagtgaattctatagtggttgccataaaaggaagttctaggtatttatagtagatgcctcttgtaattatggctttcttaaaactataatcctagcagaggacatcagatattgtgtagtcgttagcaagatcatcataggcaaacatatatccgttccaaggctaaaagtgaccttaactgtatttattctcaaagggaaaggaaatatcagatgtttatttggttatagaatgctttttttttttttgggtccatttcctgctgtgttgagtattttgcttcaacagtattgccaggttcctaaaattgtctaaaaacatgatttggcttccatttttgcagctgcactgtaccatgcacctggtttctatatagtaacagtgtgcaattctaattattggactgtgccctgtttttagttttcaaatcaatttctaattctggtgattgtgtgatgtaaagaggtgctatgatggtcatgcaattaatactaaatattgaatcaatgcccagagctttattggattcactttgtgtgtgttagtgctctaaagtagcagtattattattaaactgtccccagagtaaccctgtaggcctaaagtactcagttttaagacaaacactacttcccatgcggggtactttccttatggtaaatgtaaacatgtagactgcattcgaggtgacctaaagtagagaggtcatgaactttgagaatgggcttcctttttggttcagtattagtgagagggagagggagatggatggtggggtaggttttctagtctatcattttacatttttcatggagtccctgcttagtgcagtttccattggaatgggtggaagatgataaagctctcttttttatctactaataatgtgattgcaacttaaaatagcaaaacccaactctccctgtccctccaatccctctcctaaaaagttcagtttggaatctcattctggaaaagatggaatcgcatggagattctctagctgttaggtagacctaaataaaaagttctcaatagattcctcttttgagtaaatataagacctcttgtagctacaatgttttagagcatgtttcatcttcatttttaatatcctgaactgaatgatagtgtttttttagatgaagaactgatgtcagcctgccaggtactgtaatttattctatcatattattatattatatatcaagtaggacagtgaaaaatgtttccttgcaaacttgtagtccagtatcagttacttcctatttttatccttaaaagaccattgcaaatcagtgtaagggtttttccagtaattactcacagcactttgttaaagtttgcaatttcttcagccatttaataatatctttctgtgaagaaactttgctgagttaaccataaatgttcattcattgactgggtgggatgtgaatggaatgttagaaatgttgtgtgaattgaagttctgtattcattatagatgtagcccttatttaaaaaagtgaattccatactaaaactaggaatgaaagtgagagatttctaaacttttgcgaaagtgggtcattttttgtttgactataatagcaggaagaattatagcaatctgtcattttacctgaaacagacaagcctatgtattatgaatactttcaagcttccctttggaatatacaagacatgcgtttggagttacctttgtttttctatcgtaaatttagattctggaattggggtttggtggtgcaatgtgttgctcacaagtggccagaactcctattcctaaaaggattttgagatggaggaacacatatttaattcccctttatgccttggttcttgctcctctttccacgttggataacaattttttggttgttttgtttaagttggtgctctgaagcttaatctcagtaccctttactctgaattgtcaaattttgataaaacgtgccattttctttggtaagagaaagcaggtcttaatgtctgccagaacacaatttatatgccttattggcttcattaaacttttagaaaactttagcatttgttacttttttccattgcatttactttcaaatgcacctaatgaattygtcacccagtcgcaacttttcccttctctgtcccattgctttctcctttccccgacgcacagaataaacatgaagctcagcagtagaagcgtaatgatttccctcaggaaaaacttctgacagctaggtttttcaagggtttccctgtgctagctgagatgcaaaacaaatcatggaagattgcatacctgtgtggtattttaaaaacaagttgactttttcagtttcttgaacggttaagggtggatttaaaaactagacagtttagttttggggaacagaagctctcttcgtcttaagccagattctctgattcttttagacgtcatagctccttagttctgctcctgtcgccctaacttggcatgggcaagttgaagttcatccttagactgcagcgttctgagcatggctgaagtattaaaatgtttmatattttttagagcaaaattgatggaaagcatttggctgaatctaaagacctgcagtcagattcttcaatgtggtttacccaactggagtagtgataaacaccttaatcataaaatgaataaaaacaaaaaaaccaaaaaaaaaaaaaaaaaaaaaattnctgcggtccgcaagggaattcantggcc

SEQ ID NO: 139 - DNA, 1983 bp, Homo sapiens
aattcggcacgagactagtctcgagggttcactcttgctgctgtatattctacaggttttgacaaatgtgtaatgacatgtaaccgtcattttttgtttgttttttgttttactgttttgttttgttttttgagactgagtctcgctctgttgcccaggctggagtgcaatggtgtgatctcagctcactgcaacctccgcctcccacgttcaagtgattctcctgcctcagcctcctgggtagctgggattacgggcacgtgccaccatgcctggctaatttttgtatttgtagtagagacaggggtttcaccatgttggtcaggctggtctcgaactcctgaaattgtgatccacctgcctcggcctcccaaagtgctgggattacaggcgtgagccaccacgcccagcccctgtaatcatcattatggtatcacacagaagagttttactgttccaaagtcctctttgctccagcattccttttttctctcaatcgctagcaaccactgatttttttccggcttccatcgttttccttttccaagaccaccatgtatttggaatggcacaatatgtagccttttcagattggctatttcacttggtaatatacacttcagtttcatccatgtcatcttatggcttgatagcactttttttttttgcactgaataatattctattgtctggatgtaccacagtttatccattcatctactgaataatattttgtttgcttctaagttttggcaataatgaatacagctgctataaacatttgtgtgcagatgtttgtgtggacacaacttttcagttcatttggataaatacaaaggaatgcaattgctggacttttcggtaagagtttgtttagtcttgtaataaactgctagcccatcttccaaagttgctgtacaattttgcatttctacagcaatgaatgagatttcctgttgttccacatccttgccagaattttgtgtcatcagtatttggaattttcgctcttctaataggtatgcattggtgtgccattgttttaattttcaattccctaatggcatatgatgttgagcagtttttcttatacttattttcaatctatgtatcttctttgttgaaatgtctgttcagatatttcacctgttcttgactggggttttcattttttttattgttgagtttaagacttgtttgtacagtttgaataacaatcctttatcagatatagcttttgcaaatattttctcccagtctgtggcttgttttctcattctcttgatttttttttatttttatatacttttctatgtgcagaagaaacttgtttatttcagtaattttaggtattataaataattagaagaaataattgatgcctaaaaagtcctccttagtaactggcttggtatctggtttatgactatggagaaagccttgcaggaagctaaaaaacatctcctagcaagtcacaaatatagacaagctaagaaatctcagagtaaaaaaggttattcctacagtaagtggtagatcaggttaaacttggagaagtaaactggattattatcagttcttgatatctacagacaggctaataaacacaattagatatttctggcacacaaaagccaaacttatagccacagaggatattaaaattttttcagataaagattccttttctagtcttagtataatttaggactattttatttaccacacactaggaagttcttcatgtatcaatcagcagcaatttttatgttcatgtaaataaaacaagccaaataaaagaaagcaccaagtgaatcatactgattccaaaaattgttaaattaattgatgttgtcaaatccttgccttagggacaaaaacttgaacaccaacagaactaataccttgtgctgtcctcattagagtcagggtgcacctctcaagctatgtcagagagagagagagagagagaacagaactagt

SEQ ID NO: 140 - DNA, 1314 bp, Homo sapiens
  misc_feature (32)..(32): n equals a,t,g, or c
tttcctacgtggaaaacccccctcactaaagnttaacaaaagctgccagctcgcgcgcctgcaggtcgacactagtggatccaaagaattcggmacagcagtacaaaggcatggcgatatttacccccgtcatatgtggtgttggtggcaatctggtggccattcagaccagccgaatctcaacctacctgcacatgtggagtgcacctggcgtcctgcccctccagatgaagaaattctggcccaacccgtgttctactttctgcacgtcagaaatcaattccatgtcagctcgagtcctgctcttgctggtggtcccaggccatctgattttcttctacatcatctacctggtggagggtcagtcagtcataaacagccagacctttgtggtgctctacctgctggcaggcctgatccaggtgacaatcctgctgtacctggcagaagtgatggttcggctgacttggcaccaggccctggatcctgacaaccactgcatcccctaccttacagggctgggggacctgctcggtactggcctcctggcactctgctttttcactgactggctactgaagagcaaggcagagctgggtggcatctcagaactggcatctggacctccctaactgggccccgctggtcccatttgctcattagaatttcctctcacatcagtgggatacagaattcagtttctcccttgccaggtccttgggatggttgacccctgcctctgcagtagccttttgtgagtctgctaaggtagctctcacacacctcggctctggggttgatacctgagcctgcaatagagccctgaaatcaagagcatggcttgagtgtgtgaatatgatgtgtgcacatgcttaatgagcgtgcaagtgtgcacacgtttgtggagaggagggtgttctggcctgagaaggtaaagaagaggcatgtccagtatgctttgcagggtgtgtttgctcttttccatgcccatgcaacccagattggggtggagcaggaaggagctcttttctgttcccaagcctcagaactcttgagctgtggcttacttgctgtcttcaccaggttcaagctccgtgggccacactgctgctgtgccaagaaggtgtacagcctccccaggatggggcctcatacaacccttcatctgcactcaacatttaatcgtgtccttgctgtctttttattttcctttttgtttgttagcaaaaacctctatttagatttcaataatcagagaagtgtaaaataaaacagattatattgtaaaaaaaaaaaaaaaaaaaccggcacgag

SEQ ID NO: 141 - DNA, 771 bp, Homo sapiens
  misc_feature (5)..(5): n equals a,t,g, or c
  misc_feature (26)..(26): n equals a,t,g, or c
  misc_feature (43)..(43): n equals a,t,g, or c
  misc_feature (50)..(50): n equals a,t,g, or c
  misc_feature (62)..(62): n equals a,t,g, or c
acccngctttgttgccaaaagctggntctcaaactcctggccntcaaggnatcctcctgccnttgggccttcatgagtgagtcattgcacctggcctcttcttkgttttttgttgttgttgttgttgtttttttaaataatcccactttggtgcaaatgaagtctggggcaacagcagggattctggacccaggatgccttagatcaatccccagtttccatatgcttccagtggacatggtttctaacctcacttctcctgtgtgaaatggagatgatgataacatctaccccacagggttgtggcaagaactaataagttagtaaacatctactctttttttagtagccagcctgcctgcctctcgtgccgaattcggcacgagcaaacatctcttcaaagaccatgcatatgcccttgcagtttcctcaactaagggagcaacaggacatctgctgggagctgcaggggcagtcgaggcagcttttaccacattagcttgttattatcaaaaactaccacctactttaaacctggattgttcggaaccagaatttgatctcaactatgttccactaaaggcacaggaatggaaaactgagaaaagatttattggcctcaccaattcctttggttttggtggtactaatgcaacactttgtattgctggactgtagaacatataatttgtaattaaatactgatttttaaatgctatatgtgaaaaaaaaaaaaaaaaaaaaaaaaaaaaaaaaaaaaaaaaactcgag

SEQ ID NO: 142 - DNA, 920 bp, Homo sapiens
cccgggtcgacccacgcgtccgtttttttttttttacctctttcatcactttttttttcaaagagacagggtcttgctctgttgcccagtctagagggcagtggcccgatcacggctcattgcagcctcaaacttctgggctcaagcgatcctcctgcctcagcctcctgaatagctgggactacaggcatgtgccaccacgcttggctatgtttttttggtagagatagggtcttgctgtgttgccaggctggtctcaaacccatagcctaaagcgattctcctgccttggctccccaaagtgctgggattacaggcatgagccacctcacccagcctcctcatcaccttctaacccactcttatcattttcttgttctgattgctttaccagctaactagaatgtttgggacgtggcagggcaggcagggggatggaggggccctggggacagtgtggctaaccagcctgtgcctgacctggagggcttggagctcatgccaggtgcctggcccgatgtcgccgacccggagccggttgtgcgccaggctgagctcccgcagttggtccaggccggccagaggctcgggctcgagcatccgcagctggttgcgttgcagctgcagggtgcgcaggccagtgggcaggcccatgggcagccgggttagctgattccctgccaggtcgaggctgcgcagggcacgcaaccggcggaaggcccggtggtgcacacgggcgctggccaggcggttataggccaggttaagctccgtcaggcccggtgtggcgaccaggtcacgggcacccagcgcggccacgtggttgtggggcagcaccagggcacgcaggcggcggggcagggctggaggcacgcggtccagcccattgccatagaggtgcagcgtgtgcaggccccgca

SEQ ID NO: 143 - DNA, 705 bp, Homo sapiens
ccacgcgtccgagagacgcggaccccagacatgaggaggctcctcctggtcaccagcctggtggttgtgctgctgtgggaggcaggtgcagtcccagcacccaaggtccctatcaagatgcaagtcaaacactggccctcagagcaggacccagagaaggcctggggcgcccgtgtggtggagcctccggagaaggacgaccagctggtggtgctgttccctgtccagaagccgaaactcttgaccaccgaggagaagccacgaggtcagggcaggggccccatccttccaggcaccaaggcctggatggagaccgaggacaccctgggccgtgtcctgagtcccgagcccgaccatgacagcctgtaccaccctccgcctgaggaggaccagggcgaggagaggccccggttgtgggtgatgccaaatcaccaggtgctcctgggaccggaggaagaccaagaccacatctaccacccccagtagggctccaggggccatcactgcccccgccctgtcccaaggcccaggctgttgggactgggaccctccctaccctgccccagctagacaaataaaccccagcaggccgggcaaaaaaaaaaaaaaaaaaaaaaaaaaaaaaaaaaaaaaaaaaaaaaaaaaaaaaaaaaaaaaaaaaaaaaaaaaaaaaaaaaaaaaaaaaaaaaaaaaaaaaaaaaaaaa

SEQ ID NO: 144 - DNA, 514 bp, Homo sapiens
  misc_feature (397)..(397): n equals a,t,g, or c
  misc_feature (498)..(498): n equals a,t,g, or c
  misc_feature (504)..(504): n equals a,t,g, or c
gtgctggaggctggcggggcaggccagctgagtcctgagcagcagcccagcgcagccaccgagacaccatgagagccctcacactcctcgccctattggccctggccgcactttgcatcgctggccaggcaggtgagtgcccccacctcccctcaggccgcattgcagtgggggctgagaggaggaagcaccatggcccacctcttctcacccctttggctggcagtccctttgcagtctaaccaccttgttgcaggctcaatccatttgccccagctctgcccttgcagagggagaggagggaagagcaagctgcccgagacgcaggggaaggaggatgagggccctggggatgagctggggkgaaccaggctccctttcctttgcaggtgcgaanccagcggtgcagagtccagcaaaggtgcaggtatgaagatggacctgatgggttcctggaccctcccctctcaccctggtccctcagtctcattcccccantcctgncaacttctgt

SEQ ID NO: 145 - DNA, 2156 bp, Homo sapiens
ctcaaggaacttgtacttttgagtccccatgattttcttcatactctggttccctttctacaacacaaccattgtacttaccatcacagtaatataccaatgtctcttggaccttatttcccttgtcgagaaaatatcaagctaataggagggaaaagcaatattcggcctccgcgccctgaactcaatatgtgcctcttgcccacaatggtggaaaccagtaagggcaaagatgacgtttatgatcgtatgctgctagactacttcttttcttatcatcagttcatccatctattatgccgagttgcaatcaactgtgaaaaatttactgaaacattagttaagctgagtgtcctagttgcctatgaaggtttgccacttcatcttgcacgttccccaaactttggactgagctatgccagactcagtctgctatgtcaaaaaactgcatcaagcttttgtgtgaagatcctgttttcgcagaatatattaaatgtatcctaatggatgaaagaacttttttaaacaacaacattgtctacacgttcatgacacatttccttctaaaggttcaaagtcaagtgttttctgaagcaaactgtgccaatttgatcagcactcttattacaaacttgataagccagtatcagaacctacagtctgatttctccaaccgagttgaaatttccaaagcaagtgcttctttaaatggggacctgagggcactcgctttgctcctgtcagtacacactcccaaacagttaaacccagctctaattccaactctgcagggcttttaagcaaatgcaggacttgtctgcaacagagaaactcactccaagagcaagaagccaaagaaagaaaaactaaagatgatgaaggagcaactcccattaaaaggcggcgtgttagcagtgatgaggagcacactgtagacagctgcatcagtgacatgaaaacagaaaccagggaggtcctgaccccaacgagcacttctgacaatgagaccagagactcctcaattattgatccaggaactgagcaagatcttccttcccctgaaaatagttctgttaaagaataccgaatggaagttccatcttcgttttcacagaagacatgtcaaatatcaggtcacagcatgcagaagaacagtccaacaatggtagatatgacgattgtaaagaatttaaagacctccactgttccaaggattctaccctagccgaggaagaatctgagttcccttctacttctatctctgcagttctgtctgacttagctgacttgagaagctgtgatggccaagctttgccctcccaggaccctgaggttgctttatctctcagttgtggccattccagaggactctttagtcatatgcagcaacatgacattttagataccctgtgtaggaccattgaatctacaatccatgtcgtcacaaggatatctggcaaaggaaaccaagctgcttcttgacattaggtgtagcatgtctacttttaagtccctcacccccaacccccatgctgtttgtataagttttgcttatttgtttttgtgcttcagtttgtccagtgctctctgcttgaattggcaagatagatttataggcttaattcttggtcaggcagaactccagatgaaaaaaacttgcatcttcagtatacttcctaaagggcaatcagataatggatatgttttatgtaattaagagttcactttagtggctttcatttaatatggctgtctgggaagaacagggttgcctagccctgtacaatgtaatttaaacttacagcatttttactgtgtatgatatggtgtcctctgtgccagttttgtaccttatagaggcagattgcctccgatcgctgtggttcttattatcaaaattaagtttacttgtatacggaacaaccacaagaaatttgattctgtaaagaatcctctttagctgtggcctggcagtatataaatggtgctttatttaacagaatacctgtggaggaaataaagcacacttgatgtaaaaataattgttttatttttattgacatgactgattgattgattgctattctgtgcacttaattaaactgattgtgatgacttaaaaaaaaaaaaaaaaaaaaaaaaaaaaaaaaaaaaaa

SEQ ID NO: 146 - DNA, 696 bp, Homo sapiens
  misc_feature (518)..(518): n equals a,t,g, or c
  misc_feature (521)..(521): n equals a,t,g, or c
  misc_feature (597)..(597): n equals a,t,g, or c
  misc_feature (613)..(613): n equals a,t,g, or c
  misc_feature (621)..(621): n equals a,t,g, or c
ggcacgagctgacttttttcgcggctctcggcttccactgcagccatgtcactcctcttgctggtggtctcagcccttcacatcctcattcttatactgcttttcgtggccactttggacaagtcctggtggactctccctgggaaagagtccctgaatctctggtacgactgcacgtggaacaacgacaccaaaacatgggcctgcagtaatgtcagcgagaatggctggctgaaggcggtgcaggtcctcatggtgctctccctcattctctgctgtctctccttcatcctgttcatgttccagctctacaccatgcgacgaggaggtctcttctatgccaccggcctctgccagctttgcaccagcgtggcggtgtttactggcgccttgatctatgccattcacgccgaggagatcctggagaagcacccgcgagggggcagcttcggatactgcttcgccctggcctgggtggccttccccctcgccctggtcagcggcatcatctacatccnctncggaagcgggagtgagcgccccgcctcgctcggctgcccccgccccttcccggcccccctcgccgcgcgtcctccnaaaaaataaaactttnacggcggnaaaaaaaaaaaaaaaaaaaaaaaaaaaaaaaaaaaaaaaaaaaaaaaaaaaaaaaaaaaaaaaaaaaaaaaaaaa

SEQ ID NO: 147 - DNA, 2474 bp, Homo sapiens
agatgtgtataagagacagcgtccgtcccggtccccacctcggccccgggctccgaagcggctcgggggcgccctttcggtcaacatcgtagtccaccccctccccatccccagcccccggggattcaggctcgccagcgcccagccagggagccggccgggaagcgcgatgggggccccagccgcctcgctcctgctcctgctcctgctgttcgcctgctgctgggcgcccggcggggccaacctctcccaggacgacagccagccctggacatctgatgaaacagtggtggctggtggcaccgtggtgctcaagtgccaagtgaaagatcacgaggactcatccctgcaatggtctaaccctgctcagcagactctctactttggggagaagagagcccttcgagataatcgaattcagctggttacctctacgccccacgagctcagcatcagcatcagcaatgtggccctggcagacgagggcgagtacacctgctcaatcttcactatgcctgtgcgaactgccaagtccctcgtcactgtgctaggaattccacagaagcccatcatcactggttataaatcttcattacgggaaaaagacacagccaccctaaactgtcagtcttctgggagcaagcctgcagcccggctcacctggagaaagggtgaccaagaactccacggagaaccaacccgcatacaggaagatcccaatggtaaaaccttcactgtcagcagctcggtgacattccaggttacccgggaggatgatggggcgagcatcgtgtgctctgtgaaccatgaatctctaaagggagctgacagatccacctctcaacgcattgaagttttatacacaccaactgcgatgattaggccagaccctccccatcctcgtgagggccagaagctgttgctacactgtgagggtcgcggcaatccagtcccccagcagtacctatgggagaaggagggcagtgtgccacccctgaagatgacccaggagagtgccctgatcttccctttcctcaacaagagtgacagtggcacctacggctgcacagccaccagcaacatgggcagctacaaggcctactacaccctcaatgttaatgaccccagtccggtgccctcctcctccagcacctaccacgccatcatcggtgggatcgtggctttcattgtcttcctgctgctcatcatgctcatcttcctcggccactacttgatccggcacaaaggaacctacctgacacatgaggcaaaaggctccgacgatgctccagacgcggacacggccatcatcaatgcagaaggcgggcagtcaggaggggacgacaagaaggaatatttcatctagaggcgcctgcccacttcctgcgccccccaggggccctgtggggactgctggggccgtcaccaacccggacttgtacagagcaaccgcagggccgcccctcccgcttgctccccagcccacccacccccctgtacagaatgtctgctttgggtgcggttttgtactcggtttggaatggggagggaggagggcggggggaggggagggttgccctcagccctttccgtggcttctctgcatttgggttattattatttttgtaacaatcccaaakcaaatctgtctccaggctggagaggcaggagccctggggtgagaaaagcaaaaaacaaacaaaaacaaaaccctggagtgttaggaggagagtgaaggtagaggggtgaggaagggtaaggggcagggctggtttcagctgggggctctcaccagccctcctttcagcctctacaacagagcagcttcccagacttctccaggaacccagaaacgggatggttgtcggcaaaggttgggagtggcttttcctctggtagccacacacctgagcactacggacagggaggcaggtgccaccttgacacctctcttccatagcaatgggaaagtgatgagtgcgggagtcctgaggagatgtggcctgcagacaacatgcagccatgcagggacccaggactgtaacctggggaggacgcgggtccctgcaaggaagagtagatttggagaggaaggatggaggtggactctcaccccattccccccggaaatgaacaaagccgggccctttccataggaactgcccttggagatagcagagtgtggctgcccctccttgctccagcagcagtgggagaggcactgctctggggcctgaactgcctctgcttccccccctgaggggcccctcactcttacccaagactctggattgtgcacggcaaccactcctcccatggcattgctcagcaactacttctcccttcccggccaccctgtgcccccttcctggtcccaacgccagcccttcatccttcctccctcagcagccaggcagacataacaacaaaactactaaaaggagcttcactgcagtgagctgtttcctgcccaa

SEQ ID NO: 148 - DNA, 3667 bp, Homo sapiens
ggcacgagagaaagtgaccttcctggtgggtggggtggatcagagaagaattcatggaagaggtggcatttgattagggttacttggataattatcccatactgctcattgtcctctcttctgacccccttaaccacctgaaattgctgctggtgcatccttgacccaattctgatattcttgcttgatgttgcctgcttggtgttggttgtccatatgcctggcagggcgtgctgatgcccagctgtgtccatgccaggattccagaggagaaccagccacccagcaagcaggtgaagccactcttccgccacttccgccggatagactcctgtctgcagacccgggtggccttccggggctctgatgagatcttctgccgtgtatacatgcctgaccactcttatgtgaccatacgcagccgcctttcagcatctgtgcaggacattctgggctctgtgacggagaaacttcaatattcagaggagcccgcggggcgtgaggattccctcatcctggtagctgtgtcctcctctggagagaaggtccttctccagcccactgaggactgtgttttcaccgcactgggcatcaacagccacctgtttgcctgtactcgggacagctatgaggctctggtgcccctccccgaggagatccaggtctcccctggagacacagagatccaccgagtggagcctgaggacgttgccaaccacctaactgccttccactgggagctgttccgatgtgtgcatgagctggagttcgtggactacgtgttccacggggagcgcggccgccgggagacggccaacttggagctgctgctgcagcgctgcagcgaggtcacgcactgggtggccaccgaagtgctgctctgcgaggccccgggcaagcgcgcgcagctgctcaagaagttcatcaagatcgcggccctctgcaagcagaaccaggacctgctgtctttctacgccgtggtcatggggctggacaacgccgctgtcagccgccttcgactcacctgggagaagctgccagggaaattcaagaacttgtttcgcaaatttgagaacctgacggacccctgcaggaaccacaaaagctaccgagaagtgatctccaaaatgaagccccctgtgattcccttcgtgcctctgatcctcaaagacctgactttcctgcacgaagggagtaagacccttgtagatggtttggtgaacatcgagaagctggtgagtgagtggcactgcaaacccctagtcccacaagtggggggcttgcatcctctccctctctcatcacctcccaaaaatagcagccttcctccaagtgcccagcttgcctaacagactcttgactgtctccctggtggcatcactgtggcaacccacccacaggtggcagagctgacaggcagcttgggggcaacttcacctccccctcacatggcactctgttacacccactcctttggtccttcagagaccctccagaattggagactggagggagtaaagcagagtgggagaatggcggagggggagcataagagggggagcctctttctgtgcccctttcaaggctcattccttgtcatctcccagcattcagtggccgaaaaagtgaggacaatccgcaaataccggagccggcccctttgcctggacatggaggcatcccccaatcacctgcagaccaaggcctatgtgcgccagtttcaggtcatcgacaaccagaacctcctcttcgagctctcctacaagctggaggcaaacagtcagtgagagtggaggctccagtcagacccgccagatccttgggcacctggcactcaagcactttgcacgatgtctcaaccaacatctgacatctttcccgtggagcaacttcctgctccacgggaaagaggtcgatggatttacccctggacccataagtctgttcatcctgctgaagtcccctccccattgctccttcaagccaaaactacactttgctggttcctgtcccctctgagaaaggggatagaaagctccttcctctatgtcctcccatcgagatctgttctggggatggagcttccaacttcctcttgcagcaggaaagaatgctgctcacccttctgtcttgcagagtgggattgtgggagggattggcagccttcttctccaccacctgtccagcttcttcctggtcagggctgggacccccaggaatattatgttgccgtgtgtgtgtgtgtgtgtgtgtgtgtgtgtgtgtgtgtgtgtgtgtgtgtgtgtgtgtgtcttcttttagggagcaggagtgcatctggtaattgagggtggatgttgtgtgtgctggggaggggtccttctgtttggtgctacccttgtctactctgcccctggatggtgcggggtgctttctccacccccacactccctgctcagctcctcgtgctgccctgcatgcccaggcttgtgagccaagctgctttttggggcagggagtagcagcaggtgggaggggttacccatcagcccttgcaagtcccccactcaggcctctggaaggtccagggatgggctctgatgagagggtaaaagatgctcagggaaacacaggcctcagctgcctagaggaccctccccctgccttgcagtgggctcgggtagagcagtatcaggagctagggttgtctgctgcccacactcctgctttttgggatatctaactgctaaggagggagttgacatcccccttctggctcatgtgtctgacaccaacaacatggtctctgtccctctctctttgactctccctttgtcctccccatagagctggggtggggtggatccctatacctggggcaggcagccccaaagtgggggagggggatggcagagactgtaaaggcgccactggactctggcaaggcctttattacctttactcccctccctctcccatcaccagcctcaaggcctgaggggtgcaggggctcctggcagctactgggtgaggtttcctggcacagactcacccttctttctggcaccacctctttcccttttgaagagacagcaacagccgtagcaaaagcagctgctgctcctgctatgagggtgtatatattttttacccaaagctctggaattgtacatttattttttaaaactcaaagagggaaagagccttgtatcatatgtgaacattgtatcataggtaatgttgtacagacccttttatacagtgatctgtcttgttcctgcagcaaaaatcctctatggacataggaggtgctgtgtcccatgccctcttgccctgacagtgtcccatgggcccccttctgctccctgccccctccctgctactgctgatgcactctcctctccctgcagcccctggcttcccagccttcctcctgaccccttccaacagccttggaactccagctgccaccaccctctgggtcggacactgggacccactggcccagtcttggctgctgcttacccctagccttgatgcctgcccagggacccccagccccctcccgttgccctgcagctttaacagagtgaaccatgtgtattgtacaggcgcggttgtcattgcagaaaccgctgggtggagaagaagccgataaagtctatgaatcaaaaaaaaaaaaaaaaaa

SEQ ID NO: 149 - DNA, 3048 bp, Homo sapiens
ggcacgagcaaggaggtgggagagggtagcagcatgggctacgcggttggctgccctcagtccccctgctgctgaagctgccctgcccatgcccacccaggccgtggggccaggggcctgccagggctaggagtgggcctgccgttcatgggtctctagggatttccgagatgcctgggaagagaggcttgggctggtggtgggcccggctgcccctttgcctgctcctcagcctttacggcccctggatgccttcctccctgggaaagcccaaaggccaccctcacatgaattccatccgcatagatggggacatcacactgggaggcctgttcccggtgcatggccggggctcagagggcaagccctgtggagaacttaagaaggaaaagggcatccaccggctggaggccatgctgttcgccctggatcgcatcaacaacgacccggacctgctgcctaacatcacgctgggcgcccgcattctggacacctgctccagggacacccatgccctcgagcagtcgctgacctttgtgcaggcgctcatcgagaaggatggcacagaggtccgctgtggcagtggcggcccacccatcatcaccaagcctgaacgtgtggtgggtgtcatcggtgcttcagggagctcggtctccatcatggtggccaacatccttcgcctcttcaagataccccagatcagctacgcctccacagcgccagacctgagtgacaacagccgctacgacttcttctcccgcgtggtgccctcggacacgtaccaggcccaggccatggtggacatcgtccgtgccctcaagtggaactatgtgtccacagtggcctcggagggcagctatggtgagagcggtgtggaggccttcatccagaagtcccgtgaggacgggggcgtgtgcatcgcccagtcggtgaagataccacgggagcccaaggcaggcgagttcgacaagatcatccgccgcctcctggagacttcgaacgccagggcagtcatcatctttgccaacgaggatgacatcaggcgtgtgctggaggcagcacgaagggccaaccagacaggccatttcttctggatgggctctgacagctggggctccaagattgcacctgtgctgcacctggaggaggtggctgagggtgctgtcacgatcctccccaagaggatgtccgtacgaggcttcgaccgctacttctccagccgcacgctggacaacaaccggcgcaacatctggtttgccgagttctgggaggacaacttccactgcaagctgagccgccacgccctcaagaagggcagccacgtcaagaagtgcaccaaccgtgagcgaattgggcaggattcagcttatgagcaggaggggaaggtgcagtttgtgatcgatgccgtgtacgccatgggccacgcgctgcacgccatgcaccgtgacctgtgtcccggccgcgtggggctctgcccgcgcatggaccctgtagatggcacccagctgcttaagtacatccgaaacgtcaacttctcaggcatcgcagggaaccctgtgaccttcaatgagaatggagatgcgcctgggcgctatgacatctaccaataccagctgcgcaacgattctgccgagtacaaggtcattggctcctggactgaccacctgcaccttagaatagagcggatgcactggccggggagcgggcagcagctgccccgctccatctgcagcctgccctgccaaccgggtgagcggaagaagacagtgaagggcatgccttgctgctggcactgcgagccttgcacagggtaccagtaccaggtggaccgctacacctgtaagacgtgtccctatgacatgcggcccacagagaaccgcacgggctgccggcccatccccatcatcaagcttgagtggggctcgccctgggccgtgctgcccctcttcctggccgtggtgggcatcgctgccacgttgttcgtggtgatcacctttgtgcgctacaacgacacgcccatcgtcaaggcctcgggccgtgaactgagctacgtgctgctggcaggcatcttcctgtgctatgccaccaccttcctcatgatcgctgagcccgaccttggcacctgctcgctgcgccgaatcttcctgggactagggatgagcatcagctatgcagccctgctcaccaagaccaaccgcatctaccgcatcttcgagcagggcaagcgctcggtcagtgccccacgcttcatcagccccgcctcacagctggccatcaccttcagcctcatctcgctgcagctgctgggcatctgtgtgtggtttgtggtggacccctcccactcggtggtggacttccaggaccagcggacactcgacccccgcttcgccaggggtgtgctcaagtgtgacatctcggacctgtcgctcatctgcctgctgggctacagcatgctgctcatggtcacgtgcaccgtgtatgccatcaagacacgcggcgtgcccgagaccttcaatgaggccaagcccattggcttcaccatgtacaccacttgcatcgtctggctggccttcatccccatcttctttggcacctcgcagtcggccgacaagctgtacatccagacgacgacgctgacggtctcggtgagtctgagcgcctcggtgtccctgggaatgctctacatgcccaaagtctacatcatcctcttccacccggagcagaacgtgcccaagcgcaagcgcagcctcaaagccgtcgttacggcggccaccatgtccaacaagttcacgcagaagggcaacttccggcccaacggagaggccaagtctgagctctgcgagaaccttgaggccccagcgctggccaccaaacagacttacgtcacttacaccaaccatgcaatctagcgagtccatggagctgagcagcaggaggaggagccgtgaccctgtggaaggtaacctccaaggccctgcctgtgtaattcagcccgccattgctcggtggataattaaagcatgtcaccataaaaaaaaaaaaaaaaaa

SEQ ID NO: 150 - DNA, 2199 bp, Homo sapiens
ggcacgaggtcgttctgtgggctgcggaacgcagacttcggctggacttgcctgcggtgacacctgctcccctctgagagcttcaggttctccggcctgccttcactggtttgtgtccagagccggactgattctctcaatttgcgatcttcagcctgttaaacaagaaaacgaaaaaccccttccagaaaacatggatgcatttgaaaaagtgagaacaaaattagaaacacagccacaagaagaatatgaaatcatcaatgtggaagttaaacatggtggttttgtttattaccaagaaggttgttgcttggttcgttccaaagatgaagaagcagacaatgataattatgaagttttattcaatttggaggaacttaagttagaccagcccttcattgattgtatcagagttgctccagatgaaaaatatgtggctgccaagataagaactgaagattctgaagcatctacctgtgtaattataaagctcagcgatcagcccgtaatggaagcttctttcccgaatgtgtccagttttgaatgggtaaaggacgaggaagatgaagatgttttattctacaccttccagaggaaccttcgctgtcatgacgtatatcgagccacttttggtgataacaaacgtaatgaacgcttttacacagaaaaagacccaagctactttgttttcctttatcttacaaaagacagtcgtttcctcaccataaatattatgaacaagactacttctgaagtgtggttgatagatggcctgagcccttgggacccaccagtacttatccagaagcgaatacatggggtcctttactatgttgaacacagagatgatgaattatacattctcactaatgttggagaacctacagaatttaagctaatgagaacagcggctgatacccctgcaattatgaattgggatttattttttacaatgaagagaaatacaaaagtgatagacttggacatgtttaaggatcactgtgttctatttctgaagcacagcaatctcctttatgttaatgtgattggtctggctgatgattcagttcggcctctaaagctccctccttgggcctgtggattcataatggatacaaattctgacccaaagaactgcccctttcaactttgctctccaatacgtcccccaaaatattacacatacaagtttgcagaaggcaaactgtttgaggaaactgggcatgaagacccaatcacaaagactagtcgcgttttacgtctagaagccaaaagcaaggatggaaaattagtgccaatgactgttttccacaaaactgactctgaggacttgcagaagaaacctctcttggtacatgtatatggagcttatggaatggatttgaaaatgaatttcaggcctgagaggcgggtcctggtggatgatggatggatattagcatactgccatgttcagaggtggtggtgagttaggcctccagtggcacgctgatggccgcctaactaaaaaactcaatggccttgctgatttagaggcttgcattaagacgcttcatggccaaggcttttttcagccaagtctaacaaccctgactgctttcagtgctggaggggtgcttgcaggagcattgtgtaattctaatccagagctggtgagagcggtgactttggaggcacctttcttggatgttctcaacaccatgatggacactacacttcctctgacattagaagaattagaagaatgggggaatccttcatctgatgaaaaacacaagaactacataaaacgttactgtccctatcaaaatattaaacctcagcattatccttcaattcacataacggcatatgaaaacgatgaacgggtacctctgaaaggaattgtaagttatactgagaaactcaaggaagccatcgcggagcatgctaaggacacaggtgaaggctatcagacccctaatattattctagatattcagcctggaggcaatcatgtaattgaggattctcacaaaaagattacagcccaaattaaattcctgtacgaggaacttggacttgacagcaccagtgttttcgaggatcttaagaaatacctgaaattctgaaacactgcattcaactgggaattggaaacacactgaaatatttcatagtcttacttccaattgagttagcaaaaaaaaaaaaaaaaaa

SEQ ID NO: 151 - DNA, 920 bp, Homo sapiens
gcggcacgagcggctggcagcacgactcgcgtagccgtgcgccgattgcctctcggcctgggcaatggtcccggctgccggtcgacgaccgccccgcgtcatgcggctcctcggctggtggcaagtattgctgtgggtgctgggacttcccgtccgcggcgtggagggaccttatggattttctgaacccaaacggtagtgactgtactctagtcctgttttacaccccgtggtgccgcttttctgccagtttggcccctcactttaactctctgccccgggcatttccagctcttcactttttggcactggatgcatctcagcacagcagcctttctaccaggtttggcaccgtagctgttcctaatattttattatttcaaggagctaaaccaatggccagatttaatcatacagatcgaacactggaaacactgaaaatcttcatttttaatcagacaggtatagaagccaagaagaatgtggtggtaactcaagccgaccaaataggccctcttcccagcactttgataaaaagtgtggactggttgcttgtattttccttattctttttaattagttttattatgtatgctaccattcgaactgagagtattcggtggctaattccaggacaagagcaggaacatgtggagtagtgatggtctgaaagaagttggaaagaggaacttcaatccttcgtttcagaaattagtgctacagtttcatacattttctccagtgacgtgttgacttgaaacttcaggcagattaaaagaatcatttgttgaacaactgaatgtataaaaaaattataaactggtgttttaactagtattgcaataagcaaatgcaaaaatattcaatagatgcactattcttgtttttactgcaaaaaaaaaaaaaaaagggcggccgct

SEQ ID NO: 152 - DNA, 1104 bp, Homo sapiens
ggcacgaggtcctgcgagcgacgcgcggcggggcggcgagaggaaacgcggcgccgggccgggccctggagatggtccccggcgccgcgggctggtgttgtctcgtgctctggctccccgcgtgcgtcgcggcccacggcttccgtatccatgattatttgtactttcaagtgctgagtcctggggacattcgatacatcttcacagccacacctgccaaggactttggtggtatctttcacacaaggtatgagcagattcaccttgtccccgctgaacctccagaggcctgcggggaactcagcaacggtttcttcatccaggaccagattgctctggtggagagggggggctgctccttcctctccaagactcgggtggtccaggagcacggcgggcgggcggtgatcatctctgacaacgcagttgacaatgacagcttctacgtggagatgatccaggacagtacccagcgcacagctgacatccccgccctcttcctgctcggccgagacggctacatgatccgccgctctctggaacagcatgggctgccatgggccatcatttccatcccagtcaatgtcaccagcatccccacctttgagctgctgcaaccgccctggaccttctggtagaagagtttgtcccacattccagccataagtgactctgagctgggaaggggaaacccaggaattttgctacttggaatttggagatagcatctggggacaagtggagccaggtagaggaaaagggtttgggcgttgctaggctgaaagggaagccacaccactggccttcccttccccagggcccccaagggtgtctcatgctacaagaagaggcaagagacaggccccagggcttctggctagaacccgaaacaaaaggagctgaaggcaggtggcctgagagccatctgtgacctgtcacactcacctggctccagcctcccctacccagggtctctgcacagtgaccttcacagcagttgttggagtggtttaaagagctggtgtttggggactcaataaaccctcactgactttttagcaataaagcttctcatcagggttgcaaaaaaaaaaaaaaaaaaaa

SEQ ID NO: 153 - DNA, 1370 bp, Homo sapiens
gcgtccgcccacgcgtccggcgttttacgcaggctgtggcagcgacgcggtccccagcctgggtaaagatggccccatggcccccgaagggcctagtcccagctgtgctctggggcctcagcctcttcctcaacctcccaggacctatctggctccagccctctccacctccccagtcttctcccccgcctcagccccatccgtgtcatacctgccggggactggttgacagctttaacaagggcctggagagaaccatccgggacaactttggaggtggaaacactgcctgggaggaagagaatttgtccaaatacaaagacagtgagacccgcctggtagaggtgctggagggtgtgtgcagcaagtcagacttcgagtgccaccgcctgctggagctgagtgaggagctggtggagagctggtggtttcacaagcagcaggaggccccggacctcttccagtggctgtgctcagattccctgaagctctgctgccccgcaggcaccttcgggccctcctgccttccctgtcctgggggaacagagaggccctgcggtggctacgggcagtgtgaaggagaagggacacgagggggcagcgggcactgtgactgccaagccggctacgggggtgaggcctgtggccagtgtggccttggctactttgaggcagaacgcaacgccagccatctggtatgttcggcttgttttggcccctgtgcccgatgctcaggacctgaggaatcaaactgtttgcaatgcaagaagggctgggccctgcatcacctcaagtgtgtagacattgatgagtgtggcacagagggagccaactgtggagctgaccaattctgcgtgaacactgagggctcctatgagtgccgagactgtgccaaggcctgcctaggctgcatgggggcagggccaggtcgctgtaagaagtgtagccctggctatcagcaggtgggctccaagtgtctcgatgtggatgagtgtgagacagaggtgtgtccgggagagaacaagcagtgtgaaaacaccgagggcggttatcgctgcatctgtgccgagggctacaagcagatggaaggcatctgtgtgaaggagcagatcccaggtgcattccccatcttaactgatttaacccctgaaacaacccgacgctggaagttgggttctcatccccactctacatatgtaaaaatgaagatgcagagagatgaagctactttcccagggctatatggcaagcaagtcgcaaagctgggatcccaatccagacagtctgaccgtggaacgagactcatacacgtaataaatgctctgcccccaacttgtccaccacaaaaaaaaaaaaaaaaaaaaaaaaaa

SEQ ID NO: 154 - DNA, 2066 bp, Homo sapiens
ggggaactgcagtgacagcaggagtaagagtgggaggcaggacagagctgggacacaggtatggagagggggttcagcgagcctagagagggcagactatcagggtgccggcggtgagaatccagggagaggagcggaaacagaagaggggcagaagaccggggcacttgtgggttgcagagcccctcagccatgttgggagccaagccacactggctaccaggtcccctacacagtcccgggctgcccttggttctggtgcttctggccctgggggccgggtgggcccaggaggggtcagagcccgtcctgctggagggggagtgcctggtggtctgtgagcctggccgagctgctgcaggggggcccgggggagcagccctgggagaggcaccccctgggcgagtggcatttgctgcggtccgaagccaccaccatgagccagcaggggaaaccggcaatggcaccagtggggccatctacttcgaccaggtcctggtgaacgagggcggtggctttgaccgggcctctggctccttcgtagcccctgtccggggtgtctacagcttccggttccatgtggtgaaggtgtacaaccgccaaactgtccaggtgagcctgatgctgaacacgtggcctgtcatctcagcctttgccaatgatcctgacgtgacccgggaggcagccaccagctctgtgctactgcccttggaccctggggaccgagtgtctctgcgcctgcgtcgggggaatctactgggtggttggaaatactcaagtttctctggcttcctcatcttccctctctgaggacccaagtctttcaagcacaagaatccagcccctgacaactttcttctgccctctcttgccccagaaacagcagaggcaggagagagactccctctggctcctatcccacctctttgcatgggaccctgtgccaaacacccaagtttaagagaagagtagagctgtggcatctccagaccaggcctttccacccacccacccccagttaccctcccagccacctgctgcatctgttcctgcctgcagccctaggatcagggcaaggtttggcaagaaggaagatctgcactactttgcggcctctgctcctccggwtcccccaccccagcttcctgctcaatgctgwtcagggacaggtggcgcaggtgagcctgacaggcccccacaggagcccagatggacaagcctcagcgtaccctgcaggcttcttcctgtgaggaaagccagcatcacggatctcagccagcaccgtcagaagctgaaccagcaccgtatgggctagggtgggaggctcagccacaggcagaagggtgggaagggcctggagtctgtggctggtgaggaaggaaggagggtgtattgtctagactgaacatggtacacattctgcatgtatagcagagcagccagcaggtagcaatcctggctgtccttctatgctggatcccagatggactctggcccttacctccccacctgagattagggtgagtgtgtttgctctggctgagagcagagctgagagcaggtatacagagctggaagtggaccatggaaaacatcgataaccatgcatcctcttgcttggccacctcctgaaactgctccacctttgaagtttgaactttagtccctccacactctgactgctgcctccttcctcccagctctctcactgagttatcttcactgtacctgttccagcatatccccactatctctctttctcctgatctgtgctgtcttattctcctccttaggcttcctattacctgggattccatgattcattcctcagaccctctcctgccagtatgctaaaccctccctctctctttcttatcccgctgtcccattggcccagcctggatgaatctatcaataaaacaactagagaatggtggtcagtgagacactatagaattactaaggagaagatgcctctggagtttggatcgggtgttacaggtacaagtaggtatgttgcagaggaaaataaatatcaaactgtatactaaaattacaaaaaaaaa

SEQ ID NO: 155 - DNA, 770 bp, Homo sapiens
  misc_feature (243)..(243): n equals a,t,g, or c
agagcctcgctctgttgcccactgcactccaagcctgtgcgagaaagatcctgactcaaaaaaaaagacaagatttccaagacccagttttttaaataggcaaaagaattaagtaggcccttcccaaagacgccacccaaatggccaagagcagacaaaaaggtgtcatgcctctggcaccagggaagtgcaagttactacaaaacgaaaacaaaagaatcaaatggatttaattgtcttttngttactgatttcctcctcaattgcactctggccaaagaatgtgatttgtattatttacctacatatcatatatttatacattacatcatcatctgcgaattactgacatttgctttgggtcctagtacctcatccatttttaaaagattccatgcgtgcttaagaatgttttctctaatgggcataagtagaccattctttcatattcttcatcaatgatctaagcctctatcaaaagaacctaaaacaaggacagcaaattgaacacaaaataggtagaagaaaggaaattcataagaaaagagcaaaagtcaatgaaaaagaaaacaatagaaaaaaaaaaatcaatggacccaaaagtaggtttctttggggaaaatatctgtaaaaatgataaactcttagctagtctgatcagggggaaaagaaaacacaaatggcccagagcaggaatgagaatggacatcactgcacagaggatactgtgaatgatttatgtaaattgttttgataacttagatgaaatc

SEQ ID NO: 156 - DNA, 1651 bp, Homo sapiens
  misc_feature (1643)..(1643): n equals a,t,g, or c
ctcgagtttttttttttttttttttgagacaggctctcgctctctcacccaggttggagtgcagttgtccaatcactgctcactgcagcctcaaactcctgggctcaagtgatcctcccatcctggcctcctgagttagctgggcccacagaagttcaccaccacacctgactaatttttgtatttttttgtaaaacagggtttcgccatgttgcccaggctggtcatcccatttcttaattaccatctaaagatttccactctgctgggaggagagccatgactctcccctacctttccccgcttagtttcattttatgaatgcttttttttttttttttgagacggagtctcgctctgtcgcccagactggaggagtgcagtggcacgatcttggctcactgcaagctccccattccaggttcaagccattctcctgcctcagcctccagagtagctgaggcatgagaattgcttgaacccaggaggcagaggttgcagttagccaagatcgtgccactgtactccagcctgggtgacagagtgagactctgtctcaaaaaaacaaaaaaaaaacaaacaacaacaaaaaaagaaatgcattagtgaggggatcaccttcatccttgaaaagctctgtggttgctcccctttgcagtgtgtccctgttcccctagacatgggttggcaaactttatttataaagggccacagataaacattttaggttttacagtccctaaggtctctgtcacaacccctaggtatggccatgggaaatgccaccactaagtgggttccctgatttaaaggggtaacgggatcctaaaataacagaggccaagtagcagcatgtaatcaccaaagacaaggtgggaaatctactataaatacagtaaagttgtactggtaatcagaacaccttggcccaccaggatctttggcagtaattgatcacacagtattccacaagcagcctaccaaamcagattcatctgtacaactgaaaaaactccagctctggtagtgaaaacctgactagaaaagttttgacctctcatctaatttctagacccaagtcaattaacaagcccaggtcccctgaggaaaaacctgtagtgttcccacaagtacaagtacatactgtaaatcctcatccaagcttccccaaaggccatttactagagtgactacggattagagaaaaggaaatacccagacctttcagggattactaattcctggggactcaaaatgctactgtggcctatcagtcaaagtgagtgctgacagtggtcaggtaatagatgaaatgcttagctcaagtccacctcacagtggaccccatagtacaatgggcctactttgttgttatctcctcagttcctgaataaatacttggaacagacatacttgactattggcagagctcccatattggctttctgacccaactgataagagtcattttaatagtaagggctaaatggaagcccctagaacttaccctccctactaagatattaagccagaagcaataccacatctcaagaattaaagagcttaatgtcaccatcaaaagacttgaaagaaacagggtagtgatacctattatatcttgatttaacctcgatgccgaggtncctgcagc

SEQ ID NO: 157 - DNA, 1523 bp, Homo sapiens
ggcacgagctgtcgctcatctgcctgctgggctacagcatgctgctcatggtcacgtgcaccgtgtatgccatcaagacacgcggcgtgcccgagaccttcaatgaggccaagcccattggcttcaccatgtacaccacttgcatcgtctggctggccttcatccccatcttctttggcacctcgcagtcggccgacaagctgtacatccagacgacgacgctgacggtctcggtgagtctgagcgcctcggtgtccctgggaatgctctacatgcccaaagtctacatcatcctcttccacccggagcagaacgtgcccaagcgcaagcgcagcctcaaagccgtcgttacggtggccaccatgtccaacaagttcacgcagaagggcaacttccggcccaacggagaggccaagtctgagctctgcgagaaccttgaggccccagcgctggccaccaaacagacttacgtcacttacaccaaccatgcaatctagcgagtccatggagctgagcagcaggaggaggagccgtgaccctgtggaaggtgcgtcccggccagggccacacccaagggcccagctgtcttgcctgcccgtgggcacccacggacgtggcttggtgctgaggatagcaraaccccagccatcactgctggcagcctgggcaaaccgggtgagcaacaggaggacgaggggccggggcggtgccaggctaccacaagaacctgcgtcttggaccattgcccctcccggccccaaaccacaggggctcaggtcgtgtgggccccagtgctagatctctccctcccttcgtctctgtctgtgctgttggcgacccctctgtctgtctccagccctgtctttctgttctcttatctctttgtttcaccttttccctctctggcgtccccggctgcttgtactcttggccttttctgtgtctcctttctggctcttgcctccgcctctctctctcatcctctttgtcctcagctcctcctgctttcttgggtcccaccagtgtcacttttctgccgttttctttcctgttctcctctgcttcattctcgtccagccattggtcccctctccctgccacccttccccagttcaccaaaccttacatgttgcaaaagagaaaaaaggaaaaaaaatcaaaacacaaaaaagccaaaacgaaaacaaatctcgagtgtgttgccaagtgctgcgtcctcctggtggcctctgtgtgtgtccctgtggcccgcagcctgcccgcctgccccgcccatctgccgtgtgtcttgcccgcctgccccgcccgtctgccgtctgtcttgcccgcctgcccgcctgcccctcctgccgaccacacggagttcagtgcctgggtgtttggtgatggttattgacgacaatgtgtagcgcatgattgtttttataccaagaacatttctaataaaaataaacacatggttttgcaaaaaaaaaaaaaaaaaactcgagggggggcccggtacccaattcgcccaatagtga

SEQ ID NO: 158 - DNA, 975 bp, Homo sapiens
ggcacgagccggcagcagcggaccggcgggagacgcggcttgggagctggctgtgctgcaggagctgcggcagccgccgtccttgcacctaaggaacctctgctgccagcccttcctcacttttggaaatggcgggtgaaattacagagaccggggaactctactcttcctacgttgggctggtgtacatgtttaacctcatcgtgggcacgggcgcactcaccatgcccaaggcattcgccactgccgggtggcttgtcagcctcgtcctgctggtgttcctgggcttcatgagcttcgtgaccaccacctttgtgatagaggccatggctgcagccaacgcgcamttccactggaagaggatggagaacctcaaggaggaggaagatgacgactcctccacagcctcagacagcgatgttctcatccgggacaactacgagcgggcagagaagcggcccatcctgtctgtgcgtaagtcttggggttctcgcgggcccgcacttccctccgggccammagggttccctttcttcatggagagggccctggagaggctccccgcagattctggcatttcctgcccctgggttctgaggcaggccctgtggtagactcaaaagagcacagggtttcagtcctgggcacagtcctggcccctgctggcttggccactactcagatttgcagcttggtaagttccttgacctgtgcacctcagtttccccccataccccttcctgttactgagatgattaaatgcctggttccttgcctggtgcaccctggaagctcaagtagatgtcgttctgtggcatctcttcttcctcctgccttgtgccctcatgttcatacatgcccctgccttgctgtctcctccctggtcggctgggttaggctctgacgcctgctctccctttcaccccagcaggagcatctctgaattcccttaaaaaaaaaaaaaaaaaaaaaaaa

SEQ ID NO: 159 - DNA, 2394 bp, Homo sapiens
  misc_feature (2274)..(2274): n equals a,t,g, or c
  misc_feature (2318)..(2318): n equals a,t,g, or c
  misc_feature (2369)..(2369): n equals a,t,g, or c
  misc_feature (2380)..(2380): n equals a,t,g, or c
  misc_feature (2382)..(2382): n equals a,t,g, or c
cagggaaccggttccggaattcccgggtcgacccacgcgtccgtgaaggctggtttgcgtcgacatggcggttaccctgagtctcttgctgggcgggcgcgtttgcgccgccgtcactcgctgtgggttcgcgacccggggggtggcgggcccaggccctattggccgggagccggaccccgattccgactgggagccggaggaacgggagctgcaggaggtggagaggtaccggcttctccccgggccctcagcttgaagcagggcctcgtgccccggcgctccaggccgcgcccccttggcgccgggtgtcctgccgctgcttgcgcagcggcccttgtttcttcttacccgttgttaggggcgcagcgtcaggtgttcagctcccctgggaccactggtcccttcattagtgacgtatttcatcatcagtttagagagttcggcatgcttacaggcagttattgttctaggtgttagctttctgggtgtacggagcagctctaagccggcaacatggcccggttgcccttgcgatcaaagagaagagggctgggcgctccatgatttagcctgaggctcttcaaacatccattctgcttccacgcatggcttctgccattggttctcttcccccagcaccctgaaacgacagaaacaagcaatccgattccagaaaattcggaggcaaatggaggcgcctggtgccccgcccaggaccctgacgtgggaagccatggagcagatacggtatttacatgaggaatttccagagtcctggtcagttcccaggttggctgaaggctttgatgtcagcactgatgtgatccgaagagttttaaaaagcaagtttttacccacattggagcagaagctgaagcaggatcaaaaagtccttaagaaagctgggcttgcccactcgctgcagcacctccggggctctggaaatacctcaaagctgctccctgcaggccactctgtatcaggctctttgcttatgccagggcatgaagcctcatctaaagacccaaatcacagcacagctttgaaagtgatagagtcagacactcacaggacaaatacaccaaggagaaggaagggaagaaataaagaaatccaggacctggaggagagctttgtgcctgttgctgcacccctaggtcatccaagagagctgcagaagtactccagtgattctgagagccccagaggaactggcagtggtgcgttgccaagtggtcagaagctggaggagttgaaggcagaggagccagataacttcagcagcaaagtagtgcagaggggccgagagttctttgacagcaacgggaacttcctgtacagaatttgagtcggggcttggcttatggagatgcctcgtgaaacacagctgggcaagtattaatgtatatggaacagcctggatttctgcatatggataagccaccttggaataggaagaggtgttgagcctggactgtgggaggaaagagctgcgtggatagattcaaacttcctgtggtagtgctcccagtctgacctctgtagaccttcagtactcactcttcttgcttaggctctctgtgtgttgaaagccatcccgtgttgcatgtgttgttacaattttctgtgatacttgcaatttatgtttgagaagaagtgaaaagtttgccttctgacctcatttccttcttgatcagtgaacactaacattttggggacaacttagtcaattggttttccttacaacaaaataaagtaaaatgtagcaaaaaaaaaaaaaaaaaaaaaaaacycgrgggggggcccggwacccaattsgcccwawagkgrgycgtattacaattcactggccgtcgttttacaacgtcgtgactgggaaaaccctggcgttacccaacttaatcgccttgcagcacatccccctttcgccagctggcgtaatagcgaagaggcccgcaccgatcgcccttcccaacagttgcgcagcctgaatggcgaatggcaaattgtaagcgttaatattttgttaaaattcgcgttaaatttttgttaaatcagctcattttttaaccaataggccgaaatcggcaaaatcccttataaatcaaaagaatagaccgagatagggttgagtgttgttccagtttggaacaagagtccactattaaagaacgtggactccaacgtcaaagggcgaaaaaccgtctatcagggcgatggcccactacgtgaaccatcaccctaatcaagttttttggggtcgaggtgccntaaagcactaaatcggaaccctaaagggagcccccgatttaaancttgacggggaaagcccggcgaacgtggccagaaaggaagggaagaaagcnaaaggagcggncnctaggccctggc

SEQ ID NO: 160 - DNA, 1776 bp, Homo sapiens
  misc_feature (1407)..(1407): n equals a,t,g, or c
tcgagtttttttttttttttttttgctgggactttctgtttttttcatttgtttcaagtatgtttataattgctcagccttcttgtgatggctactttaaaataattgtcagacaattcacatctgtattctcctggtgtctattgatgttcatttttcatttcagttgagattttcctgattcttttctggtcatgagggacattttgttgaaatttggatatttggggtattataaatctttagatcttatttaaatcttcagccagagcaggctttctgtgaccctaaaaatcaacactcacgatacttttggcatcatttatggagacgcagagtggtaaatattttgaattgcctgacacacacattcccagctgaggctgaacaatgagccactctgccttctgtttccactgtgtacttaaagtgtccttctgtgatagtcakgcattgctaatgatggatgcctcatgagaaagtgtcatcagtgattcattatgtgcaaacatcatagtgtgtacttacacaaagctaaatggtacagtctactacaaacccagactataggagatagcctattgytccttggctacaaacctgtacaacatgttactgtactgaatactgcaggcaattataacaccatagctatgtatttgggtatctaagcatatcttaatagaaaagatatagtaaaaatatggtattataatctcatgggaccaccactggatatgcagtctgacatcgatcaaaatgttgtatgtggcacatgactacatatttattgcattttctgcatttttgtacttttgctttggtaatgtggtgttttcaaatgaccccytcaacatgtttagtgttcattcctacatgcaaaaaggctgcaatatgacttttggagaaaaaatgtatattagataaacttaattcaagtataagttaaagtgctactggctatgagttcaatgctaatgaatcaaatgttaaatacagtatctttaaacagaaacacattaaaaagatwacgtattgatcagctgacaaaaacgttatcagtggctcatagaaagctaattttgtatttcccctaggagcaatgattcaccatttgctaattctgtgctggaagtgattttatacgacataactaccacaaataaaaggaaccagctgtatgcttttagaaagcagacttaagagaaaaaagatgatctaaatcacataattaataagatagatctaattgataaatgttgaattctatacactgaaaattaataatatacttcaagaccccatgaaactttttagctgatacataacagggtgcaaacaaaaatctcaatacatttttgataggagaaataaatttatcacactgtctaatcatcatgcaataanataaaaattaataataagcaaaaactgcctcctgaaaacaaaccgagtcaaaactataaaacaaaacgaagttgcagaactctagaaaatcataacagaatactgaacatcacaacatatgagagagctaaagcaatgcttataagaaagcctatagcctgctaagaataaatgtaaataagttaattctgtatccaaaaagctaggagaaacaaaataaagcctatccaagtattagaatgaagatgaaaccatatattaatagattttaaacaaaaacacattagaatgaataaatataagcactggtcctttgggacaaaacaataacattaataaaaatcacaaagctttaaagaaactcgtgcc

SEQ ID NO: 161 - DNA, 1699 bp, Homo sapiens
  misc_feature (1511)..(1511): n equals a,t,g, or c
  misc_feature (1535)..(1535): n equals a,t,g, or c
  misc_feature (1595)..(1595): n equals a,t,g, or c
aacgcccttgagtttgctgactggattgggcggctgaagcgtcgtcagatctatgtgattagcactgtaacccgccccgtgcccctggagcactatcttttcacagggaacagctccaagacccagggggagctctttttgttgctggactcccgaggagccttccatacaaaagggtactatgcagctgtggaggccaagaaggagagaatgagcaaacacgcccagacctttggggccaagcagcccacacatcaggggggccctgcacaggaccgcggagtgtacctgtccctcctggcctccctccgcacacgtgcccagttgcccgtggtggtgttcaccttctcccggggccgctgtgatgagcaggcctcaggcctcacctcccttgacctcaccaccagttcggagaagagcgagatccacctcttcctgcagcgctgccttgctcgcctccgtggctctgaccgccagctgccccaggtcctgcacatgtcagagctcctgaatcgcggcctgggtgtgcaccatagcggcatcctgcccatcctcaaggagatcgtggagatgctcttcagccgtggcctggtcaaggtcttgtttgccacagagacctttgccatgggagtaaacatgcctgctcgtacagtagtgtttgactccatgcgcaaacacgatggctccaccttccgggacctgctccctggggagtatgtgcagatggcaggccgggcagggcggaggggcctggaccccacaggcaccgttatcctgctctgcaagggccgagtgcccgagatggcagacctgcaccgcatgatgatggggaagccgtcccagctgcagtcccagttccgcctcacgtacactatgatcctcaacttgctgcgagtggatgccctcagggtggaggacatgatgaagaggagcttctctgagtttccctcccgcaaagacagcaaggcccatgaacaggccctggctgaactgaccaagaggctgggagctttggaggagcctgacatgactggccaactggtcgacctgcctgaatattacagctggggggaggaactgacagagacccagcacatgatccagcgacgcatcatggagtctgtgaacgggctgaagtctctctcagcaggaagggtggtggttgtgaagaatcaggagcatcacaacgcattgggagtgatcctacaggtctcctcgaactccaccagcagagtattcacaaccctggtcttgtgtgataagcccttgtcccaggacccacagracagggggccagccactgcagaggtgccctatccagatgacctcgtgggattcaagctgttcctgcctgaagggccttgtgaccacaccgtggtcaagctccagccaggagatatggctgccatcaccaccaaggtgctccgggtgaatggggagaagatcttggaggacttcagcaagaggcagcagccaaaattcaagtcagagatgctagggaggcccttctnctycagaggggcacgtagaggcangggaggggcagtggtctgggagtttcctycarcctgagggagaccatgaartggtggggnttgtaagtgaagggggcttcccccagcctaagggagactgtgaartggaagggttgtagtaaagaaggctttccacaagcctgaagggaaggctttttggggga

SEQ ID NO: 162 - DNA, 613 bp, Homo sapiens
  misc_feature (40)..(40): n equals a,t,g, or c
  misc_feature (532)..(532): n equals a,t,g, or c
  misc_feature (566)..(566): n equals a,t,g, or c
  misc_feature (580)..(580): n equals a,t,g, or c
  misc_feature (583)..(583): n equals a,t,g, or c
ctggagctccaccgcggtggcggccgctctagactagtgnatccccccgggctgcaggaattcggcacgagattttaattaaattctttgtatttttggcttatttgatactatatattatgtaatatgttcttcttgctaatttccatggtatctttcttattttttcttatatttaatgtaccaacaccactcagacttgatatctgaaaatcgaaggatttttttaaaaaattcaatttcttaagcatgcaagattcaaaatttggattttcaaaggtttagtatccttattcatgaaagataattccaagtaataatgcttctgttgtaccccaaaattgagtcatcagaattattcttctgcatatttccctgtaatctttttgttatgagacaggtgttaattattaaaattaagaatgatgctgtcatgaatatgggatgtttgtaacatttaaaataaaattttctgtgattacaaaaaaaaaaaaaaaaaactcgagggggggcccggtacccaattcgcccnatagtgagtcgtattacaattcactggccgtcgntttaacaacgtcgngancgggaaaacccaggcgttacccaacttaat

SEQ ID NO: 163 - DNA, 2291 bp, Homo sapiens
ctgggaggcagagccgccgccaagggggcctcggttaaacactggtcgttcaatcacctgcaagacgaaggaggcaaggatgctgttggcctgggtacaagcattcctcgtcagcaacatgctcctagcagaagcctatggatctggaggctgtttctgggacaacggccacctgtaccgggaggaccagacctcccccgcgccgggcctccgctgcctcaactggctggacgcgcagagcgggctggcctcggcccccgtgtcgggggccggcaatcacagttactgccgaaacccggacgaggacccgcgcgggccctggtgctacgtcagtggcgaggccggcgtccctgagaaacggccttgcgaggacctgcgctgtccagagaccacctcccaggccctgccagccttcacgacagaaatccaggaagcgtctgaagggccaggtgcagatgaggtgcaggtgttcgctcctgccaacgccctgcccgctcggagtgaggcggcagctgtgcagccagcgattgggatcagccagcgggtgcggatgaactccaaggagaaaaaggacctgggaactctgggctacgtgctgggcattaccatgatggtgatcatcattgccatcggagctggcatcatcttgggctactcctacaagagggggaaggatttgaaagaacagcatgatcagaaagtatgtgagagggagatgcagcgaatcactctgcccttgtctgccttcaccaaccccacctgtgagattgtggatgagaagactgtcgtggtccacaccagccagactccagttgaccctcaggagggcagcaccccccttatgggccaggccgggactcctggggcctgagcccccccagtgggcaggagcccatgcagacactggtgcaggacagcccaccctcctacagctaggaggaactaccactttgtgttctggttaaaaccctaccactcccccgcttttttggcgaatcctagtaagagtgacagaagcaggtggccctgtgggctgagggtaaggctgggtagggtcctaacagtgctccttgtccatcccttggagcagattttgtctgtggatggagacagtggcagctcccacagtgatgctgctgctaagggcttccaaacattgcctgcacccctggaactgaaccagggatagacggggagctcccccaggctcctctgtgctttactaagatggcctcagtctccactgtgggcttgagtggcatacactgttattcatggttaaggtaaagcaggtcaagggatggcattgaaaaaatatatttagtttttaaaatatttgggatggaactccctactgacctctgagaactggaaacgagtttgtacagaagtcagaactttgggttgggaatgagatctaggttgtggctgctggtatgcttcagcttgctggcaatgatgtgccttgacaaccgtgggccaggcctgggcccagggactcttcctgtttcataaggaaaggaagaattgcactgagcattccacttaggaagaggatagagaaggatctgctccgcctttggccacaggagcagaggcagacctgggatgccccagtttctcttcagggatggatagtgacctgtcttcattttgcacaggtaagagagtagttagctaacctatgggaattatactgtggggccttgtgagctgcttctaagaggctaacctggaaactaagctcagaggcaaggtaataaagcacttcagggcttgctccccaagtgggcctgatttagcaggtggtcctgcgggcgtccaggtcagcaccttcctgtagggcactggggctagggtcacagcccctaactcataaagcaatcaaagaaccattagaaagggctcattaagccttttggacacaggaccccagagaggaaaaagtgacttgcccaaggtcgtaagcaagctactggcatggcaagagcccagcttcctgacggagcgcaacatttctccactgcactgtgctagcagctcagcagggcctctaacctgtgatgtcacactcaagaggccttggcagctcctagccatagagcttcctttccagaacccttccactgcccaatgtggagacaggggttagtggggctttctatggagccatctgctttggggacctagacctcaggtggtctcttggtgttagtgatgctggagaagagaatattactggtttctacttttctataaaggcatttctctataaaaaaaaaaaaaaaaaa

SEQ ID NO: 164 - DNA, 1282 bp, Homo sapiens
  misc_feature (21)..(21): n equals a,t,g, or c
gcgagtaacaagaagctgggnagctccaccgcggtggcggccgctctagaactagtggatcccccgggctgcaggaattcggcacgagcggcacgagcggcacgagggccagttcccacggctcagcctgcacttccacctgcggaggaaccgcggcgtgtacatcatccaatcctacatgccctccgtcctgctggtcgccatgtcctgggtctccttctggatcagccaggcggcggtgcccgccagggtgtctctaggcatcaccacggtgctgacgatgaccacgctcatggtcagtgcccgctcctccctgccacgggcatcagccatcaaggcactggacgtctacttctggatctgctatgtcttcgtgtttgccgccctggtggagtacgcctttgctcatttcaacgccgactacaggaagaagcagaaggccaaggtcaaggtctccaggccgagggcagagatggacgtgaggaacgccattgtcctcttctccctctctgctgccggcgtcacgcaggagctggccatctcccgccggcagcgccgcgtcccggggaacctgatgggctcctacaggtcggtgggggtggagacaggggagacgaagaaggagggggcagcccgctcaggaggccaggggggcatccgtgcccggctcaggcccatcgacgcagacaccattgacatttacgcccgcgctgtgttccctgcggcgtttgcggccgtcaatgtcatctactgggcggcatacgccatgtgagcacaggactcaggccaccctcgcttgtcctggcgcccggcggcagctgcccagaaacttcctgggagaaagagccctcgggctgccttcccctctgcgtgtttcgaagtgggatgacagtcggccacggaaaacaagaggaagcctcggcctccctgagctctgaccccagcctcacccgaaaggccagcctggggctctccggcaggcagcccgagacctgcacagatgaaggagcagaggttctgaccgagaggctgagccaggccggggtctgggcccttcagggagccgcggatttttatgttcagaaagtgatcctggtttctaggtctttgctctgcaggatcgggatcagagcgtgggaggaggtgggggtggacgtccatccggtgaacagtgaaggcgtttgtgaggtctttctggtcccagcatgaaataaagccttggcctgggggccgcttcattctcaaaaaaaaaaaaaaaaaaaaaaaaaaaaaaaaaaaaaaa

SEQ ID NO: 165 - DNA, 2649 bp, Homo sapiens
ggcacgagctcgtgccgcgcgcgtggacacggggccctcgcccaagctgccaccgagccgcggcccccgccctcgacccttctctctcccgtattccgagctctctggaaagagaggaaactccagggaagatgtggctgaagctttttttcttgctcctctatttcctggtcctgttcgtcctggccaggttttttgaggccattgtgtggtatgaaactggcatctttgccacccagctggtggatccggtggcgctgagcttcaagaagctgaagaccattttggagtgccgggggttgggctactcagggttgcccgagaagaaggatgtccgggagctggtggaaaagtcaggtgacttgatggagggtgagctctattctgctctcaaggaagaagaagcatccgaatcggtttctagtaccaatttcagtggtgaaatgcacttctatgagcttgtggaagacacaaaagatggcatctggctggttcaggtcatagcaaatgacagaagtcccttggtgggcaaaattcactgggagaaaatggttaaaaaggtgtcaagatttggaatacgtacaggcacatttaactgttccagtgatcccagatattgcaggagaagaggctgggtccgatccacactcattatgtctgttccacaaacaagtacttcaaaagggaaagtcatgcttaaagaatacagtggacgcaagattgaagtagagcacatttttaaatggataactgctcatgcagcttctcggatcaaaaccatttataatgctgaacacttgaaagaagaatggaataaaagtgatcagtattggttaaaaatatacctatttgcaaaccttgaccagcccccagctttcttctctgcactaagtataaagtttactggaagagttgagtttatttttgttaatgtagaaaattgggacaacaagagttatatgacagatattggcatatataatatgccatcatacatacttagaactcctgaaggaatttacaggtatggaaaccacacaggcgaatttatatcccttcaggccatggattcatttttgcgctcattacaacccgaggtaaatgatctgtttgttttgagcttggttctagttaatcttatggcttggatggacttatttattacacaaggagctaccataaagcgatttgtggttctcataagcactttagggacatataattctctattaattatttcctggctacctgtgttgggctttttacagctaccttacttagatagcttttatgaatatagcttaaaattgttgagatattccaatacaaccacactggcttcatgggtaagggcagactggatgttttactcttcacacccagccctgtttctcagtacataccttggtcatggtttactaattgattactttgagaagaagagaaggcgcaacaacaacaatgatgaagtcaatgccaataacttagaatggttatcaagtctgtgggactggtacaccagctacctcttccacccgattgcttcttttcagaactttcctgtagaatctgattgggacgaagaccctgacttattcttggagcgcttagctttccctgacctttggcttcaccctctgataccaactgattatattaaaaacttaccaatgtggcgatttaaatgtcttggagtccagtctgaagaggaaatgtcggaggggtctcaagatactgaaaatgactcggaaagtgagaacacagacactttgagtagtgagaaggaagtatttgaagataagcaaagcgtacttcacaattctccaggaacagcaagtcactgtgatgctgaggcttgttcatgtgccaataaatattgtcagaccagcccatgtgaaaggaaggggaggtcatatggatcatataacactaatgaagatatggaacctgattggttaacttggcctgctgatatgctgcactgtactgaatgtgttgtttgcctagagaattttgaaaatggatgtttgctaatggggttgccttgtggtcatgtgtttcatcagaattgcattgtgatgtggttggctgggggccgacattgttgccctgtttgccggtggccttcttataaaaaaaagcagccatatgcacaacaccagcccttgtcaaatgatgtcccatcttaaccatgtgcaatttgtcctttataagctttgagtatcttacagcttgccttttttaatgttagtcacaatgtttttgtggtttgaagtttagtttaatgttagtgcagtgacgggaaatacacattatgctaatgttgatgacagaatttatttggttgccttgtgtgttaattgaatgcatacctaattgtaaaatttttttatttacaacattggaaattcagaagttaatgtttttttgtaagcacaaaagaagtattatagaaatttatcctagcaagactttacaagataggatcaaattctaatggaattgagccggtttcttatcctaaatgtttcctccctttttacaatctctgtccagcacctcttggttaaataatgtatgctgtgagacatgaaattaaaacagacctatgaaataaattattttaaaaccaaaaaaaaaaaaaaaaaa

SEQ ID NO: 166 - DNA, 374 bp, Homo sapiens
gatgtttgtctacatcgtcttcttgttcgggttttccacagcggtggtgacgctgattgaagacgggaagaatgactccctgccgtctgagtccacgtcgcacaggtggcgggggcctgcctgcaggccccccgatagctcctacaacagcctgtactccacctgcctggagctgttcaagttcaccatcggcatgggcgacctggagttcactgagaactatgacttcaaggctgtcttcatcatcctgctgctggcctatgtaattctcacctacatcctcctgctcaacatgctcatcgccctcatgggtgagactgtcaacaagatcgcacaggagagcaagaacatctggaagctgcaaagagccatca

SEQ ID NO: 167 - DNA, 1796 bp, Homo sapiens
cccccgggctgcaggaattcggcacgagattttttggaggttgggaaagttgctagaggcttcagaactccagcctaatggatcccaaactcgggagaatggctgcgtccctgctggctgtgctgctgctgctgctgctggagcgcggcatgttctcctcaccctccccgcccccggcgctgttagagaaagtcttccagtacattgacctccatcaggatgaatttgtgcagacgctgaaggagtgggtggccatcgagagcgactctgtccagcctgtgcctcgcttcagacaagagctcttcagaatgatggccgtggctgcggacacgctgcagcgcctgggggcccgtgtggcctcggtggacatgggtcctcagcagctgcccgatggtcagagtcttccaatacctcccgtcatcctggccgaactggggagcgatcccacgaaaggcaccgtgtgcttctacggccacttggacgtgcagcctgctgaccggggcgatgggtggctcacggacccctatgtgctgacggaggtagacgggaaactttatggacgaggagcgaccgacaacaaaggccctgtcttggcttggatcaatgctgtgagcgccttcagagccctggagcaagatcttcctgtgaatatcaaattcatcattgaggggatggaagaggctggctctgttgccctggaggaacttgtggaaaaagaaaaggaccgattcttctctggtgtggactacattgtaatttcagataacctgtggatcagccaaaggaagccagcaatcacttatggaacccgggggaacagctacttcatggtggaggtgaaatgcagagaccaggattttcactcaggaacctttggtggcatccttcatgaaccaatggctgatctggttgctcttctcggtagcctggtagactcgtctggtcatatcctggtccctggaatctatgatgaagtggttcctcttacagaagaggaaataaatacatacaaagccatccatctagacctagaagaataccggaatagcagccgggttgagaaatttctgttcgatactaaggaggagattctaatgcacctctggaggtacccatctctttctattcatgggatcgagggcgcgtttgatgagcctggaactaaaacagtcatacctggccgagttataggaaaattttcaatccgtctagtccctcacatgaatgtgtctgcggtggaaaaacaggtgacacgacatcttgaagatgtgttctccaaaagaaatagttccaacaagatggttgtttccatgactctaggactacacccgtggattgcaaatattgatgacacccagtatctcgcagcaaaaagagcgatcagaacagtgtttggaacagaaccagatatgatccgggatggatccaccattccaattgccaaaatgttccaggagatcgtccacaagagcgtggtgctaattccgctgggagctgttgatgatggagaacattcgcagaatgagaaaatcaacaggtggaactacatagagggaaccaaattatttgctgcctttttcttagagatggcccagctccattaatcacaagaaccttctagtctgatctgatccactgacagattcacctcccccacatccctagacagggatggaatgtaaatatccagagaatttgggtctagtatagtacattttcccttccatttaaaatgtcttgggatatctggatcagtaataaaatatttcaaaggcaaaaaaaaaaaaaaaaaaaaa

SEQ ID NO: 168 - DNA, 2245 bp, Homo sapiens
gtcccggtccggaattcccgggtcgacccacgcgtccgcaggcatggcggcggctatgccgcttgctctgctcgtcctgttgctcctggggcccggcggctggtgccttgcagaacccccacgcgacagcctgcgggaggaacttgtcatcaccccgctgccttccggggacgtagccgccacattccagttccgcacgcgctgggattcggagcttcagcgggaaggagtgtcccattacaggctctttcccaaagccctggggcagctgatctccaagtattctctacgggagctgcacctgtcattcacacaaggcttttggaggacccgatactgggggccacccttcctgcaggccccatcaggtgcagagctgtgggtctggttccaagacactgtcactgatgtggataaatcttggaaggagctcagtaatgtcctctcagggatcttctgcgcctctctcaacttcatcgactccaccaacacagtcactcccactgcctccttcaaacccctgggtctggccaatgacactgaccactactttctgcgctatgctgtgctgccgcgggaggtggtctgcaccgaaaacctcaccccctggaagaagctcttgccctgtagttccaaggcaggcctctctgtgctgctgaaggcagatcgcttgttccacaccagctaccactcccaggcagtgcatatccgccctgtttgcagaaatgcacgctgtactagcatctcctgggagctgaggcagaccctgtcagttgtatttgatgccttcatcacggggcagggaaagaaagactggtccctcttccggatgttctcccgaaccctcacggagccctgccccctggcttcagagagccgagtctatgtggacatcaccacctacaaccaggacaacgagacattagaggtgcacccacccccgaccactacatatcaggacgtcatcctaggcactcggaagacctatgccatctatgacttgcttgacaccgccatgatcaacaactctcgaaacctcaacatccagctcaagtggaagagacccccagagaatgaggcccccccagtgcccttcctgcatgcccagcggtacgtgagtggctatgggctgcagaagggggagctgagcacactgctgtacaacacccacccataccgggccttcccggtgctgctgctggacaccgtaccctggtatctgcggctgtatgtgcacaccctcaccatcacctccaagggcaaggagaacaaaccaagttacatccactaccagcctgcccaggaccggctgcaaccccacctcctggagatgctgattcagctgccggccaactcagtcaccaaggtttccatccagtttgagcgggcgctgctgaagtggaccgagtacacaccagatcctaaccatggcttctatgtcagcccatctgtcctcagcgcccttgtgcccagcatggtagcagccaagccagtggactgggaagagagtcccctcttcaacagcctgttcccagtctctgatggctctaactactttgtgcggctctacacggagccgctgctggtgaacctgccgacaccggacttcagcatgccctacaacgtgatctgcctcacgtgcactgtggtggccgtgtgctacggctccttctacaatctcctcacccgaaccttccacatcgaggagccccgcacaggtggcctggccaagcggctggccaaccttatccggcgcgcccgaggtgtccccccactctgattcttgccctttccagcagctgcagctgccgtttctctctggggaggggagcccaagggctgtttctgccacttgctctcctcagagttggcttttgaaccaaagtgccctggaccaggtcagggcctacagctgtgttgtccagtacaggagccacgagccaaatgtggcatttgaatttgaattaacttagaaattcatttcctcacctgtagtggccacctctatattgaggtgctcaataagcaaaagtggtcggtggctgctgtattggacagcacagaaaaagatttccatcaccacagaaaggtcggctggcagcactggccaaggtgatggggtgtgctacacagtgtatgtcactgtgtagtggatggagtttactgtttgtggaataaaaacggctgtttccgtgaaaaaaaaaaaaaaaaaaaaaaagggcggccgctctagaggatccctcga

SEQ ID NO: 169 - DNA, 2726 bp, Homo sapiens
gtccggtctcaagcaccagtcttcaccgcggaaagcatgttgtggctgttccaatcgctcctgtttgtcttctgctttggcccagggaatgtagtttcacaaagcagcttaaccccattgatggtgaacgggattctgggggagtcagtaactcttcccctggagtttcctgcaggagagaaggtcaacttcatcacttggcttttcaatgaaacatctcttgccttcatagtaccccatgaaaccaaaagtccagaaatccacgtgactaatccgaaacagggaaagcgactgaacttcacccagtcctactccctgcaactcagcaacctgaagatgggaagacacaggctcttacagagcccagatatccacaaagacctctgcaaagctgtccagttacactttgaggatattaagacaactgaggaacatacaagttaccaatcacagtcagctatttcagaatatgacctgtgagctccatctgacttgctctgtggaggatgcagatgacaatgtctcattcagatgggaggccttgggaaacacactttcaagtcagccaaacctcactgtctcctgggaccccaggatttccagtgaacaggactacacctgcatagcagagaatgctgtcagtaatttatccttctctgtctctgcccagaagctttgcgaagatgttaaaattcaatatacagataccaaaatgattctgtttatggtttctgggatatgcatagtcttcggtttcatcatactgctgttacttgttttgaggaaaagaagagattccctatctttgtctactcagcgaacacagggccccgagtccgcaaggaacctagagtatgtttcagtgtctccaacgaacaacactgtgtatgcttcagtcactcattcaaacaggggaaacagaaatctggacacctagagaaaatgatactatcacaatttactccacaattaatcattccaaagagagtaaacccactttttccagggcaactgcccttgacaatgtcgtgtaagttgctgaaaggcctcagaggaattcgggaatgacacgtcttctgatcccatgagacagaacaaagaacaggaagcttggttcctgttgttcctggcaacagaatttgaatatctaggataggatgatcacctccagtccttcggacttaaacctgcctacctgagtcaaacacctaaggataacatcatttccagcatgtggttcaaataatattttccaatccacttcaggccaaaacatgctaaagataacacaccagcacattgactctctctttgataactaagcaaatggaattatggttgacagagagtttatgatccagaagacaaccacttctctccttttagaaagcagcaggattgacttattgagaaataatgcagtgtgttggttacatgtgtagtctctggagttggatgggcccatcctgaacaagttgagcatcccttgtctgaaatgcttgggattagaaatgtttcagatttcaattttttttcagattttggaatatttgcattatatttagcggttgagtatccaaatccaaaaatccaaaattcaaaatgctccaataagcatttcccttgagtttcattgatgtcgatgcagtgctcaaaatctcagattttggagcattttggatattggatttttggatttgggatgctcaacttgtacaatgtttattagacacatctcctgggacatactgcctaaccttttggagccttagtctcccagactgaaaaaggaagaggatggtattacatcagctccattgtttgagccaagaatctaagtcatccctgactccagtgtctttgtcaccaggccctttggactctacctcagaaatatttcttggaccttccacttctcctccaactccttgaccaccatcctgtatccaaccatcaccacctctaacctgaatcctaccttaagatcagaacagttgtcctcacttttgttcttgtccctctccaacccactctccacaagatggccagagtaatgtttttaatataaattggatccttcagtttcctgcttaaaaccctgcaggtttcccaatgcactcagaaagaaatccagtttccatggccctggatggtctggcccacctccagcctcagctagcattacccttctgacactctctatgtagcctccctgatcttctttcagctcctctattaaaggaaaagttctttatgttaattatttacatcttcctgcaggcccttcctctgcctgctggggtcctcctattctttaggtttaattttaaatatgtcacctcctaagagaaaccttcccagaccactctttctaaaatgaatcttctaggctgggcatggtggctcacacctgtaatcccagtactttgggaggccaaggggggagatcacttgaggtcaggagttcaagaccagcctggccaacttggtgaaaccccgtctttactaaaaatacaaaaaaattagccaggcgtggtggtgcacccctaaaatcccagctacttgagagactgaggcaggagaatcacttgaacccaggaggtggaggttccagtgagccaaaatcatgccaatgtatttccagtctgggtgacagagtgagactctgtctcaaaaaataaataaataaaataaaatgaaatagatcttaaaaaaaaaaaaaaaaa

SEQ ID NO: 170 - DNA, 917 bp, Homo sapiens
tcgacccacgcgtccgctaagctaagcactatatgtatatatcacattttattccttgtagcaacttccgtgaagtgaatactgtatttttatcttcatttaactgaaatatctgaagctcaaaggttaactgaattatctaagaacaagccagtatcaagaccaaaccttgtgttctgctgtactttatgactttcctttggattttgtgggggtttttttgttttgtttttatattgcagaatggactttgaatagagatttcaccttttgttattgcggaagaggagagggawtgcagaggatarggttcttaatggtttttgttttacttatagaatgtgctgacatagaattttgaattccactttgacacataggaggcaaggagaaagttttgtttttaacattttcttcagaagtagccattcagtggtactgctggcattggtgaagcctgtgggggagcctgaactttgctccattttacaggtttatgtggaacatagcactctgaccaggatttgtaatggtgactaaaaacttctcattatatcagataaaaacttcaaatttcaaatcaagactgtttattatgacagtaactagttaatcgatagacaacaaagtgaagtagaaaattcattagccccaaagcaaaagtcctgggttctatgacaggctttgtggaaccttggacaagtctcgtaactttagttccctacaaaatgagggtgttgcattgaccctcatcctctagtttctgaaatactattgactctgaatatttctaattatttttctttattgtaggattttaatataattgaggaagctcttatccgaagagtcttagaccggtcacttcttgaatatgtgaatcactcgaacaccacataattttattaaaaaaaaaa

SEQ ID NO: 171 - DNA, 2546 bp, Homo sapiens
ccacgcgtccgaaaaaaggggggaggtggaacccccatggtggacatgcctggtcccaggttgccctttctattggtggagctgctggcattcccccgtgctagcttccagccttcttatctatgtttgcagcccgatattccaggctgctctttgttagaaaagaagtgatttcttggactgctttttgttagaagggaagttctgctgaggactcttttgccctcactatctgcctaaaataattttctatctctgtatcaccattcttgcaggtgggtcacatgtgttagtggcagagcaaggatgagaacccaggctccctaccttctagaccagcattctttctcttactcaagcctgtttcttttttttttttaagtagagatttgctaatttactactttttctacactgactttttctgcaccctctttcctcacttcagctggctcctaagccttttatctcatgttcctatcttcatctaattatctaagtcctatgatgttcgaatgatgccaactatctgttttatagtaatatatcatttagaaataataatggcaacaacaactgatgataataatagcagcagcagcatttactgtgtgcttattctgtgccatgcactatgctgactgctttgtatctattacctacctttttcctaacagcaaccctacgaggtaggtactattcttttttccccgtttcagacatgaggaaaaagaggcttggagcatttagtagcttgcccatgttcagacagctggtaagtatgggaaccagaatagaatccatcaggctgactccaaagcccaggctcttgagcactaagctctgtagcctcatggtataagaacttctcttggtgggaaccctaaggtttctctagggcagacttaatgacttctctcaccatctcatcccatttgtcagctcttcctgagttacacatctttcttcttgatatttttgttgctactaaggatgctggaggacaattccaacttgtccacagatccaacctatttctctataagcccaagctgcctttctaatcttctctcttaatgggaaacttttgattcagcccagtggttcagctgtctgtacaccccatgagttcacttcttcccacctgtggctttttcctgagctttgtcccctgccttgaaagctcagccaaatcctgtcttgagaaatagcctggtgtgacctctgtgaagtctctctgaccactcagcctggtgtttctctccctgctgaatcctttaagctcctaacctcattcttcctagatgagctaaataaacttccttcttgctactatcttttcatgcatataattttcccccaactacaccatgaactcattgaggacaaagaccaaatgtcatgatttttatacattcaacatggtctaggacagttctctctgcctaaggacattcaataaatacttactgaatgaagtgattaatttcttccttttcattatgttttactctttctatgaaatatcttaaccaaattttattcctttctagttttccttacaggacgtgataggctgcatgcaagaggcatacagaaaatggaaatagtatttcgctgtcctgaaactttcagtgaaagagatcacccaacatcaataacttgtcataatattctctccctccctaagtattctacaatggaaagaatggaggaagcacttcaagtagccatcaacaacaacagaggatttgtctcacccatgctcacacagtcataatcacctctgagagactcagggtgggctttctcacacttggatccttctgttcttccttacacctaaataatacaagagattaatgaatagtggttagaagtagttgagggagagattgggggaatggggagatgatgatgatggtcaaagggtgcaaaatctcacacaagactgaggcaggagaatagggtacagagatagggatctaaggatgacttggacacactccctggcactgaagagtctgaacactggcctgtgattggtccattccaggaccttcatttgcataaggtatcaaaccacatcagcctctgattggccatgggccagacctgcactctggccaatgattggttcattccaggacattcatttgcataaggagtcaaaccacaccagtcttggattggctgtgagccaattcacctcagtctctaattggctgtgagtcagtctttcatttacatagggtgtaaccatcaagaaacctctacagggtacttaagccccagaagattttgctaccagggctcttgagccacttgctctagcccactcccaccctgtggaatgtactttcacttttgctgcttcactgccttgtgctccaataaatccactccttcaccacccaaaaaaaaaaaaaaaaaaaaaaaaaaaaaaaaaaaaaaaaaaaaaaaaaaaaaaaaaaaaaaaaaaaaaaaaaaaaaaaaaaaaaaaaaaaaaaaaaaaaaaaaaaaaaaaaaaaaaaaaaaaaaaaaaa

SEQ ID NO: 172 - DNA, 2398 bp, Homo sapiens
ccacgcgtccgctttgcggaggtggcctgggagcgctcagttcccaggctgaggcttcccgctgacgcctcctggccgcagcgggctccccccgccccaggaatgttcctctcccatccagtccgcctcccctagggcaggccccctgggggctgccgcagccccgcctcgccttcctgggctcccgggagggggcgaggcgagcaggacgcctgggttctctccccccacctcccataccagggagaaattcctccgaggtcccctcaggctctgggttcccaaaataaccctgcgggggaagggaggctgtggagggagggaagcgggaggggcgcagagccgagctgcggggtgctgcaggtgcctctggggagagggcgcgaggagaaggcgccctgcggggggctgggcgccagccagtcctgggatcttggttcgtccccatcctcgtgaagcccctcggccttcccgcgctccgaggtgggccggaagcctctctgcgggtccgtttcccaactggcgggttgcaccatcccgggccagaccgtttaaccccgggagtggccgcgggggacaactccgcccctgtccagcagggggcgtgcccgccccgccccgtttctgcccgcggggccgctcccccgcccgcgactccgcagactcccgctctgcctctcccgggacaggggttcggtccgagcccggtgggaggctcccggagcgcagcctgggcccagcccaccccgcgccggcggccatggcaggcaccctggacctggacaagggctgcacggtggaggagctgctccgcgggtgcatcgaagccttcgatgactccgggaaggtgcgggacccgcagctggtgcgcatgttcctcatgatgcacccctggtacatcccctcctctcagctggcggccaagctgctccacatctaccaacaatcccggaaggacaactccaattccctgcaggtgaaaacgtgccacctggtcaggtactggatctccgccttcccagcggagtttgacttgaacccggagttggctgagcagatcaaggagctgaaggctctgctagaccaagaagggaaccgacggcacagcagcctaatcgacatagacagcgtccctacctacaagtggaagcggcaggtgactcagcggaaccctgtgggacagaaaaagcgcaagatgtccctgttgtttgaccacctggagcccatggagctggcggagcattctcacctacttggagtatcgctccttctgcaagatcctgtttcaggactatcacagtttcgtgactcatggctgcactgtggacaaccccgtcctggagcggttcatctccctcttcaacagcgtctcacagtgggtgcagctcatgatcctcagcaaacccacagccccgcagcgggccctggtcatcacacactttgtccacgtggcggagaagctgctacagctgcagaacttcaacacgctgatggcagtggtcgggggcctgagccacagctccatctcccgcctcaaggagacccacagccacgttagccctgagaccatcaagctctgggagggtctcacggaactagtgacggcgacaggcaactatggcaactaccggcgtcggctggcagcctgtgtgggcttccgcttcccgatcctgggtgtgcacctcaaggacctggtggccctgcagctggcactgcctgactggctggacccagcccggacccggctcaacggggccaagatgaagcagctctttagcatcctggaggagctggccatggtgaccagcctgcggccaccagtacaggccaaccccgacctgctgagcctgctcacggtgtctctggatcagtatcagacggaggatgagctgtaccagctgtccctgcagcgggagccgcgctccaagtcctcgccaaccagccccacgagttgcaccccaccaccccggcccccggtactggaggagtggacctcggctgccaaacccaagctggatcaggccctcgtggtggagcacatcgagaagatggtggagtctgtgttccggaactttgacgtcgatggggatggccacatctcacaggaagaattccagatcatccgtgggaacttcccttacctcagcgcctttggggacctcgaccagaaccaggatggctgcatcagcagggaggagatggtttcctatttcctgcgctccagctctgtgttgggggggcgcatgggcttcgtacacaacttccaggagagcaactccttgcgccccgtcgcctgccgccactgcaaagccctgatcctgggcatctacaagcagggctcaaatgccgagcctgtkgartkaamtkccacaagcagtgcaaggatcgcctgtcagtt

SEQ ID NO: 173 - DNA, 4913 bp, Homo sapiens
tcgtgggcgggggtggggtcaggccctccgacgcttcgggaggagccgggactggaggctgccgagggggccggcgcccgagtccgggattcggccagtggtgctgagcgagtgctggaccagcggccgtcctgtgcacctggcctgtgcgcgtgcccgctgctcggcttcacccagactaaggcgcgggcagctgcgggaacaggcggggtgggcggagggagaccgggaggcacgggcgccctgtgcgcggaggaggtgaaggcggccggggccgggacgccatgtccatggaggaccccttctttgtggtgaaaggagaggtacagaaagcagtcaacactgcccagggattgtttcagagatggacagagctcctccaggacccctccacagcaacaagggaagaaatcgactggaccaccaacgagctgagaaataacctccggagcatagagtgggatctagaggaccttgatgaaaccatcagcatagttgaagcaaatcctagaaaatttaaccttgatgcaactgaattgagtataagaaaagccttcattacaagtactcggcaagttgtcagggacatgaaagatcagatgtcaacttcatctgtgcaggcattagctgaaagaaaaaatagacaggcactgctgggagacagtggcagccagaactggagcactggaacaacagataaatatgggcgtctggaccgagagctccagagagccaattctcatttcattgaggagcagcaggcacagcagcagttgatcgtggaacagcaggatgagcagttggagctggtctctggcagcatcggggtgctgaagaacatgtcccagcgcatcggaggggagctggaggaacaggcagttatgttggaagatttctctcacgaattggagagcactcagtcccggctggacaaygtgatgaagaaacttgcaaaagtatctcatatgaccagtgatcggcgccaatggtgtgccatagccatcctctttgcagtcctgttggttgtgctcatcctcttcttagtgctgtgacggcggggcctctgggtgcgagttcctcctgcatatgaaccgargggaggaggagaagctgarcacgtgtgacattgccgtctactcacattcctatcctggaaacatactgctgcactgacttttctccgtgtgaccccacaattgacatggctcctccatcccagcgctggaagggccagtgggaagaggaaatagatgtctgcactcctggctgcagctggacaacagaagccccatgccgcctgtccagttcggaggagaactagctgctgccttgccttccgggacctcgtttgctgaggagggacttacagactccactggtgttttgctgttgctcattccatgcatctttggcagctcttttcttctgctcagacccttccccgtgctcagacagtgcaccgctgtcccatctaaagaaacctgtcaggaatacgagcttctgggtatgtttcgtttcccattgctgtagcatttcttatcccctgagagctgatgattattgaggacagaaggctcagaaacagtttgtgacagaaaatgcagtgtttcatttttcagggataaatgctaagataaaattgcttttccaggtcatttttttttgtggtaagaataactaatggaaaataatgaaacaccctggggtttgggggtgctaacaacttgtggctttaactgacaggagcaattaaaaagagcaagagggttctgcattggcatagcttagggaagggttaatgatgtcgccacaggtcagctcctgatccttgccgacttgatgttgctgtaccagggcttcctccccagaggtgcagcttgcgttttgagggtgattgctacatatgttgttgctaaacagctcagtaacacacttgaatgaatttggataccagattgtcctcattacagttcttttactcttagggcactctacactgggggttggggttgggagtggttagtacatttattacatttattaagaaacgtaatgacataaaaggttagctctgggccagacttctcttactctgtgggtaatggcaaggatgtgtaggtaaacttggttcttttttttccctaagatgacagcttgattttatcatctgcagtcaaataactgagccaatccaaatttaaatgatagatgctttaattgagtttttaagtagctgaaactgctgagacactaaactttaaccttctgatgactttttaaaatgcctcaaatgtgcacatgtatataggatatttttataacttccctgatgaataatctgatattaaagtagtatttggacccagagccagaactcggtggtggaggctgctggtctctcctcaccaccttcttttgcacttggaaagaacagcaacatctggatagagttctagctttgacttctcatttccttgtctttttgggtgcattcctcagcacactttttttttaaacctttttgttttgttttgtttgtatttcatgtggttttatttgggggttttggttttttcacccttttttgtgatttgcaatgatgtgcttgcccagctaacttttgaattgcactttttaataaatattcttaacaatttttgaagaaggatattttatctcatttgagatcatggtaggttaagaaaatatgcctgttgatgaaagctaaaagcaaatttatgaaactaaaagggtgattgacatccatgtttacactccgctctaatgtttgatatataaataagttattttcaaattaggaaaaaacagtgagtattacaaagggcttcagatgtttagagtactaggttatttatgttttacaaagtttgaatcttctataaactaagaaaggggatgatccttagatttgcattaaaatatagaagtcttttaaagtaaatgtgaaccttgtctaagtactgtaatccacacaacacattataagaagcaaaccagcatcttaaggaattataaaattaccctatttaaaagccatgctattgttctgctattaccagatttattgtgccacacaaaaggatcatgtgtgtcagcaggggccgtttggaacaaacctagtcattaatgagtaagatactcctgttagttcagggaccaagttttatgacccagaggcttaatgatgtttggatatatttcaaatcggcrtgcttacctcactgatttaaattattttctaaatagtggccattgtagacctgactcaggctgaagctaaatagagaacaatttagaaagktaactaacaatacagtgcattctacccgtagggccaccatgcccttctgcccctggctgatttgatcctgtgtctgatcccattgcaccctgactgggcagtccctacagaaccagtgttaatttgaagggcctccactcaggctccaaatgtggcagccaaagagaacawtccagggaacctacatttatttttaaggacaaatatttcctcctcagtggtcctaatgttcagggctttagagggaacccaggtggtctcttcaccctgtgtcctagaatgggagagtaagtagacagtggtgataaccccacactgcttataagtgcatctttatagtatttggggctttcctacccctttagccttctgtacctagtaccatattccagttttaaagaactggcagaatgtgatggataacagaggaagagctcaatttatgtttattggaagaacattttacttaaatgatttgaggggtgggagggagtgaactactgagtttgccagagtgaaaatccatctgaaaaactcagctacctttagttttwagtcctcatttttggtcttgtctctgcggactgtgaagaatcacaatgctctatatgccctggactgtgtggcaaatgcaggttgcagcgtgtgtgttacatgaggatcttccacaatttcagaatgcacgccagagctgaagggggaaacttggtaacttgcccattattctctgcttttagccagagttaaacagactgatgggtctggtagccaacaacttggcaacttccactccttctcacctcgtgagattaagggctgtgaaaagaaatctagtctaactccaacagaaatctgtctctgttaagtgttttaccttctgtaagtagagatggtagagccaagatttttcttttggtaatttccctgtctataaagtgagaccaaagggatatctgttccctgttacctttttggagaattcataacatttgaagatcaaaaaattgaatgataaatatgaatggcttttcaattctgtggactttgtaccatttggcttcaccttgtactgcaagatgaatttgtaaacaaaacaaaattggactgtctggaaagctaaagttctgaaatatggaatgtactgcctctaatttttctttgtcttcctctcactggcatttttttctctcccaggtttcttaagaataatgttttttaaaggaggctttttgcccatcaagaataaaaagaaataaaaccaaagggttaccggacttaagcccccgcagtcactgtgcgccatccctgagcaaagtccgcccctgaggacagtgcccctgccccagtgacaggccttactcctcccagggcctttgcttctaatagggggtggtctttcttttctttctctcctttttttttttttgattaaaaaataaaaccaaaccagaatttgctgaaagcaggtacctttcagtagctccgatcagagtaactcagcttagagatactgttactcaggacaacagtatgtacaaaagtctccggaaaaggaaaataaaacaacctgaaaagaattcaacttgaaaaa

SEQ ID NO: 174 - DNA, 1895 bp, Homo sapiens
ccacgcgtccggcggggtgtacgaaagagaaacccggagggcgccggggactgggccggggtctgcagggctcagctgagcccatgagctcccagagctaacccctgaacacccaggcgggcaaagggctgatgtcggtagtccccatcctggaggggcaggctctgcgcatctgctcctggcatggcgctgcggcacctcgccctcctggctggccttctcgtgggagtcgccagcaagtccatggagaacacggcccagctgcccgagtgctgtgtggatgtggtgggcgtcaacgccagctgcccaggcgcaagtctgtgtggtccaggctgttacaggcgctggaacgcggacgggagcgccactgcgtccgctgtgggaacggaaccctcccagcctacaacggctccgagtgtagaagctttgctggcccgggtgcgccattccccatgaacagaagctcagggacccccgggcggccacatcctggggctccgcgcgtggccgcctccctcttcctgggcacgttcttcattagctccggcctcatcctctccgtagctgggttcttctacctcaagcgctccagtaaactccccagggcctgctacagaagaaacaaagctccggccctgcagcctggcgaagccgctgcaatgatccccccgccacagtcctcagtacggaagccgcgctacgtcaggcgggagcggcccctggacagggccacggatcccgctgccttcccgggggaggcccgtatcagcaatgtctgacctggaggccgagaccacgccacgcacttggcggcagggacccggaggccgaccccttggcgggaaccagcacaaagtgttggcatcgcccggcgcccgggacagtcctgggcacagcctcggctctgggtccctccgcctcccagcgacggacgccaaagggtcccgggccgcctgaggctcctccccaccacagccatctcgtttatcggaccaggagcaggcatccatgagacctcagagcttcagatcgaggccttggggggtccgggcccccccaggaaacacggtgaggccccagcgcctgcagccaaagctggcacgatctatggggcaggtgccgctctgcctagaaaagccaggggctctgctgccgtgccctccagagcccacagcgggcaggactcctccagcaccaccacacccagtggcccgagacccctctgagaacagtgaggctggtcctcgtgccgttccagccggtgcccggccagtggggaggacacagcctaggaaccagctgcctgagaccagggtgcctctgggctgtcctcccgcgtggcggagaccccaagcacgcagccacccatttccggagctgcaggatagagcttcctcttgatctctgtttttaagcagaaattcattgtgcagaaaagtcctccagagctctgtggccccgctcggatccgctggacccccatgcctggctgatccctgcccacgtggggcaggcccacatctaacccccacaagtcactgcctcactgcacctgccaaggctgccctggcgctgagtcctggggtccctcccggagttcctgggagaaaggcgccgtcgtggccgcctcccgcacgccaggcccgggctccaccgtgggtctcagacgccctgcggcaccggcaccgtctgctttagcatgggacccccatctgaggggtggcctggccttcggggtccccacgctcctttgcgaagtccactgtgggtgccatcatggtctccgggacctgggccagcgggaacgtgggggcactgggtgtgctgatataaagtcggcattactcaaaaaaaaaaaaaaaaaaaaaaaaaaaaaaaaaaaaaaaaaaaaaaaa

SEQ ID NO: 175 - DNA, 318 bp, Homo sapiens
atgctcccagcagttcccttggtgtgttgctgtttggttgtgtgggcgaaggtgcctagacaagaaatcctgctgctggggcagtattctgccattggcagccttggcccccttggtgggacaagggttgaccagacagacagtatcttccttagctcaaggaaaagaaaagaaataggagttgctagagctgggaatggttatgcacgcctatagttccagctactcaggaggctgaggtgggaggatgccttgaaaggagttcagggtcagcctgcgtgatatagccagacctctcctctaaagaagaaagaaata

SEQ ID NO: 176 - DNA, 1926 bp, Homo sapiens
gcttggcagaggcaaccaagaaagaaattacattctttcaaacacatccatatttcagagttctcctggaggaggggtcagccacggttccccgactggcagaaagacttaccactgaactcatcatgcatatccaaaaatcgctcccgttgttagaaggacaaataagggagagccaccagaaggcgaccgaggagctgcggcgttgcggggctgacatccccagccaggaggccgacaagatgttctttctaattgagaaaatcaagatgtttaatcaggacatcgaaaagttagtagaaggagaagaagttgtaagggagaatgagacccgtttatacaacaaaatcagagaggattttaaaaactgggtaggcatacttgcaactaatacccaaaaagttaaaaatattatccacgaagaagttgaaaaatatgaaaagcagtatcgaggcaaggagcttctgggatttgtcaactacaagacatttgagatcatcgtgcatcagtacatccagcagctggtggagcccgcccttagcatgctccagaaagccatggaaattatccagcaagctttcattaacgtggccaaaaaacattttggcgaatttttcaaccttaaccaaactgttcagagcacgattgaagacataaaagtgaaacacacagcaaaggcagaaaacatgatccaacttcagttcagaatggagcagatggttttttgtcaagatcagatttacagtgttgttctgaagaaagtccgagaagagatttttaaccctctggggacgccttcacagaatatgaagttgaactctcattttcccagtaatgagtcttcggtttcctcctttactgaaataggcatccacctgaatgcctacttcttggaaaccagcaaacgtctcgccaaccagatcccatttataattcagtattttatgctccgagagaatggtgactccttgcagaaagccatgatgcagatactacaggaaaaaaatcgctattcctggctgcttcaagagcagagtgagaccgctaccaagagaagaatccttaaggagagaatttaccggctcactcaggcgcgacacgcactctgtcaattctccagcaaagagatccactgaagggcggcgatgcctgtggttgttttcttgtgcgtactcattcattctaaggggagtcggtgcaggatgccgcttctgctttggggccaaactcttctgtcactatcagtgtccatctctactgtactccctcagcatcagagcatgcatcaggggtccacacaggctcagctctctccaccacccagctcttccctgaccttcacgaagggatggctctccagtccttgggtcccgtagcacacagttacagtgtcctaagatactgctatcattcttcgctaatttgtatttgtattcccttccccctacaagattatgagaccccagagggggaaggtctgggtcaaattcttcttttgtatgtccagtctcctgcacagcacctgcagcattgtaactgcttaataaatgacatctcactgaacgaatgagtgctgtgtaagtgatggagatacctgaggctattgctcaagcccaggccttggacatttagtgactgttagccggtccctttcagatccagtggccatgccccctgcttcccatggttcactgtcattgtgtttcccagcctctccactcccccgccagaaaggagcctgagtgattctcttttcttcttgtttccctgattatgatgagcttccattgttctgttaagtcttgaagaggaatttaataaagcaaagaaactttttaaaaaaaaagagtacttctagagcggccgggggcccatcggattttccaaccgggtgggggtaccaggttaagtggtaacccaaattcg

SEQ ID NO: 177 - DNA, 447 bp, Homo sapiens
cccacgcgtccgggtcaagtattggcggtcacccaggccccgtgctccagaagggtgaggtttcacagtccatgcaggttggtccctgggccccgaagtcgactgcccggcccgcaaagccgtggctgctggggaagctgccccagtccagcgcgggggcttcctggcttctgggggtgggctggcctccgaggcaaggctgcacgctggatggcctggtgcgcgctccagctcgcggtggtggtggtggtgttggtggtggtggtggtggtggggtctcccttcgtctgtcccttagacgtagtccttgcggtcgtagcctgtgcccaggctggctcccgggccggtggagcgcggcgcggagtagacgaccttggtggccgtgtacttcttctcgcgtgggggacacgagcagcagagcagcgcgccccccagcagctgcagcgc

SEQ ID NO: 178 - DNA, 2075 bp, Homo sapiens
  misc_feature (56)..(56): n equals a,t,g, or c
tcgacccacgcgtccgtggggccgagcgccgctgggtaggcggaagtagccgcagnatggcggcggctatgccgcttgctctgctcgtcctgttgctcctggggcccggcggctggtgccttgcagaacccccacgcgacagcctgcgggaggaacttgtcatcaccccgctgccttccgcgtccgggcatggcggcggctatgccgcttgctctgctcgtcctgttgctcctggggcccggcggctggtgccttgcagaacccccacgcgacagcctgcgggaggaacttgtcatcaccccgctgccttccggggacgtagccgccacattccagttccgcacgcgctgggattcggagcttcagcgggaaggagacactgaccactactttctgcgctatgctgtgctgccgcgggaggtggtctgcaccgaaaacctcaccccctggaagaagctcttgccctgtagttccaaggcaggcctctctgtgctgctgaaggcagatcgcttgttccacaccagctaccactcccaggcagtgcatatccgccctgtttgcagaaatgcacgctgtactagcatctcctgggagctgaggcagaccctgtcagttgtatttgatgccttcatcacggggcagggaaagaaagactggtccctcttccggatgttctcccgaaccctcacggagccctgccccctggcttcagagagccgagtctatgtggacatcaccacctacaaccaggacaacgagacattagaggtgcacccacccccgaccactacatatcaggacgtcatcctaggcactcggaagacctatgccatctatgacttgcttgacaccgccatgatcaacaactctcgaaacctcaacatccagctcaagtggaagagacccccagagaatgaggcccccccagtgcccttcctgcatgcccagcggtacgtgagtggctatgggctgcagaagggggagctgagcacactgctgtacaacacccacccataccgggccttcccggtgctgctgctggacaccgtaccctggtatctgcggctgtatgtgcacaccctcaccatcacctccaagggcaaggagaacaaaccaagttacatccactaccagcctgcccaggaccggctgcaaccccacctcctggagatgctgattcagctgccggccaactcagtcaccaaggtttccatccagtttgagcgggcgctgctgaagtggaccgagtacacaccagatcctaaccatggcttctatgtcagcccatctgtcctcagcgcccttgtgcccagcatggtagcagccaagccagtggactgggaagagagtcccctcttcaacagcctgttcccagtctctgatggctctaactactttgtgcggctctacacggagccgctgctggtgaacctgccgacaccggacttcagcatgccctacaacgtgatctgcctcacgtgcactgtggtggccgtgtgctacggctccttctacaatctcctcacccgaaccttccacatcgaggagccccgcacaggtggcctggccaagcggctggccaaccttatccggcgcgcccgaggtgtccccccactctgattcttgccctttccagcagctgcagctgccgtttctctctggggaggggagcccaagggctgtttctgccacttgctctcctcagagttggcttttgaaccaaagtgccctggaccaggtcagggcctacagctgtgttgtccagtacaggagccacgagccaaatgtggcatttgaatttgaattaacttagaaattcatttcctcacctgtagtggccacctctatattgaggtgctcaataagcaaaagtggtcggtggctgctgtattggacagcacagaaaaagatttccatcaccacagaaaggtcggctggcagcactggccaaggtgatggggtgtgctacacagtgtatgtcactgtgtagtggatggagtttactgtttgtggaataaaaacggctgtttccgtggtaaaaaaaaaaaaaaaaaaaaaaaaaaaaaaaaaaaaaa

SEQ ID NO: 179 - DNA, 651 bp, Homo sapiens
ggcacgagcagaatgttgacagtcgctctcctagcccttctctgtgcctcagcctctggcaatgccattcaggccaggtcttcctcctatagtggagagtatggaggtggtggtggaaagcgattctctcattctggcaaccagttggacggccccatcaccgccctccgggtccgagtcaacacatactacatcgtaggtcttcaggtgcgctatggcaaggtgtggagcgactatgtgggtggtcgcaacggagacctggaggagatctttctgcaccctggggaatcagtgatccaggtttctgggaagtacaagtggtacctgaagaagctggtatttgtgacagacaagggccgctatctgtcttttgggaaagacagtggcacaagtttcaatgccgtccccttgcaccccaacaccgtgctccgcttcatcagtggccggtctggttctctcatcgatgccattggcctgcactgggatgtttaccccactagctgcagcagatgctgagcctcctctccttggcaggggcactgtgatgaggagtaagaactcccttatcactaacccccatccaaatggctcaataaaaaaatatggttaaggctaaaaaaaaaaaaaaaaaaaaaaaaaaaaaaaaaaaaa

SEQ ID NO: 180 - DNA, 706 bp, Homo sapiens
  misc_feature (611)..(611): n equals a,t,g, or c
ggcacgaggtcagccccagaatgttgacagtcgctctcctagcccttctctgtgcctcagcctctggcaatgccattcaggccaggtcttcctcctatagtggagagtatggaggtggtggtggaaagcgattctctcattctggcaaccagttggacggccccatcaccgccctccgggtccgagtcaacacatactacatcgtaggtcttcaggtgcgctatggcaaggtgtggagcgactatgtgggtggtcgcaacggagacctggaggagatctttctgcaccctggggaatcagtgatccaggtttctgggaagtacaagtggtacctgaagaagctggtatttgtgacagacaagggccgctatctgtcttttgggaaagacagtggcacaagtttcaatgccgtccccttgcaccccaacaccgtgctccgcttcatcagtggccggtctggttctctcatcgatgccattggcctgcactgggatgtttaccccactagctgcagcagatgctgagcctcctctccttggcaggggcactgtgatgaggagtaagaactcccttatcactaacccccatccaaatggctcaataaaaaaatntggttaaggctaaaaaaaaaaaaaaaaaaaaaaaaaaaaaaaaaaaaaaaaaaaaaaaaaaaaaaaaaaaaaaaaaaaaaaaaaaaaaaaaaaaa

SEQ ID NO: 181 - DNA, 484 bp, Homo sapiens
  misc_feature (353)..(353): n equals a,t,g, or c
  misc_feature (441)..(441): n equals a,t,g, or c
  misc_feature (469)..(469): n equals a,t,g, or c
agacttcatcaccattgcactcattggcactggctgggctttcattaagcacatcctttctgataaagacaaaaagatcttcatgattgtcattccactccaggtcctggcaaatgtagcctacatcatcatagagtccaccgaggagggcacgactgaatatggcttgtggaaggactctctatttctggtcgacctgttgtgttgtggtgccatcctcttcccagtggtgtggtcaatcagacatttacaagaagcatcagcaacagatggaaaagcccttttgcatctccttgactttccagtcatgcctcctaaatcagaagaaaagctgcaaagaaaatgttttgtgnggttctgggcttatttgaataatgttcatgaccacaggctgccatagcacaagtgagaatttcagaccacaagggtttaaggagcagngctctcttctctcaaagctcagaacggnctctgggatccatgg

SEQ ID NO: 182 - DNA, 1871 bp, Homo sapiens
  misc_feature (1866)..(1866): n equals a,t,g, or c
  misc_feature (1868)..(1869): n equals a,t,g, or c
ggcacgaggtgatctgcccgcctcgacctcccagagtgctgggattataggtgtgagccactaagcctggctgagacaactagtttcccttaactcattggaattctctaggattaggagaattccacagagcctatatgatattatagctcaacatttagtataccaaaggcatacccgtgtaaatctaggagttatttccagagattgttttaaggagcagtcttatattcagggtagaaagttatgattggatctgctgttaaggagaacaaaggagcttctaaaggtttgggaggtttactggtagtaactattctaggaaatatttatgttttaaggtgatgttcacatgggttctttagaaggaacatagtcaagtgtgatggattaactctatatagtctttctcctcttgtgcgtgtaggaaatctgacctgcagtgtcagttgatgtgacaagagataaagaaagcacagtattttaaaatctaaagcagattcctttcttagaaaacaataggaaaaaattatagatggatgtctttgctgaaatctaacaattagctcatattccatgagaaagagtggcctaagaattatttcatgttacctagccttctgaagctactcacttgatgtgcctagcactttgaaactaaccttttctttctttgttcatgacagtttaattccaaatatttactattttctcttgtaactgttagaacagttccttttgacattaatttttgcctacatatatatttttaagttgagaccaaatcggtgaagtgttgagcaagtaacatttatgatgtgtgtatattggaacaaatgtaaaagggttacaaagattagaaacagagtcataaaaaatggcttgatttataaaggcattacttttggtgctttatataatggcatatattgaactaaaaatttgtatatacagtatgtcagcatttcttagtaacttctcttgaatccatttttaatatctaatattgtacaggttggggagttacattcttcaggccaatactatccagactatataaatttataaaataaattgaaaaattcattcccctgtattcaagaccaaagcacataaatgctaatgtagggctcagaggggaaatacagttctcctgcatatttgagaaaatgtgaagtcctttcaagaaaatctaataaacataataatcatagcctgctgacactaaggaaaaaggacctcattcactctttcttttatgcagtgatttactggtccctactgatttccaaattggatcacgatagtaaattatccatgctggtacctgtgaaagtaagccctgggatccatatttgttttgtgttctgcttaaatcagcaagaatgataaatttgatggtgtgaaattggaagtatcaagggctttctttggtgattgagggaaataatgtctctacttgtaatttattgtgaccctttttcactgtatatgctttgtatgtctaatatttatttcaatgcaaattcaattgttccttcatctgtattgttatatctaagattttattgatgttaaaatctaattgtggaataaaaatctctctggaatttagcagawamaaaaatgttatcttgcaaaagaactaagaacatttgtagttagaaatcagctttcctttgagcttaattgcctttttgttagaataaggtgaatttgaacacactcctcttatcctcagcccatcacaaataatagagatgccatgattttgaggtctgatgtgaaactggtaaaaatgtgatctaaggtgtaactggaaaaaaaaaggaaagaaaaattacattgatgcctcagyawaaaaanannat

SEQ ID NO: 183 - DNA, 941 bp, Homo sapiens
ggcacgagaaacaacatggacatgagggtccccgctcagctcctggggctcctgctactctggctccgaggtgccaggtgtgatatgcagatgacccagtctccatcctccctgtctgcatctgttggagacagagtcaccatcacttgccggacaagtcagagcattggcaaatttttaaattggtatcaacaaaaaccagggcaagcccctaagctcctgatctctggtgcatccattttgcaaactggggtcccctcaagattcagtggcagtggatctgccacatatttcactctcaccatcaatgacctacaccctgaagattctgcaacttattactgtcaacaggattacactaccccccttttcggccaagggaccaaggttgaaatcaagcgaactgtggctgcaccatctgtcttcatcttcccgccatctgatgagcagttgaaatctggaactgcctctgttgtgtgcctgctgaataacttctatcccagagaggccaaagtacagtggaaggtggataacgccctccaatcgggtaactcccaggagagtgtcacagagcaggacagcaaggacagcacctacagcctcagcagcaccctgacgctgagcaaagcagactacgagaaacacaaagtctacgcctgcgaagtcacccatcagggcctgagctcgcccgtcacaaagagcttcaacaggggagagtgttagagggagaagtgcccccacctgctcctcagttccagcctgaccccctcccatcctttggcctctgaccctttttccacaggggacctacccctattgcggtcctccagctcatctttcacctcacccccctcctcctccttggctttaattatgctaatgttggaggagaatgaataaataaagtgaatctttgcacctgtaaaaaaaaaaaaaaaaaa

SEQ ID NO: 184 - DNA, 1352 bp, Homo sapiens
ccacgcgtccggacgcagccaggttgtcccagctttcgctctagcgccagcgcggaggacgcgatgtctgggctgtctcgcccgctgcttttggccgtcggctgcctggccgcgctctgcgtaatcacagcggctgggaacaccaccctggccccgaacgtgactacagcctcgtctccaccgcccaccaccacgacagtcccggtgtcaccgacgactctctcgccgctgccggtcaccactccagcaccagatatctgtggaagccgaaacagttgtgtttcctgtgttgatggtaatgctacctgcttttggatagaatgtaaaggtaaaagctactgttcagataattcaacagctggtgattgcaaggtggtgaacaccacaggattctgttctgctaaaaccacaactctgccttccactactacaacttccaccacagctactacatcaggtacaactaataccactctatctccaactatacaacctacgcggaagtctacctttgatgcagccagtttcattggaggaattgtccttgtcttgggtgtgcaggctgtaattttctttctctataaattctgcaaatctaaagaacgaaactaccacactctgtaaagagacccactaaattaacaaggactggcgtgtaactcactgaaaccaaaatattatctttcaagatgtcccacatggaagacgctattctaggatctttaatttttcaaaggatgcatataggagcatcacccttgaagaagaatcagttcagtcactttgctcaacgggcctatttaaagtacgctgcatgagtccttgtggctgtctttcattttacatggctgctgctgtgggattgtgttctctctgcttgacatgccaaatgtaactttaagtgatggaaaacattgtcctgcgcagacaacctcatgactcttttggcaatttaaatgtaatcattttaagcctgaaagctgcattattttcatcctaactcaggatgtagtttagtgaccagaattgagaagaatgtgccaaatgagcatcagtcaggtggatttttggctatcgtttcaaaagtggaataaatttataaatttagtacccttagagtaaaattttgtgcttgataacagttattttttttctacattagaaaaaaagatgccacacagggaattacattccagatttaaagaaatgagaggatacacaacatgaaaagtatagcaggttattgttcatacttgtaaagcaccttatatcattgagaaataaagaacagtgccttaaaaaaaaaaaaaaaaaaaaaaaaaaaaaaaaaaaaaaaaaaaaaaaaaaaaaaa

SEQ ID NO: 185 - DNA, 856 bp, Homo sapiens; identical to SEQ ID NO: 15

SEQ ID NO: 186 - DNA, 1179 bp, Homo sapiens
ggcacgaggccaaacagatttgcagatcaaggagaacccaggagtttcaaagaagcgctagtaaggtctctgagatccttgcactagctacatcctcagggtaggaggaagatggcttccagaagcatgcggctgctcctattgctgagctgcctggccaaaacaggagtcctgggtgatatcatcatgagacccagctgtgctcctggatggttttaccacaagtccaattgctatggttacttcaggaagctgaggaactggtctgatgccgagctcgagtgtcagtcttacggaaacggagcccacctggcatctatcctgagtttaaaggaagccagcaccatagcagagtacataagtggctatcagagaagccagccgatatggattggcctgcacgacccacagaagaggcagcagtggcagtggattgatggggccatgtatctgtacagatcctggtctggcaagtccatgggtgggaacaagcactgtgctgagatgagctccaataacaactttttaacttggagcagcaacgaatgcaacaagcgccaacacttcctgtgcaagtaccgaccatagagcaagaatcaagattctgctaactcctgcacagccccgtcctcttcctttctgctagcctggctaaatctgctcattatttcagaggggaaacctagcaaactaagagtgataagggccctactacactggcttttttaggcttagagacagaaactttagcattggcccagtagtggcttctagctctaaatgtttgccccgccatccctttccacagtatccttcttccctcctcccctgtctctggctgtctcgagcagtctagaagagtgcatctccagcctatgaaacagctgggtctttggccataagaagtaaagatttgaagacagaaggaagaaactcaggagtaagcttctagaccccttcagcttctacacccttctgccctctctccattgcctgcaccccaccccagccactcaactcctgcttgtttttcctttggccataggaaggtttaccagtagaatccttgctaggttgatgtgggccatacattcctttaataaaccattgtgtacataaaaaaaaaaaaaaaaaaaaaaaaaaaaaaaaaaaaaaaaaaaaaaaaaaaaaaaaaaaaaa

SEQ ID NO: 187 - DNA, 1384 bp, Homo sapiens
ggcacgaggggagctgcctggaccagcccaatggttataactcccactgcccgcatggttgggtgggagcaaactgtgagatccacctccaatggaagtccgggcacatggcggagagcctcaccaacatgccacggcactccctctacatcatcattggagccctctgcgtggccttcatccttatgctgatcatcctgatcgtggggatttgccgcatcagccgcattgaataccagggttcttccaggccagcctataaggagttctacaactgccgcagcatcgacagcgagttcagcaatgccattgcatccatccggcatgccaggtttggaaagaaatcccggcctgcaatgtatgatgtgagccccatcgcctatgaagattacagtcctgatgacaaacccttggtcacactgattaaaactaaagatttgtaatctttttttggattatttttcaaaaagatgagatactacactcatttaaatatttttaagaaaataaaaagcttaagaaatttaaaatgctagctgctcaagagttttccagtagaaatatttaagaactaattttctgcagcttttagtttgggaaaaaatattttaaaaacaaaatttgtgaaacctatagacgatgtttaatgtwcctycagctctctaaactgtgtgctyctactartgttgtgctcttttcactgtagracactatcacgagacccaagattaatttctgtggttgttacggaataagtctaatccagggagaarkttyctgtttgaccgtttgagtgcccggctttcggagtagagttaggaaacccacgtaacgtagcatatgatgtataatagagtataccccgttaacttaaaaagaagtctgaaatgttcgttttgtggaaaagaaactagttaaatttactattcctaacccgaatgaaattagcctttgcccttattctgtgcatgggtaagtaacttatttctgcactgttttgttgaactttgtggaaacattctttcgagtttgtttttgtcattttcgtaacagtcgtcgaactaggcctcaaaaacatacgtaacgaaaaggcctagcgaggcaaattctgattgatttgaatctatatttttctttaaaaagtcaagggttctatattgtaagtaaattaaatttacatttgagttgtttgttgctaagaggtagtaaatgtaagagagtactggttccttcagtagtgagtatttctcatagtgcagctttatttatctccaggatgtttttgtggctgtatttgattgatatgtgcttcttctgattcttgctaatttccaaccatattgaataaatgtgatcaagtcaaaaaaaaaaaaaaaaaaaaaaa

SEQ ID NO: 188 - DNA, 1107 bp, Homo sapiens
ccacgcgtccgcggacgcgtgggtggggcatcaatctcctcatctcgctgacatttttgactgtaactgatcttattggcctgccatgggtgtgctttatatatacaatcatgagtctagcatccctgctttttgttgttatgtttatacctgagacaaagggatgctctttggaacaaatatcaatggagctagcaaaagtgaactatgtgaaaaacaacatttgttttatgagtcatcaccaagaagaattagtgccaaaacagcctcaaaaaagaaaaccccaggagcagctcttggagtgtaacaagctgtgtggtaggggccaatccaggcagctttctccagagacctaatggcctcaacaccttctgaacgtggatagtgccagaacacttaggagggtgtctttggaccaatgcatagttgcgactcctgtgctctcttttcagtgtcatggaactggttttgaagagacactctgaaatgataaagacagcctttaatccccctcctccccagaaggaacctcaaaaggtagatgaggtacaaggtcctaagtgatctctttttctgagcaggatatcaggttaaaaaaaaaaagttactggctggtttaatactttctaccttcttcacagagcagcctttgaatagactatgtcctagtgaagacatcaacctccgccttaagctatgtatgtatggaggccagtcgcagctttattatgcagacacacaagtggtctggacatgagggtacagtttctgcctaccaagacactacttgcactggatcttacgcaaaaaagaaccagaacacacagtgtggacaactgcccatatattctatctagattaggagagggtcctggctaggattttagtggtaattcctagttacattcaacaagtataaagattatagagcttattttatgaactataaactataatttaatgcaaaatatccttttatgaatttcatgttaatattgtgaaatattaaaataattccgcaatagttgagaaaaaaaaaaaaaaaaaaaaaaaaaaaaaaaaaaaaaaaaaaaaaaaaaaaaaaaaaaaaaaaaaaaaaaaaaaaaa

SEQ ID NO: 189 - DNA, 622 bp, Homo sapiens
gaattgcatgagttgcccatcgatatggcgcggctgccctctgcccgggttgtccaagatggagggcgctccaccggggtcgctcgccctccggctcctgctgttcgtggcgctacccgcctccggctggctgacgacgggcgcccccgagccgccgccgctgtccggagccccacaggacggcatcagaattaatgtaactacactgaaagatgatggggacatatctaaacagcaggttgttcttaacataacctatgagagtggacaggtgtatgtaaatgacttacctgtaaatagtggtgtaacccgaataagctgtcagactttgatagtgaagaatgaaaatcttgaaaatttggaggaaaaagaatattttggaattgtcagtgtaaggattttagttcatgagtggcctatgacatctggttccagtttgcaactaattgtcattcaagaagaggtagtagagattgatggaaaacaagttcagcaaaaggatgtcactgaaattgatattttagttaagaaccggggagtactcagacattcaaactataccctccctttggaagaaagcatgctctactctatttctcgagggggggcccggtacccaatt

SEQ ID NO: 190 - DNA, 794 bp, Homo sapiens
gtcagggtgtgtctgtgctcttcctccagggcagggttcaaagtccgagtgtccccctctcccawkccccctccactccctccccattctcccactgwtcggtgtacagagaaattatttatatatatgtataaatgtctatttagtaacggtttccctctscccttgccccgaccccccctccacagccacagcccccgccccctccaccttgtacataatgtataggaaaagtctatgtatggctggggggggtggggtggcttcagagagctgggggaccccttccccccaagtcccccctgcaggccaagatctttgctaaaggccattccctccgcagggcatttggcgtcgggtgggaggggaaaacgcatcttgttaattatttttaatcttatttattgtacatacctggggcaggggcttggggaggtggaggggggagaagggtcccctctctctgcccctcccactccttttctacggcgatttgtctgtgtctggcccccacccactgcccatcccccattgttgtctggatgtggttctattttttatcggtctcctttcccctcctccccgttctcgcccccgccccaccccctgctcccactaccctttgtctcttgctctttcttgggcttctgtacaactcaacttgtatacactgtgtacacacaaccagccaaacgaaaacccaacggcaaacactttaaaaaaaaaaaaaaaaaactcgagagtacttctagagcggccgcgggsccatcgattttccacccgggtggggtacc

SEQ ID NO: 191 - DNA, 416 bp, Homo sapiens
tttttttttttttaatgcaaacctaagtttgggatgcagaactacagagacaagaactcagcaagcacccccacttcctccaaagagtagtcaagtcccacagcacagcccggagcagtagctgttaaaagacaagggctgggctggatccggccaacattacaaggacaaccaactggtctcattccttagtcttgtgcttttaaagggcagacgatgtgccaactattttaaagctccaacacactaattctgtaaacaataatagctacagcctgcacactgcgcactggaatggattcctcaacttggcctcatcacttatgcagctgatgaaacaaacactgacagcttttttgcatttgtaaaggccccacagcagctgtggtgatcccaccatagagcaatctcgtgcc

SEQ ID NO: 192 - DNA, 694 bp, Homo sapiens
gaattcggcacgagccaggctggagttcagtggcaccatcttggttcactgcagcctcaatctcctggtgtcaagcaatcctcccacctcagcctcccaagtagctgagactgcaggtacgtgccaccacgcccagctaatttttgtattttttgtagctatggggtctcactatgttgcttgctcagactgsyctgwwactcctgggctcaagcagtcctcctgcctctgcctcccaaagtgttggggttacaggcatgagccacagtgccttgcccataaatgtattttaaaaggaaatttcaaaactccgctgcatatggaaaatgataatctcttctcttaaatataaggtcagatgctttgcatgttgatacggcatgttggttgcttctggctagctgctgttgcttgctgaaagctttcagcctgaaaccgtgctctatatttgtttttaaaaagtggattacaggcttgagccaccgcgccaggcctacaaaaaatttttttaaaaattagttgggcgtggtggtgcatgcctgtagtcctagctacttgggaggctgaggcaggaggattgcttgaaccctgaatgttgaggctgcagggagctataattgcaccactgcactctcttgtgggtgacagaatgagatgctgtctctttaaaaaaaaaaaaaaaaaaaaactcgaa

SEQ ID NO: 193 - DNA, 651 bp, Homo sapiens
  misc_feature (9)..(9): n equals a,t,g, or c
  misc_feature (534)..(534): n equals a,t,g, or c
  misc_feature (607)..(607): n equals a,t,g, or c
  misc_feature (614)..(614): n equals a,t,g, or c
gcgcgcctncaggtcgacactagtgatccaagaattcgcccacgagtggaagtggggtatgggtgcacgaatgatagtatcacatgagttgtgctaggcactgttcttgttttgttttgttttgtttcttcgagacggagtcttgctctgttgcccaggctggagtgcaatggcgcagtctcagctcactgcaacctccacctcccgggttcaagcgattcccctgcctcggcctcccgagtagctgggactacaggtgcacaccaccacgcccggctggttttggaatttttagtagagatgggtttttgccatgttggccaggatggtctcgaagtcttgacctcaggtgatccacccacctcagcctcacgcttgtaatcccagcattttgggargccgaggcaggtggatcacgaggtcaggagtttgagacgagcctggccaacacggtgaaaccctgtctctgctaaaaaatacaaarattagctgggcgtggtggcaggcgcctgtggtcccacctgctcgggaggntgaggcgggagagtcgcttggacctgggaggcggaggttgcagtgagccaagatggcgccattgtactccagnctgggcnacagggctaactccgtctcaaaaaaaaaaaaaaaaag

SEQ ID NO: 194 - DNA, 490 bp, Homo sapiens
ctcgcgcgcctgcaggtcgacactagtggatccaaagaattcggcacgagggaatttgtggcctgtgtagtgactacgggagacaaaaggttattttgaggagatttgatttattatataagattaatgggctgggctaggtggctcatgcctgtattcccagcactttgggaggctgaggctggtggatcacttgagctcaggagttcaagaccagtctgggcaacatggtgggactccccccctctaccaaaaatacaaaaaaaaaaaaaaaaaaaaaaaaagaaccgaatcagcctggcgtggtggcgctcacctgtggtctcagctactcaggaggcagaggtgggaggatcacttgagcctgggaggcggaggttgcagtgagctgagattgtgacattgtactccagcctgggtgatagagtgagacccccactcaaaagagaaaaaaaacagtagtaaaaaaaaaaaaaaaaaaaaactcgag

SEQ ID NO: 195 - DNA, 543 bp, Homo sapiens
ttcggcacgagccgttttgactgtgacacacaccagccacaccaggattcatgcgcactcacacgcattgccacacagccacagatgttcctgttgatgccacatggatttattttcagtcccggcaggcttggaggcaggtggccccctttctgtagccccttgctgggtggtgcctggatgtcctctggcttctccagggctctgccmacgttgctgtgagttggattttttggggcccttagtttgtgcttgatattttcttatgctttcttcctttccctcttacctcctcctccccctccttttgagacagagttttgtcgtgtcatccaggttggagtgcattggtgctcacagctcactgtagtgttgacctcctggtctcaagcaattctcccagctactcgggtgggtgagacaggagaattgcttgaacccaggaggcggaggctgcagtgagctgagatcgcaccactgcactccagcctgggcaacagagtgagactctgtgttgaaaaaaaaaaaaaaaaaaaactcgag

SEQ ID NO: 196 - DNA, 828 bp, Homo sapiens
  misc_feature (775)..(775): n equals a,t,g, or c
  misc_feature (785)..(785): n equals a,t,g, or c
  misc_feature (802)..(802): n equals a,t,g, or c
gaattcggcacgagccctgcwctaagacaaccatgcaacttcgaaagaatcacagcagtgcccagtttattgactcatatatttgccaagtatgctcccgtggggatgaagatgataagcttcttttctgtgatggctgtgatgacaattaccacatcttctgcttgttaccaccccttcctgaaatccccagaggcatctggaggtgcccaaaatgtatcttggcggagtgtaaacagcctcctgaagcttttggatttgaacaggctacccaggagtacagtttgcagagttttggtgaaatggctgattccttcaagtccgactacttcaacatgcctgtacatatggtgcctacagaacttgtagagaaggaattctggaggctggtgagcagcattgaggaagacgtgacagttgaatatggagctgatattcattccaaagaatttggcagtggctttcctgtcagcaatagcaaacaaaacttatctcctgaggagaaggagtatgcgaccagtggttggaacctgaatgtgatgccagtgctagatcagtctgttctctgtcacatcaatgcagacatctcaggcatgaaggtgccctggctgtacgtgggcatggttttctcagcattttgttggcatattgaggatcactggarttactctattaactatctgcattggggtgagccgaagamctggtatggtgtacctccctggcarcagagcatttggaagaaggtgatgaagatgctgacacctgaactgtntgatagccanctgatctcctacaccancttggtcctctcatgaatcccacact

SEQ ID NO: 197 - DNA, 2958 bp, Homo sapiens
gccatgcgctggtcattttttggccttgtcagcctgatgggcttttttgctgctgtgccaccggccagcgcagatgaagattatgcggtgctgatcatttcccgggagcgtctggaagtgccgaccaactgcgagattggcttgtacatccaggaccagttggccgggcggctgttccaggagcaggccacctccttcaacttgccggccgggaatgtgtcgttgcgcctgaagttgttgccggggcaatcccagggctgcttgccgggcatgctcgcgccacctgcgcaaaacatcacgttgaaggcgggtgacgtgcgcaagttgcgtatcgcgcaagggccggacggcatgtacctgaaaccggccgcactggaatactgaaacattgatctaacgccttgaccttccccacaggtcaaggttgatcctaggggcaatctctcctggagtactgcccatgaacggatccaccaccttcgacctgccaatcagcggcatgacctgcgccagctgcgccgggcgggttgaacgggcactgggcaaagtgcccggggtgcaaagtgtcagcgtcaacctggccaacgaacgcgcccacattgaagtgctcggccagatggaccccggcgtcctgatcgccgccgtcgacaaggccggctacaccgccaccctgccccaaagcgaaaccgccacccaggccagccaggaacaacgcctgagccatgaacgctggtcgttgctgctggcaatcctgctcgccgcgccgttggtgctgccgatgctggtgcaaccgttcgggctgcactggatgctcccggcctgggtgcaatttgccctggccaccccggtgcaattcatcttcggtgcgcgcttctatatcgcggcctggaaagccgtgcgcgccggagcgggcaatatggacctgctggtcgccatcggcaccagcgccggttacggcctgagtatctatgaatggctcacggcggtaccgccggcacaatgccccacctgtatttcgaagcctcggcggtggtgatcgccctggtgctgctgggtaaatacctggaaagccgcgccaagcgccagaccgccagtgccatccgtgccctggaagccttgcgccccgagcgggcgattcaagtaatcgacggccgcgagcaggacgtcgccatcaccgccctcaagctgaatgacctggtgctggtcaaacccggcgaacgcttcccggtggacggcgaagtggtcgaaggccaaagccacgccgacgaagccttgatcagcggtgaaagcctgccggtgccgaagcagcctggcgacgcagtcaccggcggcgccatcaatggcgaaggccggctgctggtgcgtaccctggccctcggcgcggaaagcgtgctggcgcggatcatccgcttggtggaggacgcccaggccgccaaggcaccgatccagaaactggtggataaagtcagccaggtgttcgtgccggtggtgctggtgctggccttggccacgctggtcggctggtggctgtatggcgcaccgctggaagtcgcgctgatcaatgccgtgaccgtattggtgatcgcctgcccttgcgcccttggcctggccacacctaccgccatcatggccggtaccggcgttgccgcccgccacggcatcctgatcaaggacgccgaagccctggagcgcgcccatgaagtcagcgccgtggtgttcgacaagaccggcaccctgacctccggcgcaccaaaaattgcgcacctggccgccattgacggcaatcaaggggcgctcctgcaacaggccggcgcgctgcagcgcggcagtgaacacccattggccaaggcggtgctggatgcctgtgccgaacaaggtttgaacgttgcggatgtcagcgccagccagtcccttaccgggcgtggcattgcaggcaccctagatggccggcaactggcgctggccaaccgtcgcctgctggaagaaaccggcttgagcaccggtgatctcgccgactcggccagtgcgtgggaggccgaaggccgcaccttgtcctggctgatcgagcaaggcccgcagccccgcgtgctgggtttgtttgccttcggtgacacgcttaaaccgggcgccctgcaggcgatacaagcactcaaggctcggcatatcagcagccacctgctgaccggcgataaccgtggcagcgcccgcgtggtggccgaagccctgggcatcgatgacgtgcacgccgaggtgttgcctgcggacaaggcggctaccgtcgccgagctgaaaaagaccggcgtggtggcaatggtcggcgacggcatcaacgacgcaccggccctggccgcggccgacatcggcatcgccatgggcggcggtaccgacgtggcgatgcacgcggcaggtattaccctgatgcgcggcgatccacggctggtgccggcagccctggaaataagccgcaagacctatgcgaaaattcgacagaatctgttctgggcctttgtgtataacttgatcggcattccgctggcggcgttcggcctgctcaacccggtaatggctggcgcggccatggccctgtccagtgtcagcgtggtgagcaacgcactgctgttgaaaacctggaaacccaaggacctggaggacgagcgtccatgaacatcggccaagcagcacgccaaagcggcctgagcgcgaagatgattcgttactacgagtccatcggcttgctgaaagccgcccatcgcaccgacagcggctaccgcatttatggcgccgatgacttgcacaccctcgcgtttatcaagcgctcgcgggacctgggtttttccctggaagaggtcggcaagttgctgacgctgtggcaggaccggggacgcgcgagtgccgacgtcaaggcgctggcccgccagcatatcgatgagctgaaccagaagatcctcgagagtactt

SEQ ID NO: 198 - DNA, 1164 bp, Homo sapiens
ggcacgagctgcctcagcctcctgagtagctgggactacaggcgtgtaccaccacgccggctgattttttgtattttagtagagacagggtttcaccatgttggccaggatggtctcgatctcctgacctcgtgtatccacccgccttggcctcccaaagtgctgggattacaggcatgagccaccgtgcccggcctgcatccattatttcttatcagatattctgcgttctcttctttttgctcgctgccattgccttactctccaggctgcttcatctcatagactattgtcacagccatgtcaacttccccagcccacatatgcttacttcttttttttttttttttttttgagccggagtctggctctgtctcccatgctggagtgcagtgctacgatctcggctcactgcagcctccacctcctgggttttacgccattctcctgcctcagcctcctgagtagctgggactacaggcatgcaccacctacgcccggctaattttttttgtattttcagtagagatggggtttcactgtgttagccaggatggtctcgaacttctgaccttgtgatccacccgcctcggcctcccaaagtgctgggattacaggcatgagccaccacgcccggcaatgcttacttctttagtctgtagttttggtgtttgttctgcatgtgagtatttgggggtttgtagggggacctggtcacctaattttgttgtaaatggtgcccacagattttgattttgctatcttagttatggctcttttatgtgggaagagattggaaagctatgctgctgccagtgttaccctaaaatcctgtctaaatatcatcagacaaatacatattaattgtaggctaaatcgatgcaaagtgagtaagacagttcgctagatcccagctcccagagatatgcatgcatgtttacaatggggtaaatttccttccaaactctagttcttttcttgacatgctcatgtctgtttcttgcattgagaaaggaagagttatggttactatttctatgaaagattatttagagatctaggtactgtggcttgtaatcccagccatcccagargctgaggtggaaggattgctggatggcagatttggaggctgaggaaggatagctggagattaagagttgg

SEQ ID NO: 199 - DNA, 1953 bp, Homo sapiens
ggcacgagcgacccgtgcggctggttggcagtgcctgcttcactgcgtcctgcaccctcatggccctggcctcccgggacgtggaagctctgtctccgttgatattcctggcgctgtccctgaatggctttggtggcatctgcctaacgttcacttcactcacgctgcccaacatgtttgggaacctgcgctccacgttaatggccctcatgattggctcttacgcctcttctgccattacgttcccaggaatcaagctgatctacgatgccggtgtggccttcgtggtcatcatgttcacctggtctggcctggcctgccttatctttctgaactgcaccctcaactggcccatcgaagcctttcctgcccctgaggaagtcaattacacgaagaagatcaagctgagtgggctggccctggaccacaaggtgacaggtgacctcttctacacccatgtgaccaccatgggccagaggctcagccagaaggcccccagcctggaggacggttcggatgccttcatgtcaccccaggatgttcggggcacctcagaaaaccttcctgagaggtctgtccccttacgcaagagcctctgctcccccactttcctgtggagcctcctcaccatgggcatgacccagctgcggatcatcttctacatggctgctgtgaacaagatgctggagtaccttgtgactggtggccaggaacatgagacaaatgaacagcaacaaaaggtggcagagacagttgggttctactcctccgtcttcggggccatgcagctgttgtgccttctcacctgccccctcattggctacatcatggactggcggatcaaggactgcgtggacgccccaactcagggcactgtcctcggagatgccagggacggggttgctaccaaatccatcagaccacgctactgcaagatccaaaagctcaccaatgccatcagtgccttcaccctgaccaacctgctgcttgtgggttttggcatcacctgtctcatcaacaacttacacctccagtttgtgacctttgtcctgcacaccattgttcgaggtttcttccactcagcctgtgggagtctctatgctgcagtgttcccatccaaccactttgggacgctgacaggcctgcagtccctcatcagtgctgtgttcgccttgcttcagcagccacttttcatggcgatggtgggacccctgaaaggagagcccttctgggtgaatctgggcctcctgctattctcactcctgggattcctgttgccttcctacctcttctattaccgtgcccggctccagcaggagtacgccgccaatgggatgggcccactgaaggtgcttagcggctctgaggtgaccgcatagacttctcagaccaagggacctggatgacaggcaatcaaggcctgagcaaccaaaaggagtgccccatatggcttttctacctgtaacatgcacatagagccatggccgtagatttataaataccaagagaagttctatttttgtaaagactgcaaaaaggaggaaaaaaaaccttcaaaaacgccccctaagtcaacgctccattgactgaagacagtccctatcctagaggggttgagctttcttcctccttgggttggaggagaccagggtgcctcttatctccttctagcggtctgcctcctggtacctcttggggggatcggcaaacaggctacccctgaggtcccatgtgccatgagtgtgcacacatgcatgtgtctgtgtatgtgtgaatgtgagagagacacagccctcctttcagaaggaaaggggcctgaggtgccagctgtgtcctgggttaggggttgggggtcggccccttccagggccaggagggcaggttccctctctggtgctgctgcttgcaagtcttagaggaaataaaaagggaagtgagaaaaaaaaaaaaaaa

SEQ ID NO: 200 - DNA, 2618 bp, Homo sapiens
  misc_feature (2597)..(2597): n equals a,t,g, or c
  misc_feature (2599)..(2599): n equals a,t,g, or c
ccgggtcgacccacgcgtccgattcatagcagtatggactcatggatacatattttattctgtgggcaatacccgttactatcattatttgtttttcttggcttgaatattctcagacttgggctttgggtgcttcttgtagtttgccgcaatgcccttttgatgtgatgctatcattatttttagtacatccttactttccaacagtatgggatcatctttgttttccccatcccagtcctgaaagtagccctttctccaagtgttcactggttgcttggttggagaatggtgcataggaaccaagatctgagtgcaagggtgctcttcactgttgggatgtcattgcttctgggtgtgttggagccagcaaatatatatatgtacactaattcatgcatgcacacatttgcatttatttatacatctatccatctgcgtgtgtatacgtgtgtgtatatgtgttaccatgagttaataccaattactctgatttcaatccaacacaatgggttctttctaattatttttaatttctctcaaaatcacttcttctggttcttccagaaaatgagctcttcacctagcttaagaatgtagagatgtcgtgtatggttgggcaggttgttcactgtccaagggtgttccagctgaggagagcgatgggagctgaaagcatccatgctctactccctaagctctgcactctaacatgtgctctgggtccaccagagtaagggatgccctcttttcacttgtgcaaatgcactgggtgagctagcaacagacctggtcgactgctgtctcgggatatttttgtgtttacttgtgaaacacccaggcttgggctggattcccccagaggcagattgtgagctgaggatttgagtgcgaggagtattttgggatgtgattccaggaacctcccagagagaagcagtggggagtcaggcaggaaagaaagcatgcgtcagggagctggttactactgggccaccgaggctccatcccagtaaggaaccctggaagacgggaggaacgcaccttggagttgcttccctaagggatcaacttcagttggtcgccactcaaggctcctcctgaggggagcaggcacagagtccctggcacttctggccctgagtgcccaggggatgagtgcgtgacattgacggcttctgctgtcctctgtctcctgctttccccgtgggatgaactagcttgagaggcacaagattcctgagcaggcagagggactctgtaggagtctcagagctcctgaggctgcaccctcgccctggagccccgtgaaatcttcaattttgggttttatgagcttcacaaaccttccaggggcctctccggctccggatggggtgcgttggaggcctggtgcccacgtgtctcctgggccctccacctgtgccccgcctgtttgcacagtgtgcgtgagctgagcacctgagtttgctctttgaatcaagtgtttaactcactcacggtaatagtggctgataattcttgagctaacacaccttctactttgcggcctagccttgtttgcctttcagccctggtttattatcttccatcggatgaagcttaggagcaccagcgctgcctagggaaaccctggcccctccttccctgggatcatctgggtcccccagggctcaggctttacaacccctgctgcttggttacccacctcccacctggggcccctgacagatcaggggacaagcagatagagggctcaccagtgcagtccagtgtatgctgccgggcgggccggagcagagtgagtcagatttggctttttataatcatccaggtgccagggtgggcacgcgtcctgggtcatccttccagcgagggctcacatcatagcctgtcaccagcagtaattcagcaggagggtttagtttcctccctatgggatcagcgagggcagctgtctaagccccaggcacactgcctagggcggacgtgggggtgggggccgtcctcctagggctgccctgcctcttggcaggtgatcagccttcacctccttgtgtggtttaggggggctgcctcctgtctatgtcagagggcttctcagaaacaggcaccgctgtaggggcagcaagatgacttcacttggaaaatggaatgtacttaaacgagatcaagccacctcgtggagaagccattcccttccaatttgttttaatcctgctgattattgcaaagagaaagacttagcctggtgctaatgagtctttaatgcctctgaggacttcctaagttttccttttttttctaaacaagaaaagttaagcctcaggctgttcatccttctagttggaatttaataaccgtgttttgttttcatagaatttacctttggagttgtttattcatggcagggcctcctggttttccattttggggagtgataggaagttttccattaaattaatttattgtatatatttttttacagtgagtccttaatatattttgtaggtaatagtatgggtgaggttggcaaactatggccctgggctaaatctagtgtatagcatgtttttgtcaataaagctttatcagcncncaaaaaaaaaaaaaaaaaa

SEQ ID NO: 201 - DNA, 1737 bp, Homo sapiens
tcgacccacgcgtccgcggccgggtgcgccccgccgcccagtgagcgcccgggcggcgcggcccgggccgagccagccacgctgaggcggaggaggacggggacaaggtgtctgagatgctgccaccgcagaagaagccctgggagtccatggctaaggggctggtgctgggcgcgctcttcactagtttcctgctgctggtgtactcctatgccgtgcccccgctgcatgccggcctggcctccacgaccccggaggccgcagcgtcctgctctccacctgcactcgagccagaggcagtgatccgggccaacggctcggcgggggagtgccagccgcggcgcaacatcgtgttcttgaagacgcacaagacggccagcagcaccctgytcaacatcctgttccgcttcggccagaagcaccggctcaagttcgccttccctaacggccgcaatgacttcgactacccgaccttcttcgcccgcagcctggtgcaggactatcggcccggggcctgcttcaacatcatctgcaaccacatgcgcttccactacgacgaggtgcgcggcctggtgccgaccaacgccatcttcatcacggtgctccgcgaccccgcccgcttgttcgagtcctccttccactacttcgggccggtggtgcccctcacgtggaagctctcggccggcgacaagctgaccgagttcctgcaagacccggatcgctactacgaccccaacggcttcaatgcccactacctccgaaacctgctcttcttcgacctgggctatgacaacagcctggaccccagcagcccgcaggtgcaggagcacatcctggaggtggagcgtcgcttccacctggtgctccttcaagagtacttcgacgagtcgctggtgctgctgaaggacctgctgtgctgggagctggaggacgtgctctacttcaagctcaacgcccgccgcgactcgcccgtgccgcggctctcgggggagctgtatgggcgcgccaccgcmtggaacatgctggactcccacctctaccgccacttcaacgccagcttctggcgcaaggtggaggccttcgggcgggagcgcatggcccgcgaggtggccgccctgcgccatgccaacgagcgcatgcggaccatctgcatcgacgggggccacgccgtggacgccgccgccatccaggacgaggccatgcagccctggcagccgctgggcaccaagtccatcctgggctacaacctcaagaagagcatcgggcagcggcacgcgcagctctgccggcgcatgctcacgcccgagatccagtacctgatggacctcggcgccaacctgtgggtcaccaagctctggaagttcattcgcgatttcctgcggtggtgacgtcccaccgcccagcggcttgcctgcctgctcgctccctgcagaggggctgagcaggacgccgctggtgctggccgcccccagccccctcctggtgccacctcagaccccggggtgagggggggctccctggggggaggcagccagccaagactgggcccatgaacacagagagggcctaaccgagatcagtatttaactaattataccagtttttattaaacccctttccctccccgataaagaatgttctatttctgcctccccttaaaggggagacctcagaagtaaaggaatttgatgttgtgtttttgttaaaaaaaaaaaaaaaaaaaaaaaaagggcggcc

SEQ ID NO: 202 - DNA, 5245 bp, Homo sapiens
ccacgcgtccgcccacgcgtccggaaacgggctctaacaatgacaggattcctgacaaggagaacacacctctcattgaacctcacgttcctcttcgtcctgctaacaccattaccaaggtcccttcagagaagatcctcagagctggaaaaattttacgaaatgccattctctctcgagcacctcacatgataagagatagaaaataccacctaaagacatacagacaatgctgtgtgggaactgaactggtggactggatgatgcagcagacaccatgtgttcactcccggactcaagctgttggcatgtggcaagtcctgttagaagatggtgttctcaaccacgtggaccaggagcaccatttccaagacaaatatttattctatcgatttctggatgatgagcacgaggatgcccctttgcctactgaggaggagaagaaggagtgtgatgaggagctccaggacaccatgctgctgctgtcacagatgggccccgacgcccacatgaggatgatccttcgcaaaccacctggccagaggactgtggatgacctagagattatctatgaggagcttcttcatattaaagccttatcccatctttctaccacagtgaaacgagagttagcaggtgttctcatttttgagtctcacgccaaaggagggactgtgttgtttaaccagggggaagaaggtacctcctggtacattattctaaaaggatcagtgaatgtagtcatttacggcaagggtgtggtctgcaccctgcatgaaggagatgacttcggcaagttagcactagtgaatgatgccccacgagctgcctctatcgtcttacgagaagataactgccatttcttaagagtagacaaggaggatttcaaccggatcctaagggacgtggaggcgaatacagtcagacttaaagaacatgaccaagatgtcttggtgctggagaaggtcccagcagggaacagagcttctaatcaaggaaactcacagcctcagcaaaagtatactgtgatgtcaggaacacctgaaaaaattttagagcattttctagaaacaatacgccttgaggcaactttaaatgaagcaacagattctgttttaaatgactttattatgatgcactgtgtttttatgccaaatacccagctttgcccggcactggtggcccactaccacgcacagccttcacaaggtacagaacaggagaaaatggattatgccctcaacaataagaggcgagtcatccgcctggttctacagtgggctgccatgtatggagacctcctgcaagaggatgacgtgtctatggccttcctggaggagttttatgtatctgtatcagatgatgcccggatgattgctgccctcaaggagcaactgccagagttggagaagattgtcaagcaaatctcagaagatgcaaaggcaccacaaaagaagcacaaggttcttttgcaacagttcaatacgggcgatgagagagcccagaagcgccagcctatccgcggctctgatgaagttctgtttaaggtctattgcatggaccacacctacacaaccattcgggtgccagtggccacttcggtgaaggaagtcatcagtgcagttgccgacaagctgggctccggggagggcctgatcatagtcaagatgagttccggaggagaaaaggtggtgctcaaacctaatgatgtttcagtatttacgacgctcaccattaatggacgcctgtttgcttgcccgcgagagcaattcgattcactgactcccttaccagaacaggaaggcccaactgttggaacagtgggaacttttgaactgatgagctccaaagatttagcataccagatgacaatttatgattgggaactcttcaactgcgtgcatgagctggagctaatctatcacacatttggaaggcataattttaaaaagaccacagcaaacttggatttgttcctgaggagatttaatgaaattcagttttgggtcgtcactgagatctgcctttgttctcagctcagcaagcgtgttcagctattaaaaaaatttattaagatagcagcccactgtaaggagtataaaaatctgaattccttttttgccatcgtcatgggactaagtaacgttgctgtgagccgcttggcactaacgtgggagaaactgccaagcaagttcaagaagttctatgcggagtttgaaagtttaatggacccttcaaggaaccacagggcctacaggctgacagtagctaagctggaacctcctctcatccccttcatgcctttgctcattaaagatatgacatttactcatgaggggaacaagacgttcattgacaatctagtaaactttgaaaaatgcgcatgattgcaaatacggccagaacagtgagatactacaggagccaacccttcaatcctgatgcagctcaagctaataagaaccatcaggatgtccggagttatgtacggcaattaaatgtgattgacaaccagagaactttatcacagatgtcacacagattagagcctcgtcgaccatagacatttcaaatgcccaaagcaacagtttgtctccagtccacaatctttcaaaaatgccatttatgctactactgactgtattgccactagagaattctacaaaacaagcaaaaacacatcctgagacacctcagggctgcattcagcttaccagctacctagcaagagaaggaattatttgacatgcctaaagcttacacactctagcttaggaatccccagtttgtggctaccctgtttcatttccacttgtgccatcttctttgctgaagtgttgaataaggcccacgtgaagagtttggtagaaatagccttgtcaagagaactagcaagcccctgacatttttttctaagagtgtttatgggatgagatgtgctacaaatgggatagatttggataaaattttaactcaacatcttgatttggagcctggggtttcgggaaggtgttgaggaatctatagaagtccaaattataggttgtattcttccatcttcattgtcttacctctgaaggaatagaacctgaccacattattatgaaacattatggctgtttatgtaatttagggaggactggtctgtaatttctgaatgtatatagaataatatttatgtttacaatgtaacttttcaaaatttacaaatcaggattatatacataagaattccactaagaaatgccaagattcttaaatttgccagcgttaaagtagaaaataacatttcagaagagcacaatatgcataaaacatttttcaaaattgaaatattttcctgggcattaaaaacctttactattggctacaaatttattgtacctgatgaaaacatattttctggacttaaatgttattacaaatatcttaattttcagtaattgttttgcactttcaaagattgtaaatagttcattcaatcaatggtatagagttatttatttgctacataatagatactgtgccaaataattactttttatttattttatttagtacgtaattttgaagtacattttttcctgttttcacaattagactacatttaatgtgtaggaattgtatgtatgtatatcttctgtaaataacatctagtatcttcactaaatataattgtcgacaagaaatggttgtgttcatctcaattcctataatatgaaagggataaccatttggtatggtggggtgttggatcttttaatgacacaaaatacacatattataaaattcattcttttaaagtgcagaatccagtgatttttagtatatttacaaagttgtatagataaccatcatcactatctaacttcagaacattctcctcatccctaaaagaaactctgaactcattagcagtcacttcttcttctcctctccctccaacctctggcaaccacgaatctgctttctttgtcttcagatttactctggatgtttcatatgagtggaatcatacagtatgaggccttttgcgtctggtttctttcacttagcataatgttttcaaggttgaccatattatagcttgtaccagtacttcatttatttttatggccatgtaatattccattctataaatagactacattttgtttatccatttatcagttgacagacatttgtctgttgtgttcacttttcggcaattaggagcattgctgctctgaaggggcactggattttagagctcccttgtgtggggcctcatgccatttctcagtgatttaagtacttagcaaatatttgatgaagagatatccaaaattctttaaattccagacatgcctctattttttttaataagtcagcattttccagagtgtgttccagcctattctagtctcacaagttcacatattgtccctccaaaaacaaacacacacatacaaagccaaaaacaaaaccaagattctatcttcaaataaatgtggggaccactgcataatataccccattcatagaaatgattcccagtattcactcacactgaaggctctgagaagtcctattgtaatcccttttaacatcccacaattaaagtccactttcagaaatgccaaagcaggcaaatgcctctctgtgttcattcatataaaatttcagggtccccagaaccagaggcggtgttttctgcggtattacacctgcctctggaggcaagtgcagtgtctgggatttactagacaataaaagaaggtcactgaataaattttcttgaaatcattatcgttcagtatttcactatctgatagacctcaatgtcagctgcaaaggttccacttttatatattttcctttagatatcctttatagtttcttttctagataatttacaaagatgatgaacgaagctgggagcccgttcctggggcatccttgctcttgttttgcttgtctttattcctactttactgaaagctagcattctatatacagcagcacttctccccaattccatggtgaatgccaacttacgatcttattttaatatagtttcaacattattcaaaattaatacatattccccatgtatgttccccttgttcttccacatgagaataacttactgtacttaataaagataagacatttttaagtaaaaaaaaaaaaaaaaaaaaaaaaaaaaaaaaaaaaaaaaaaaaaaaaaaaaaaaaaaaaaaaaaaaaaaaaaaaaaaaaaaaaa

SEQ ID NO: 203 - DNA, 1129 bp, Homo sapiens
  misc_feature (1091)..(1091): n equals a,t,g, or c
  misc_feature (1101)..(1101): n equals a,t,g, or c
  misc_feature (1120)..(1120): n equals a,t,g, or c
gcagacaagcaggttgtcttgtgttaaagaaaatgagatataagtcagttactcccggaggcaatgctgctgttcagctcttctgtttttgtggccagaatctgtatctgtatcaagatgatctgaagaacagcttctacctttaggaatgtctagtgttccaaaatgactagcatcttccattttgccattatcttcatgttaatacttcagatcagaatacaattatctgaagaaagtgaatttttagttgataggtcaaaaaacggtctcatccacgttcctaaagacctatcccagaaaacaacaatcttaaatatatcgcaaaattatatatctgagctttggacttctgacatcttatcactgtcaaaactgaggattttgataatttctcataataaatccagtatcttgatatcagtgttttcaaattcaaccaggaattggaatacttggatttgtcccacaacaagttggtgaagatttcttgccaccctactgtgaacctcaagcacttggacctgtcatttaatgcatttgatgccctgcctatatgcaaagagtttggcaatatgtctcaactaaaatttctggggttgagcaccacacacttagaaaaatctagtgtgctgccaattgctcatttgaatatcagcaaggtcttgctggtcttaggagagactyatggggaaaaagaagaccctgagggccttcaagacyttaacactgagagtctgcacattgtgttccccacaaacaaagaattccattttattttggatgtgtcagtcaagactgtagcaaatctggaactatctaatatcaaatgtgtgctagaagataacaaatgttcttacttcctaagtattctggcgaaacttcaaacaaatccaaagttatcaaatcttaccttaaacaacattgaaacaacttggaattctttcattaggatcctccagctggtttggcatacaactgtatggaatttctcaatttcaaacgtgaagctacagggtcagctggacttcagagattttgattattctggcacttccttgaaggccttgkctatacaccaagttgtcaancggatggggntcgggtttttccggcaaanggtaatatc

SEQ ID NO: 204 - DNA, 764 bp, Homo sapiens
ccacgcgtccgaaaaacccatgggcaaaatttctgtctcttttcttatttttgcttttttgtttaaaggtttttctattgggaaagctactgatcggatggatgctttcaggaaagcaaagaacagagcagttcaccatttgcattatatagaacgatatgaagaccatacaatattccatgatatttcattaagatttaaaaggacgcatatcaagatgaagaaacaacccaaaggttacggcctccgctgccacagggccatcatcaccatctgccggctcattggcatcaaagacatgtatgccaaggtctctgggtccattaatatgctcagcctcacccagggcctcttccgtgggctctccagacaggaaacccatcaacagctggctgataagaagggcctccatgttgtggaaatccgggaggaatgtggccctctgcccattgtggttgcgtccccccgggggcccttgaggaaggatccagagccagaagatgaggttccagacgtcaaactggactgggaagatgtgaagactgcacagggaatgaagcgctctgtgtggtctaatttgaagagagccgccacgtaacctctctggccttgtgcagccagttcctgtgctgccctgcacctaggagagactcagcccctcacagcttgggatgttaccttgccttttgtttgttttgagggaagtttaatctttaaactctttggaaataaataattatagctttcaaaaaaaaaaaaaaaaa

SEQ ID NO: 205 - DNA, 2559 bp, Homo sapiens
ggcacgagccattgcagactctagtgcagtggttcaatctcggctcactgcaacctccgcctccccgattcaagcgattctcctgcgtcagcctccccagtagctgagactacaggatgcagaaagcctcagtgttgctcttcctggcctgggtctgcttcctcttctacgctggcattgccctcttcaccagtggcttcctgctcacccgtttggagctcaccaaccatagcagctgccaagagcccccaggccctgggtccctgccatgggggagccaagggaaacctggggcctgctggatggcttcccgattttcgcgggttgtgttggtgctgatagatgctctgcgatttgacttcgcccagccccagcattcacacgtgcctagagagcctcctgtctccctacccttcctgggcaaactaagctccttgcagaggatcctggagattcagccccaccatgcccggctctaccgatctcaggttgaccctcctaccaccaccatgcagcgcctcaaggccctcaccactggctcactgcctacctttattgatgctggtagtaacttcgccagccacgccatagtggaagacaatctcattaagcagctcaccagtgcaggaaggcgtgtagtcttcatgggagatgatacctggaaagaccttttccctggtgctttctccaaagctttcttcttcccatccttcaatgtcagagacctagacacagtggacaatggcatcctggaacacctctaccccaccatggacagtggtgaatgggacgtgctgattgctcacttcctgggtgtggaccactgtggccacaagcatggccctcaccaccctgaaatggccaagaaacttagccagatggaccaggtgatccagggacttgtggagcgtctggagaatgacacactgctggtagtggctggggaccatgggatgaccacaaatggagaccatggaggggacagtgagctggaggtctcagctgctctctttctgtatagccccacagcagtcttccccagcaccccaccagaggagccagaggtgattcctcaagttagccttgtgcccacgctggccctgctgctgggcctgcccatcccatttgggaatatcggggaagtgatggctgagctattctcagggggtgaggactcccagccccactcctctgctttagcccaagcctcagctctccatctcaatgctcagcaggtgtcccgatttcttcatacctactcagctgctactcaggaccttcaagctaaggagcttcatcagctgcagaacctcttctccaaggcctctgctgactaccagtggcttctccagagccccaagggggctgaggcgacactgccgactgtgattgctgagctgcagcagttcctgcggggagctcgggccatgtgcatcgagtcttgggctcgtttctctctgagcttccttctcctacatctgcttgctgctgggatacccgtcaccacccctggtccttttactgtgccatggcaggcagtctcggcttgggccctcatggccacacagaccttctactccacaggccaccagcctgtctttccagccatccattggcatgcagccttcgtgggattcccagagggtcatggctcctgtacttggctgcctgctttgctagtgggagccaacacctttgcctcccacctcctctttgcagtaggttgcccactgctcctgctctggcctttcctgtgtgagagtcaagggctgcggaagagacagcagcccccagggaatgaagctgatgccagagtcagacccgaggaggaagaggagccactgatggagatgcggctccgggatgcgcctcagcacttctatgcagcactgctgcagctgggcctcaagtacctctttatccttggtattcagattctggcctgtgccttggcagcctccatccttcgcaggcatctcatggtctggaaagtgtttgcccctaagttcatatttgaggctgtgggcttcattgtgagcagcgtgggacttctcctgggcatagctttggtgatgagagtggatggtgctgtgagctcctggttcaggcagctatttctggcccagcagaggtagcctagtctgtgattactggcacttggctacagagagtgctggagaacagtgtagcctggcctgtacaggtactggatgatctgcaagacaggctcagccatactcttactatcatgcagccaggggccgctgacatctaggacttcattattctataattcaggaccacagtggagtatgatccctaactcctgatttggatgcatctgagggacaaggggggcggtctccgaagtggaataaaataggccgggcgtggtgacttgcacctataatcccagcactttgggaggcagaggtgggaggattgcttggtcccaggagttcaagaccagcctgtggaacataacaagaccccgtctctactatttaaaaaaaagtgtaataaaatgataatataattaaaaaaaaaaaaaaaaaaaaa

SEQ ID NO: 206 - DNA, 2546 bp, Homo sapiens
  misc_feature (48)..(48): n equals a,t,g, or c
actcaaagggcaacaaaagctggcagctccaccgcggtgacgacgcgntgctagaactagtggatcccccgggctgcaggaattggcacgagggaaggcgagcagtgccaatctacagcgaagaaagtctcgtttggtaaaagcgagaggggaaagcctgagcatgcagagtgtgcagagcacgagcttttgtctccgaaagcagtgcctttgcctgaccttcctgcttctccatctcctgggacaggtcgctgcgactcagcgctgccctccccagtgcccgggccggtgccctgcgacgccgccgacctgcgcccccggggtgcgcgcggtgctggacggctgctcatgctgtctggtgtgtgcccgccagcgtggcgagagctgctcagatctggagccatgcgacgagagcagtggcctctactgtgatcgcagcgcggaccccagcaaccagactggcatctgcacggcggtagagggagataactgtgtgttcgatggggtcatctaccgcagtggagagaaatttcagccaagctgcaaattccagtgcacctgcagagatgggcagattggctgtgtgccccgctgtcagctggatgtgctactgcctgagcctaactgcccagctccaagaaaagttgaggtgcctggagagtgctgtgaaaagtggatctgtggcccagatgaggaggattcactgggaggccttacccttgcagcttacaggccagaagccaccctaggagtagaagtctctgactcaagtgtcaactgcattgaacagaccacagagtggacagcatgctccaagagctgtggtatggggttctccacccgggtcaccaataggaaccgtcaatgtgagatgctgaaacagactcggctctgcatggtgcggccctgtgaacaagagccagagcagccaacagataagaaaggaaaaaagtgtctccgcaccaagaagtcactcaaagccatccacctgcagttcaagaactgcaccagcctgcacacctacaagcccaggttctgtggggtctgcagtgatggccgctgctgcactccccacaataccaaaaccatccaggcagagtttcagtgctccccagggcaaatagtcaagaagccagtgatggtcattgggacctgcacctgtcacaccaactgtcctaagaacaatgaggccttcctccaggagctggagctgaagactaccagagggaaaatgtaacctgtcactcaagaagcacacctacagagcacctgtagctgctgcgccacccaccatcaaaggaatataagaaaagtaatgaagaatcacgatttcatccttgaatcctatgtattttcctaatgtgatcatatgaggacctttatatctgtcttttatttaacaaaaaatgtaattaactgtaaacttggaatcaaggtaagctcaggatatggcttaggaatgacttactttcctgtggttttattacaaatgcaaatttctataaatttaagaaaacaagtatataatttactttgtagactgtttcacattgcactcatcatattttgctgtgcactagtgcaattccaagaaaatgtcactgtaatgagtcagtgaagtctagaatcatacttaacatttcattgtacaagtattacaaccatatattgaggtttattgggaagattctctattggctccctttttgggtaaaccagctctgaacttccaagctccaaatccaaggaaacatgcagctcttcaacatgacrtccagagatgactattacttttctgtttagttttacactaggaaacgtgttgtatctacagtaatgaaatgtttactaagtggactggtgtcataaactttctccatttaagacacattgactcctttccaatagaaagaaactaaacagaaaactcccaatacaaagatgactggtccctcatagccctcagacatttatatattggaagctgctgaggcccccaagttttttaattaagcagaaacagcatattagcagggattctctcatctaactgatgagtaaactgaggcccaaagcacttgcttacatcctctgatagctgtttcaaatgtgcattttgtggaattttgagaaaaatagagcaaaatcaacatgactggtggtgagagaccacacattttatgagagtttggaattattgtagacatgcccaaaacttatccttgggccataattatgaaaactcatgatcaagatatatgtgtatacatacatgtatctggtttgtcaggctacaaggtaggctgcaaaattaaatctagacattcttttaatgccaccacacgtgttccgcttctctcttttaaagtatttataaaaatataaattgtacattttgtaaaatattatgtttgatttctctacttgtcatatcactaaataaacacgattttattgctgcgtgactctgtattactttggtgcataaaagttgaacattgttgtttactgaaaataaaattaaaatttatgaattaaaaaaaaaa

SEQ ID NO: 207 - DNA, 5568 bp, Homo sapiens
ccgggtcgacccacgcgtccgcgttcctctcggatccaggcattgcctcgctgctttcttttctccaagacgggctgaggattgtacagctctaggcggagttggggctcttcggatcgcttagattctcctctttgctgcatttccccccacgtcctcgttctcccgcgtctgcctgcggacccggagaagggagaatggagagggggctgccgctcctctgcgccgtgctcgccctcgtcctcgccccggccggcgcttttcgcaacgataaatgtggcgatactataaaaattgaaagccccgggtaccttacatctcctggttatcctcattcttatcacccaagtgaaaaatgcgaatggctgattcaggctccggacccataccagagaattatgatcaacttcaaccctcacttcgatttggaggacagagactgcaagtatgactacgtggaagtcttcgatggagaaaatgaaaatggacattttaggggaaagttctgtggaaagatagcccctcctcctgttgtgtcttcagggccatttctttttatcaaatttgtctctgactacgaaacacatggtgcaggattttccatacgttatgaaattttcaagagaggtcctgaatgttcccagaactacacaacacctagtggagtgataaagtcccccggattccctgaaaaatatcccaacagccttgaatgcacttatattgtctttgcgccaaagatgtcagagattatcctggaatttgaaagctttgacctggagcctgactcaaatcctccaggggggatgttctgtcgctacgaccggctagaaatctgggatggattccctgatgttggccctcacattgggcgttactgtggacagaaaacaccaggtcgaatccgatcctcatcgggcattctctccatggttttttacaccgacagcgcgatagcaaaagaaggtttctcagcaaactacagtgtcttgcagagcagtgtctcagaagatttcaaatgtatggaagctctgggcatggaatcaggagaaattcattctgaccagatcacagcttcttcccagtatagcaccaactggtctgcagagcgctcccgcctgaactaccctgagaatgggtggactcccggagaggattcctaccgagagtggatacaggtagacttgggccttctgcgctttgtcacggctgtcgggacacagggcgccatttcaaaagaaaccaagaagaaatattatgtcaagacttacaagatcgacgttagctccaacggggaagactggatcaccataaaagaaggaaacaaacctgttctctttcagggaaacaccaaccctacagatgttgtggttgcagtattccccaaaccactgataactcgatttgtccgaatcaagcctgcaacttgggaaactggcatatctatgagatttgaagtatatggttgcaagataacagattatccttgctctggaatgttgggtatggtgtctggacttatttctgactcccagatcacatcatccaaccaaggggacagaaactggatgcctgaaaacatccgcctggtaaccagtcgctctggctgggcacttccacccgcacctcattcctacatcaatgagtggctccaaatagacctgggggaggagaagatcgtgaggggcatcatcattcagggtgggaagcaccgagagaacaaggtgttcatgaggaagttcaagatcgggtacagcaacaacggctcggactggaagatgatcatggatgacagcaaacgcaaggcgaagtcttttgagggcaacaacaactatgatacacctgagctgcggacttttccagctctctccacgcgattcatcaggatctaccccgagagagccactcatggcggactggggctcagaatggagctgctgggctgtgaagtggaagcccctacagctggaccgaccactcccaacgggaacttggtggatgaatgtgatgacgaccaggccaactgccacagtggaacaggtgatgacttccagctcacaggtggcaccactgtgctggccacagaaaagcccacggtcatagacagcaccatacaatcagagtttccaacatatggttttaactgtgaatttggctggggctctcacaagaccttctgccactgggaacatgacaatcacgtgcagctcaagtggagtgtgttgaccagcaagaccgggacccattcaggatcacacagcaggagatggcaacttcatctattcccaagctgacgaaaatcagaagggcaaagtggctcgcctggtgagccctgtggtttattcccagaactctgcccactgcatgaccttctggtatcacatgtctgggtcccacatcggcacactcagggtcaaactgcgctaccagaagccagaggagtacgatcagctggtctggatggccattggacaccaaggtgaccactggaaggaagggcgtgtcttgctccacaagtctctgaaactttatcaggtgattttcgagggcgaaatcggaaaaggaaaccttggtgggattgctgtggatgacattagtattaataaccacatttcacaagaagattgtgcaaaaccagcagacctggataaaaagaacccagaaattaaaattgatgaaacagggagcacgccaggatacgaaggtgaaggagaaggtgacaagaacatctccaggaagccaggcaatgtgttgaagaccttagaccccatcctcatcaccatcatagccatgagcgccctgggggtcctcctgggggctgtctgtggggtcgtgctgtactgtgcctgttggcataatgggatgtcagaaagaaacttgtctgccctggagaactataactttgaacttgtggatggtgtgaagttgaaaaaagacaaactgaatacacagagtacttattcggaggcatgaaggcagacagagatgaaaagacagtcaaaggacggaagtggaaggacgggagtgagctggggagctgttgatctttcactatacaggctgggaagtgtgttgatgaccactgagccaggcttttctcaggagcttcaatgagtatggccgacagacatggacatggagctgtgttcaccatcggactcatgtgcagtcagcttttttcctgttggtttcatttgaataatcagatgctggtgttgagaccaagtatgattgacataatcattcatttcgacccctcctgcccctctctctctctctcctctcccctttgtggattctttttggaaactgagcgaaatccaagatgctggcaccaagcgtattccgtgtggccctttggatggacatgctacctgaaacccagtgcccagaatatactagaatcaccgcatttcagtggactcctgaagttgtacttgtgtataattgcccgcgtcgtgcataggcaaagaaggattaggctgttttctttttaaagtactgtagcctcagtactggtgtagtgtgtcagctctgtttacgaagcaatactgtccagttttcttgctgtttttccggtgttgtactaaacctcgtgcttgtgaactccatacagaaaacggtgccatccctgaacacggctggccactgggtatactgctgacaaccgcaacaacaaaaacacaaatccttggcactggctagtctatgtcctctcaagtgccttttttgtttgtactggttcattgtgttacattaacgacccactctgcttcttgctggtgaaagccctgctctttaatcaaactctggtggcccactgactaagaagaaagtttattttcgtgtgagatgccagcccctccgggcaggcaagggctctgaagatttggcaacgtggcttaattgttctgctttttctgtagttcaatttcatgtttcttgacccttttgtataaagctgcaatattctctcttattgttctttcatatggaatgtattttcaaatgtaaactctcttctctttctctctcctatctctctgtcttttttctctcttagaattggaggatttgccattgtccaggaaagaaacttgcagctttaacctgctgggaatggcaaacgattttactagactttatgtttaaaaataaataaataagggaaattcctaactttgccctccaaagtctaactttggttttcttgttaactggttaaagtgacagtatcttttttccttatctattctattcaaaatgacctttgatagaaatgttggcatttagtagaaatagtgataagttgaggaaagaaataatacaaattggctttcaagtgagacccaaaggaagaactggataaaatcttccaaatccaaaagcatgagatttttctatccaaatatgcaaaaatgacccaagagaactttcttattttgctactgagtcacacaagggaagtggaaggaagaacagttaatttaagaatgaaactataaatcctgatgcctgggggtcaagtattttaagataagagggggaaaaacacataaagtcaaacaaatgttttaaaaattcataacagcaaccttgaaaaaatagacttaaatgaatgcttctagaaacttccagcggctcacaaagaataagcctgccttagggctggcaacatctaagcctctaacagcacagggaagcaaatatcttaccaggcagcctatgaattaacccaaagaagctttggttggttttggtggatttttatcatgccatgttggacatgagattttttagatcttccttcccacattgctagacgtctcactcaaagacatttgttgggagtcacatttgcatcatagatgagacagtccattcatcttagttaaattggattgagaatgccttttgtttccaggaaaatattgatcaccatgaaagaagaatagttttttgtccccagagacattcatttagttgatataatcctaccagaaggaaagcactaagaaacactcgtttgttgtttttaaaggcaacagacttaaagttgtcctcagccaaggaaaaatgatactgcaactttaaaatttaaagtatcttgcactgataaatatatttaaaaattatatgtttataaagttattaatttgtaaaggcagtgttacaaaatgttcagtttatattgttttagattgttcttgtaatttttaaaggtgtaaaataacatattttttctttatggaaatctataaaactttctgtagtaaaatgttttcattttactggtatattattgcttcatgttttgtaccatcataagattttgtgcagattttttttacagaaattattattttctatgacaatatgacacttgtaaattgttgtttcaaaatgaacagcgaagccttaactttaaatgacatttgtattctcagacactgacaggcataaaaaccacatagaactgaactgtaacttaaattccaaactatgactactacattccaaagaaacagttgaattaaacattttcaaaaaaaaaaaaaaaaaaaaaaa

SEQ ID NO: 208 - DNA, 1908 bp, Homo sapiens
cgtccggccgcgcgagagggactttgtgttccgctgaccctcctcggggcgcttcctcccgtgccgcccttcccctcccccgccgcgtccttgcgaggcgcctcccattcggtgggaccgacccggggggatggagggggcacgcttctacaaccctcctgggacccmgaagagacgcccgcgtgcgayctgagacgccgccctcgccgagggcccatgggcgcgtccccacaggcgggcagtggacgtgagggcggcgagcggcggggccgcggcgtccaggagggccgcgctcgggctcggccccgcgcaggccgcgcgcgcgcgctcccgccgccgcccgggccgcgcccgccccgcctctaggcgccggccccggarcccggtccgcgagcagcggcgkcyggccggagggacgatgagctgcgcggggcgggcgggccctgcccggctcgccgcgctagccctgctgacctgcagcctgtggccggcacgggcagacaacgcgagccaggagtactacacagcgctcatcaacgtgacggtgcaggagcccggccgcggcgccccgctcacgtttcgcatcgaccgcgggcgctacgggcttgactcccccaaggccgaggtccgcggccaggtgctggcgccgctgcccctccacggagttgctgatcatctgggctgtgatccacaaacccggttctttgtccctcctaatatcaaacagtggattgccttgctgcagaggggaaactgcacgtttaaagagaaaatatcacgggccgctttccacaatgcagttgctgtagtcatctacaataataaatccaaagaggagccagttaccatgactcatccaggcactggagatattattgctgtcatgataacagaattgaggggtaaggatattttgagttatctggagaaaaacatctctgtacaaatgacaatagctgttggaactcgaatgccaccgaagaacttcagccgtggctctctagtcttcgtgtcaatatcctttattgttttgatgattatttcttcagcatggctcatattctacttcattcagaagatcaggtacacaaatgcacgcgacaggaaccagcgtcgtctcggagatgcagccaagaaagccatcagtaaattgacaaccaggacagtaaagaagggtgacaaggaaactgacccagactttgatcattgtgcagtctgcatagagagctataagcagaatgatgtcgtccgaattctcccctgcaagcatgttttccacaaatcctgcgtggatccctggcttagtgaacattgtacctgtcctatgtgcaaacttaatatattgaaggccctgggaattgtgccgaatttgccatgtactgataacgtagcattcgatatggaaaggctcaccagaacccaagctgttaaccgaagatcagccctcggcgacctcgccggcgacaactcccttggccttgagccacttcgaacttcggggatctcacctcttcctcaggatggggagctcactccgagaacaggagaaatcaacattgcagtaacaaaagaatggtttattattgccagttttggcctcctcagtgccctcacactctgctacatgatcatcagagccacagctagcttgaatgctaatgaggtagaatggttttgaagaagaaaaaacctgctttctgactgattttgccttgaaggaaaaaagaacctatttttgtgcatcatttaccaatcatgccacacaagcatttatttttagtacattttattttttcataaaattgctaatgccaaagctttgtattaaaagaaataaataataaaataaaaaaaaaaaaaaaacycgagggggggcccgtacccaattcgccctatagtgagcgattc

SEQ ID NO: 209 - DNA, 1634 bp, Homo sapiens
  misc_feature (1603)..(1603): n equals a,t,g, or c
cccacgcgtccggctggggtgagcagcactgtaaagatgaagctggctaactggtactggctgagctcagctgttcttgccacttacggttttttggttgtggcaaacaatgaaacagaggaaattaaagatgaaagagcaaaggatgtctgcccagtgagactagaaagcagagggaaatgcgaagaggcaggggagtgcccctaccaggtaagcctgccccccttgactattcagctcccgaagcaattcagcaggatcgaggaggtgttcaaagaagtccaaaacctcaaggaaatcgtaaatagtctaaagaaatcttgccaagactgcaagctgcaggctgatgacaacggagacccaggcagaaacggactgttgttacccagtacaggagccccgggagaggttggtgataacagagttagagaattagagagtgaggttaacaagctgtcctctgagctaaagaatgccaaagaggagatcaatgtacttcatggtcgcctggagaagctgaatcttgtaaatatgaacaacatagaaaattatgttgacagcaaagtggcaaatctaacatttgttgtcaatagtttggatggcaaatgttcaaagtgtcccagccaagaacaaatacagtcacgtccagttcaacatctaatatataaagattgctctgactactacgcaataggcaaaagaagcagtgagacctacagagttacacctgatcccaaaaatagtagctttgaagtttactgtgacatggagaccatggggggaggctggacagtgctgcaggcacgtctcgatgggagcaccaacttcaccagaacatggcaagactacaaagcaggctttggaaacctcagaagggaattttggctggggaacgataaaattcatcttctgaccaagagtaaggaaatgattctgagaatagatcttgaagactttaatggtgtcgaactatatgccttgtatgatcagttttatgtggctaatgagtttctcaaatatcgtttacacgttggtaactataatggcacagctggagatgcattacgtttcaacaaacattacaaccacgatctgaagtttttcaccactccagataaagacaatgatcgatatccttctgggaactgtgggctgtactacagttcaggctggtggtttgatgcatgtctttctgcaaacttaaatggcaaatattatcaccaaaaatacagaggtgtccgtaatgggattttctggggtacctggcctggtgtaagtgaggcacaccctggtggctacaagtcctccttcaaagaggctaagatgatgatcagacccaagcactttaagccataaatcactctgttcattcctccaggtattcgttatctaatagggcaattaattccttcagcactttagaatatgccttgtttcatatttttcatagctaaaaaatgatgtctgacggctaggttcttatgctacacagcatttgaaataaagctgaaaaacaatgcattttaaaggagtcctttgttgttatgctgttatccaatgaacacttgcaagcaattagcaatattgagaattatacattagntttacaatcttttaatttctattgaaacttg

SEQ ID NO: 210 - DNA, 1340 bp, Homo sapiens
  misc_feature (343)..(343): n equals a,t,g, or c
  misc_feature (550)..(550): n equals a,t,g, or c
  misc_feature (621)..(621): n equals a,t,g, or c
  misc_feature (1293)..(1293): n equals a,t,g, or c
  misc_feature (1312)..(1313): n equals a,t,g, or c
  misc_feature (1318)..(1318): n equals a,t,g, or c
  misc_feature (1336)..(1336): n equals a,t,g, or c
tcgacccacgcgtccggtctgagcctggcgcggaggctatgggcagccaggaggtgctgggccacgcggcccggctggcctcctccggtctcctcctgcagactaacgctgctttactcaaccaccctcttcctggccagagaggccttccgcagagcatgtctcagtgggggcacccagcgagactggagccagaccctcaacctgctgtggctaacagtccccctgggtgtgttttggtccttattcctgggctggatctggttgcagctgcttgaagtgcctgatcctaatgttgtccctcactatgcaactggagtggtgctgtttggtctctcggcantggtggagcttctaggagagcccttttgggtcttggcacaagcacatatgtttgtgaagcycaagtttatttttttcycagcttttctataccacagttctggtgctctgctatgttatttatttcacaaagttactgggttccccagaatcaaccaagcttcaaactcttcctgtctccagaataacagatctgttacccaatatnacaagaaatggagcgtttataaactggaaagaggctaaactgacttggagttttttcaaacagtctttctngaaacagattttgacagaaggcgagcgatatgtgatgacatttttgaatgtattgaactttggtgatcagggtaagatgaaattctgtagtgttttaattaaaggtgaacactattaatagatacttcctaatatttttctctgatatatttaatgaaagatgaacctgaagattaaagaaaatcctgaagattgtaaattgtaggtctttgtactgactatgccctccaacatgactttggtgtcaggtattctggtgagaccccggccctctattttgcctcctgagagctctggtgttcgttttgggaggtgggaggtgccaagagaggagaaaagggagctcactgtcacagccacaaaaatctgccccatgtttgtgtggctagatagtctttcagtattttcatttttatcttttaatgtaatcccaaagtaactgaaatcaaatagaaaaacatcaactttgcattaatgacctgtataagaaagtactgttgatggaagcattctgtatcttgactgtatcatcgttggtatcctggttgtgatattgtactatagttttacaaaatgktaccactgggtaaagggtatatatgggatccctctattacttcctatttttttggcttttttatttattttttaatttttgagacagggtctcantctattggccaagctgganntgcantgggtaccatcacagctnactg

SEQ ID NO: 211 - DNA, 1583 bp, Homo sapiens
  misc_feature (108)..(108): n equals a,t,g, or c
  misc_feature (179)..(179): n equals a,t,g, or c
  misc_feature (246)..(246): n equals a,t,g, or c
  misc_feature (250)..(250): n equals a,t,g, or c
  misc_feature (1536)..(1536): n equals a,t,g, or c
  misc_feature (1555)..(1555): n equals a,t,g, or c
  misc_feature (1558)..(1558): n equals a,t,g, or c
  misc_feature (1570)..(1570): n equals a,t,g, or c
gggctaaatggctgaagaggtcgcagcgccatgaagtccctgtctctgctcctcgctgtggctttgggcctggcgaccgccgtctcagcaggacccgcggtgatcgantgttggttcgtggaggatgcgagcggaaagggcctggccaagagacccggtgcactgctgttgcgccaggnaccgggggaaccgccgccccggccggacctcgaccctgagctctatctcagtgtacacgaccccgcnggcnccctccaggctgccttywggcggtatccccggggcgcccccgcaccacactgcgagatgagccgcttcgtgcctctccccgcctctgcgaaatgggccagcggcctgacccccgcgcagaactgcccgcgggccctggatggggcttggctgatggtcagcatatccagcccagtcctcagcctctccagcctcttgcgaccacagccagagcctcagcaggagcctgttctcatcaccatggcaacagtggtactgactgtcctcacccacacccctgcccctcgagtgagactgggacaagatgctctgctggacttgagctttgcctacatgccccccacctccgaggccgcctcatctctggctccgggtccccctccctttgggctagagtggcgacgccagcacctgggtaagggacatctgctcctggctgcaactcctgggctgaatggccagatgccagcagcccaagaaggggccgtggcatttgctgcttgggatgatgatgagccatggggcccatggaccggaaatgggaccttctggctgcctagagttcaaccctttcaggagggcacctatctggccaccatacacctgccatacctgcaaggacaggtcaccctggagcttgctgtgtacaaaccccccaaagtgtccctgatgccagcaacccttgcacgggccgccccaggggaggcacccccggaattgctctgccttgtgtcccacttctacccttctgggggcctggaggtggagtgggaactccggggtggcccagggggccgctctcagaaggccgaggggcagaggtggctctcggccctgcgccaccattccgatggctctgtcagcctctctgggcacttgcagccgcccccagtcaccactgagcagcatggggcacgctatgcctgtcgaattcaccatcccagcctgcctgcctcggggcgcagcgctgaggtcaccctggaggtagcaggtctttcagggccctcccttgaggacagcgtaggccttttcctgtctgcctttcttctgcttgggctcttcaaggcactgggctgggctgctgtctacctgtccacctgcaaggattcaaagaagaaagcagagtgagggcactcactgccatcctgtggaagccaccatcatctctggcccaagcttctgtagtagctccctaaaataataccctatcatctgctcctaatccctccaatctctctccactgagtggctggaatgcttttttttttttcttttaacttatataangggataattttttcttttnttnttttttttcgcngaacgggagtccc

SEQ ID NO: 212 - DNA, 880 bp, Homo sapiens
  misc_feature (810)..(810): n equals a,t,g, or c
  misc_feature (863)..(863): n equals a,t,g, or c
  misc_feature (871)..(871): n equals a,t,g, or c
  misc_feature (875)..(875): n equals a,t,g, or c
ctccaggcgctgcaatctgttgcgccgccgcccgcgggagccggcagatccgggtcttgtggctaagagtgacgtggtcactcgaatcaaaacagaggagggggaggaagccggcggccagaaacggcagtggcagcagcgtccggagcagccgcagccttctggaagctccaggcggtctttctgccgagcctcggtcccggcccccatcctccccgccccatcggttgttgtctgggcggatttaaacagtcaagtaaaatcaagctgggtaatcatggcagaaggtggatttgatccctgtgaatgtgtttgctctcatgaacatgcaatgagaagactgatcaatctgttacggcagtcccagtcctactgcacagacacagagtgtcttcaggaattaccgggaccctctggtgataatggcatcagtgttacaatgatcttggtagcctggatggttattgcattgatcttgttcttactgagacctcctaatctaagaggatccagcctacctggaaagccaaccagtcctcataatggacaagatccaccagctcctcctgtggactaactttgtgatatgggaagtgaaaatagttaacaccttgcacgaccaaacgaacgaagatgaccagagtactcttaaccccattagaactgtttttccttttgtatctgcaatatgggatggtattgttttcatgagcttctagaaatttcacttgcaagkttatttttgcttcctgggktactgscattcctatttacagkatatttgagtgaatgattatatttttaaaaagntacatggggcttttttggtggcctaacttacaaacattcacttcatctgttgnactgggantatnaattt

SEQ ID NO: 213 - DNA, 440 bp, Homo sapiens
  misc_feature (9)..(9): n equals a,t,g, or c
atgtctatnattttaatttattcgtttcccccccttattccccatcactgtttgttttgttttggttttggttttatttgttcttgcagtgtctacctgggtaacagttgggtgatgtcttcattgggatcttaacatgaacaaatacttatgcatgtacctgttatgtacttatgcatatattcaaaagtcattaagatactggtgatagtgttagctgtctgtggatcatttgggataagtaaacagaatctcctctacattaagcaaaaaaagatattactcaatgccatttttttggcctaccttatgacagataaaatttttaagaaacctaaggcaaatgtgctttcaggagtacttagctataggaagtgatcatatttttaagaactccaaggttcttaaaaaccaaacaagtttttccccttttcatgtga

SEQ ID NO: 214 - DNA, 2048 bp, Homo sapiens
cccgggtcgacccacgcgtccgggaaggactgccaacctctactcccttcacagctggctgggcatcaccactgtcttcctcttcgcctgccagtggttcctgggctttgctgtcttcctcctgccctgggcgtccatgtggctgcgcagctcctaaaacctatccacgtcttttttggagccgccatcctctctctgtccatcgcatccgtcatttcgggcattaatgagaagcttttcttcagtttgaaaaacaccaccaggccataccacagcctgcccagtgaggcggtctttgccaacagcaccgggatgctggtggtggcctttgggctgctggtgctctacatccttctggcttcatcttggaagcgcccagagccggggatcctgaccgacagacagcccctgctgcatgatggggagtgaagcagcaggaaggggctcccaagagctcctggtggtgcagcctgtgctcccctcagaagctctgctcttcccagggctcccggctggtttcagcaggcgactttcttccaatgctgggcccagacttcttgcctgggtgctggcctgccctctccggccgcttgctgcctgtctgctttccttggtggctttgcctgggtgctgggcctgccctctccggccgcttgctgcctgtctgctttccttggtggctttgcctgggtgctgggcctgccttctctggctgcttgctgcctgtctgctttccttggtggctttggcttctgcactccttggcgtcagcctctcaggtcctccattcacacgaggtcctcctcgctctggccgctcttgctgctcctgtctgaagaaatcagactgatttcctcttaagactcctagggatgtggtgaagagctgggactcaagtgcagtccacggtgtgaaacatgagggaggtgaggtgtccgtccacttcccccataaaggtgtgcatttcagttaggctgccccgccacagagcaggcttcatctgctctgccatccagccccatctggatgtgaggtggggtggagacatcatggggtgattgcagaaagggggagtggcggcccacgcagcttctgctgaggagctgaccgctctgagctgttctgtttcgtattgctgctctgtgtctgcatgtattgtgaccgtgcggctccacctcttccagctgctgctacagctgaggcctggatcccggcctttccctgtgacttacgtgtctgtcaccggcaggcagccctacaaatcctggtgacctgctctcccaagaacagagcctgtccccagatgtcccagtagcgatgagtaacagaggtggctgtggacttcctctacttctccttgctggatcagggccttcctgcctcccgctgggcaggtctggccttgctctcttggcagggccccagcccctctgaccactctgcagctcaccatgcagctgatgccaaagttgtggtgtccagtgtgcagcagccctgggagccactgccacctttcagaggggttccttgctgagaccccacattgcttcacctggccccaccatggctgcttgcctggcccaacctagcgttctgtgccatgctagagcttgagctgttgctcttcttcaggggaggaaatagggtggagagcgggaagggtcttgctcctaagtgttgctgctgtggcttttttgccttctccaaagacgcactgccaggtcccaagcttcagactgctgtgcttagtaagcaagtgagaagcctggggtttggagcccacctactctctggcagcatcagcatcctactcctggcaacatcaggccaacgtccaccccagcctcacattgccagatgttggcagaagggctaatattgaccgtcttgactggctggagccttcaaagccactgggatgtcctccaggcacctgggtcccatgaccagctccccgtctccataggggtaggcatttcactggtttatgaagctcgagtttcattaaatatgttaagaatcaaaaaaaaaaaaaaaaaaaaaaaaaa

SEQ ID NO: 215 - DNA, 1456 bp, Homo sapiens
  misc_feature (1372)..(1372): n equals a,t,g, or c
  misc_feature (1376)..(1376): n equals a,t,g, or c
  misc_feature (1391)..(1391): n equals a,t,g, or c
  misc_feature (1438)..(1438): n equals a,t,g, or c
gcccacgcgtccgcccacgcgtccgctatcaacccagataaagcgggacctcctctctggtagaggtgcagggggcagtactcaacatgatcacagagggagcgcaggcccctcgattgttgctgccgccgctgctcctgctgctcaccctgccagccacaggctcagaccccgtgctctgcttcacccagtatgaagaatcctccggcaagtgcaagggcctcctggggggtggtgtcagcgtggaagactgctgtctcaacactgcctttgcctaccagaaacgtagtggtgggctctgtcagccttgcaggtccccacgatggtccctgtggtccacatgggccccctgttcggtgacgtgctctgagggctcccagctgcggtaccggcgctgtgtgggctggaatgggcagtgctctggaaaggtggcacctgggaccctggagtggcagctccaggcctgtgaggaccagcagtgctgtcctgagatgggcggctggtctggctgggggccctgggagccttgctctgtcamctgctccaaagggacccggacccgcagcgagcctgtaatcacctgctcccaagtgtgggggccactgcccaggacaggcacaggaatcagaggcctgtgacacccagcaggtctgccccacacacggggcctgggccacctggggcccctggaccccctgctcagcytcctgccacggtggaccccacgaacctaakgagacacgaagccgcaagtgttctgcacctgagccctcccagaaacctcctgggaagccctgcccggggctagcctacgagcagcggaggtgcaccggcctgccaccctgcccagtggctgggggctgggggccttggggccctgtgagcccctgccctgtgacctgtggcctgggccagaccatggaacaacggacgtgcaatcaccctgtgccccarcatgggggccccttctgtgctggcgatgccamccggacccacatctgcaacacagctgtgccytgccctgtggatggggagtgggactcgtggggggagtkgarcccctgtatccgacggaacatgaagtccatcagctgtyaagaaatcccgggccagcagtyacgcgggaggacctgcaggggccgcaagtttkacggacatcgatgtgccgggsaacaagcaggrtatccggcactgctacagcatccagcactgccccttgaaaggatcatggtcagagtggagtacctgggggctgtgcatgcccccctgtggacctaatcctacccggcccggcagcgcctctggacacccttgctccccaagtacccgccaccggttcatggtcgaaggtcaaggcgaagaagaatgtgancttntggggggaagaccgnttgccacggtgtgaggagctacaagggcaagaagctggtggtgggangaaaaacgaacatgtcta

SEQ ID NO: 216 - DNA, 1598 bp, Homo sapiens
ccacgcgtccgccatctcaaaaaaacaaacaaacaaaacaaaacaaaacaaaaccaaaaaccaaaacaaaacacaacaatttaatttaagcaaaacacctgcagctaataatggtagcatttgtagtgcttactatgtgctacacactgctctaggtgctttacctgtaataactcatataatcctcacaatgccatatgaagaaatttattttattgtccccattttgtagatgaaggaactgaggcacagagaggtcaaataacctgctgaaagttacatagcttgggagaaaattctgtgctatgtagtccagctccagagcctgtgctttttaaatcagaaaacaaagaataataattaagtacaataccaatatgtttgcagtgagtttgtgttaatacaagaatttgattactattaaattcaagagcatgttttaaaaaattcatctgttttttgggaatatatgtatgcaaatttaaattcattttccccttttagtttttcagttatgggacaaaaatattatatcaaaacactgaagctttgcaatctaaattcttttcacctcttcaaaaagcgatgctaccacctaatagttttcaaggaaaagtggcattcattactgggggaggtactggccttggtaaaggaatgacaactcttctgtccagcctaggtgctcagtgcgtgatagccagccggaagatggatgttttgaaagctaccgcagaacaaatttcttctcaaactggaaataaggttcatgcaattcagtgtgatgtgagggatcctgatatggttcaaaacactgtgtcagaactgatcaaagttgcaggacatcctaatattgtgataaacaatgcagcaggaattttatttctcctactgaaagactttctcctaatgcttggaaaaccataactgacatagttctaaatggcacagccttcgtgacactagaaattggaaaacaactaattaaagcacagaaaggagcagcatttctttctattactactatctatgctgagactggttcaggttttgtagtaccaagtgcttctgccaaagcaggtgtggaagccatgagcaagtctcttgcagctgaatggggtaaatatggaatgcgattcaatgtgattcaaccagggcctataaaaaccaaaggtgcctttagccgtctggacccaactggaacatttgagaaagaaatgattggcagaattccctgtggtcgcctggggactgtagaagaactcgcaaatcttgctgctttcctttgtagtgattatgcttcttggattaatggagcagtcattaaatttgacggtggagaggaagtacttatttcaggggaattcaacgacctgagaaaggtcaccaaggagcagtgggacaccatagaagaactcatcaggaagacaaaaggttcctaagaccactttggccttcatcttggttacagaaaagggaatagaaatgaaacaaattatctctcatcttttgactatttcaagtctaataaattcttaattaacaaaaaaaaaaaaaaaaaaaaaaaaaaaaaaaaaaaaaaaaaaaaaaaaaaaaaa

SEQ ID NO: 217 - DNA, 2757 bp, Homo sapiens
atgccagggggcgcaggcgccgcccggctctgcttgctggcgtttgccctgcagcccctccggccgcgggcggcgcgggagcctggatggacaagaggaagtgaggaaggcagccccaagctgcagcatgaacttatcatacctcagtggaagacttcagaaagccccgtgagagaaaagcatccactcaaagctgagctcagggtaatggctgaggggcgagaactgatcctggacctggagaagaatgagcaactttttgctccttcctacacagaaacccattatacttcaagtggtaaccctcaaaccaccacacggaaattggaggatcactgcttttaccacggcacggtgagggagacagaactgtccagcgtcacgctcagcacttgccgaggaattagaggactgattacggtgagcagcaacctcagctacgtcatcgagcccctccctgacagcaagggccaacaccttatttacagatctgaacatctcaagccgcccccgggaaactgtgggttcgagcactccaagcccaccaccagggactgggctcttcagtttacacaacagaccaagaagcgacctcgcaggatgaaaagggaagatttaaactccatgaagtatgtggagctttacctcgtggctgattatttagagtttcagaagaatcgacgagaccaggacgccaccaaacacaagctcatagagatcgccaactatgttgataagttttaccgatccttgaacatccggattgctctcgtgggcttggaagtgtggacccacgggaacatgtgtgaagtttcagagaatccatattctaccctctggtcctttctcagttggaggcgcaagctgcttgcccagaagtaccatgacaacgcccaattaatcacgggcatgtccttccacggcaccaccatcggcctggcccccctcatggccatgtgctctgtgtaccagtctggaggagtcaacatggaccactccgagaatgccattggcgtggctgccaccatggcccacgagatgggccacaactttggcatgacccatgattctgcagattgctgctcggccagtgcggctgatggtgggtgcatcatggcagctgccactgggcacccctttcccaaagtgttcaatggatgcaacaggagggagctggacaggtatctgcagtcaggtggtggaatgtgtctctccaacatgccagacaccaggatgttgtatggaggccggaggtgtgggaacgggtatctggaagatggggaagagtgtgactgtggagaagaagaggaatgtaacaacccctgctgcaatgcctctaattgtaccctgaggccgggggcggagtgtgctcacggctcctgctgccaccagtgtaagctgttggctcctgggaccctgtgccgcgagcaggccaggcagtgtgacctcccggagttctgtacgggcaagtctccccactgccctaccaacttctaccagatggatggtaccccctgtgagggcggccaggcctactgctacaacggcatgtgcctcacctaccaggagcagtgccagcagctgtggggacccggagcccgacctgcccctgacctctgcttcgagaaggtgaatgtggcaggagacacctttggaaactgtggaaaggacatgaatggtgaacacaggaagtgcaacatgagagatgcgaagtgtgggaagatccagtgtcagagctctgaggcccggcccctggagtccaacgcggtgcccattgacaccactatcatcatgaatgggaggcagatccagtgccggggcacccacgtctaccgaggtcctgaggaggagggtgacatgctggacccagggctggtgatgactggaaccaagtgtggctacaaccatatttgctttgaggggcagtgcaggaacacctccttctttgaaactgaaggctgtgggaagaagtgcaatggccatggggtctgtaacaacaaccagaactgccactgcctgccgggctgggccccgcccttctgcaacacaccgggccacgggggcagtatcgacagtgggcctatgccccctgagagtgtgggtcctgtggtagctggagtgttggtggccatcttggtgctggcggtcctcatgctgatgtactactgctgcagacagaacaacaaactaggccaactcaagccctcagctctcccttccaagctgaggcaacagttcagttgtcccttcagggtttctcagaacagcgggactggtcatgccaacccaactttcaagctgcagacgccccagggcaagcgaaaggtgatcaacactccggaaatcctgcggaagccctcccagcctcctccccggccccctccagattatctgcgtggtgggtccccacctgcaccactgccagctcacctgagcagggctgctaggaactccccagggcccgggtctcaaatagagaggacggagtcgtccaggaggcctcctccaagccggccaattccccccgcaccaaattgcatcgtttcccaggacttctccaggcctcggccgccccagaaggcactcccggcaaacccagtgccaggccgcaggagcctccccaggccaggaggtgcatccccactgcggccccctggtgctggccctcagcagtcccggcctctggcagcacttgccccaaagtttccagaatacagatcacagagggctggagggatgattagctcgaaaatctag

SEQ ID NO: 218 - DNA, 1834 bp, Homo sapiens
gacaggtatataaaggaagtacagggcctggggaagaggccctgtctaggtagctggcaccaggagccgtgggcaagggaagaggccacaccctgccctgctctgctgcagccagaatgggtgtgaaggcgtctcaaacaggctttgtggtcctggtgctgctccagtgctgctctgcatacaaactggtctgctactacaccagctggtcccagtaccgggaaggcgatgggagctgcttcccagatgcccttgaccgcttcctctgtacccacatcatctacagctttgccaatataagcaacgatcacatcgacacctgggagtggaatgatgtgacgctctacggcatgctcaacacactcaagaacaggaaccccaacctgaagactctcttgtctgtcggaggatggaactttgggtctcaaagattttccaagatagcctccaacacccagagtcgccggactttcatcaagtcagtaccgccatttctgcgcacccatggctttgatgggctggaccttgcctggctctaccctggacggrgagacaaacagcattttaccaccctaatcaaggaaatgaaggccgaatttataaaggaagcccagccagggaaaaagcagctcctgctcagcgcagcactgtctgcggggaaggtcaccattgacagcagctatgacattgccaagatatcccaacacctggatttcattagcatcatgacctacgattttcatggagcctggcgtgggaccacaggccatcacagtcccctgttccgaggtcaggaggatgcaagtcctgacagattcagcaacactgactatgctgtggggtacatgttgaggctgggggctcctgccagtaagctggtgatgggcatccccaccttcgggaggagcttcactctggcttcttctgagactggtgttggagccccaatctcaggaccgggaattccaggccggttcaccaaggaggcagggacccttgcctactatgagatctgtgacttcctccgcggagccacagtccatagaatcctcggccagcaggtcccctatgccaccaagggcaaccagtgggtaggatacgacgaccaggaaagcgtcaaaagcaaggtgcagtacctgaaggacaggcagctggcgggcgccatggtatgggccctggacctggatgacttccagggctccttctgcggccaggatctgcgcttccctctcaccaatgccatcaaggatgcactcgctgcaacgtagccctctgttctgcacacagcacgggggccaaggatgccccgtccccctctggctccagctggccgggagcctgatcacctgccctgctgagtcccaggctgagcctcagtctccctcccttggggcctatgcagaggtccacaacacacagatttgagctcagccctggtgggcagagaggtagggatggggctgtggggatagtgaggcatcgcaatgtaagactcgggattagtacacacttgttgattaatggaaatgtttacagatccccaagcctggcaagggaatttcttcaactccctgccccccagccctccttatcaaaggacaccattttggcaagctctatcaccaaggagccaaacatcctacaagacacagtgaccatactaattataccccctgcaaagcccagcttgaaaccttcacttaggaacgtaatcgtgtcccctatcctacttccccttcctaattccacagctgctcaataaagtacaagagcttaamaaaaaaaaaaaaaaaaaaaaaaaaaaaaaaaaaaaaaaaaaaaaaaaaaaaaaaaa

SEQ ID NO: 219 - DNA, 1557 bp, Homo sapiens
  misc_feature (1533)..(1533): n equals a,t,g, or c
gttgactgagggaatcctggttagtttcttctcctccgctgactaatatgccggacgcgtgggcggacgcgtgggcggaccgtgggtcgccgccacctccgcggaccctgagcgcaagagccaagccgccagcgctgctatgtgggccacgctgccgctgctctgcgccggggcctggctcctgggagtccccgtctgcggtgccgccgaactgtccgtgaactccttagagaagtttcacttcaagtcatggatgtctaagcaccgtaagacctacagtacggaggagtaccaccacaggctgcagacgtttgccagcaactggaggaagataaacgcccacaacaatgggaaccacacatttaaaatggcactgaaccaattttcagacatgagctttgctgaaataaaacacaagtatctctggtcagagcctcagaattgctcagccaccaaaagtaactaccttcgaggtactggtccctacccaccttccgtggactggcggaaaaaaggaaattttgtctcacctgtgaaaaatcagggtgcctgcggcagttgctggactttctccaccactggggccctggagtctgcgatcgccatcgcaaccggaaagatgctgtccttggcggaacagcagctggtggactgcgcccaggacttcaataatcacggctgccaagggggtctccccagccaggctttcgagtatatcctgtacaacaaggggatcatgggtgaagacacctacccctaccagggcaaggatggttattgcaagttccaacctggaaaggccatcggctttgtcaaggatgtagccaacatcacaatctatgacgaggaagcgatggtggaggctgtggccctctacaaccctgtgagctttgcctttgaggtgactcaggacttcatgatgtatagaacgggcatctactccagtacttcctgccataaaactccagataaagtaaaccatgcagtactggctgttgggtatggagaaaaaaatgggatcccttactggatcgtgaaaaactcttggggtccccagtggggaatgaacgggtacttcctcatcgagcgcggaaagaacatgtgtggcctggctgcctgcgcctcctaccccatccctctggtgtgagccgtggcagccgcagcgcagactggcggagaaggagaggaacgggcagcctgggcctgggtggaaatcctgccctggaggaagttgtggggagatccactgggacccccaacattctgccctcacctctgtgcccagcctggaaacctacagacaaggaggagttccaccatgagctcacccgtgtctatgacgcaaagatcaccagccatgtgccttagtgtccttcttaacagactcaaaccacatggaccacgaatattctttctgtccagaagggctactttccacatatagagctccagggactgtcttttctgtattcgctgttcaataaacattgagtgagcacctccccaraaaaaaaaaaaaaaaagggggggccnttttgggggttccttgggggggcc

SEQ ID NO: 220 - DNA, 594 bp, Homo sapiens
  misc_feature (1)..(1): n equals a,t,g, or c
nttttttttttttttccatttcagctctttcactgggtacccaggctgtattttaagaaattttkgtgaaatcaacagcatatatattattaaagcaagtattttctgtccctagtctgtggtccagggaatgagcaataagatacaaatgaacggttgacaccataccataaagattaggaataagcatatcataaagattagcaataagttggatcatgattttacagtgagctcggttttagtaagccataaaaaggattttatggtgaaacataagcttaatataatctctttatcatgttccccctaataactgttcattactgcttcagttcattttgtttacacttgtcacatacatctctacagtacacagacacagacttatattttctatacattttttagcattgagttgcctttggatcaatatagaattagtagggatcagtgcaggaaataatattacctttttctgaaagtagagtcttacttatgtatatagcacctttgatttaaggatctcaaggtactttaacattcactgtagcatacttctaatatctctgggtagggaaactattataaatc

SEQ ID NO: 221 - DNA, 1983 bp, Homo sapiens
ccacgcgtccggaagggtttggtgaagggggcaagagcccagagctccccggcgtccaggaagacgaggctgcatcctgagcccctgcatgcacccagggccacccggcagcacactcatcccgcgcctccagaggcccacccctcatgcaacagccgcccccgcaggcagggggctggggactgcagccccactcccgcccctcccccatcgtgctgcatgacctccacgcacgcacgtccagggacagactggaatgtatgtcatttggggtcttgggggagggctcccacgaggccatcctcctcttcttggccctccttggcctgacccattctgtggggaaaccgggtgcccatggagcctcagaaatgccacccggctggttggcatggcctggggcaggaggcagaggcaggagaccaagatggcaggtggaggccaggcttaccacaacggaagagacctcccgctggggccgggcaggcctggctcagctgccacaggcatatggtggagaggggggtaccctgcccaccttggggtggtggcaccagagctcttgtctattcagacgctggtatgggggctcggacccctcactggggacagggccagtgttggagaattctgattccttttttgttgtcttttacttttgtttttaacctgggggttcggggagaggccctgcttgggaacatctcacgagctttcctacatcttccgtggttcccagcacagcccaagattatttggcagccaagtggatggaactaactttcctggactgtgtttcgcattcggcgttatctggaaagtggactgaacggaatcaagctctgagcagaggcctgaagcggaagcaccacatcgtccctgcccatctcactctctcccttgatgatgcccctagagctgaggctggagaagacaccagggctgactttgactgagggccatggacgcgacaggcctgtggccctgcgcatgctgaaataactggaacccagcctctcctcctacaccggcctacccatctgggcccaagagctgcactcacactcctacaacgaaggacaaactgtccaggtcggagggatcacgagacacagaacctggaggggtgtgcacgctggcaggtggcctctgcggcaattgcctcaccctgaggacatcagcagtcagcctgctcagagcgggggtgctggagcgcgtgcagacacagctcttccggagcagccttcaccttctctctgggatcagtgtccggctggccgacgtggcatttgctgaccgaatgctcatagaggttgacccccacagggtcacgcaggactcggacactgccctggaaacatggatggacaagggcttttggccacaggtgtgggtgtcctgttggaggagggcttgtttggagaagggagtctggctgggggagaaacccggatcccgctgcatctccgcgcctgtgggtgcatgtcgcgtgctcatctgttgcacacagctcactcgtatgtcctgcactggtacatgcatctgtaatacagtttctacgtctatttaaggctaggagccgaatgtgccccattgtcagtgggtccacgtttctccccggctcctctgggctaaggcagtgtggcccgaggcttaaaaagttactcggtactgtttttaagaacacttttatagagttagtggaaggcaagttaagagccaatcactgatccccaagtgtttcttgagcatctggtctggggggaccactttgatcggacccacccttggaaagctcaggggtaggcccaggtgggatgctcaccctgtcactgagggttttggttggcatcgttgtttttgaatgtagcacaagcgatgagcaaactctataagagtgttttaaaaattaacttcccaggaagtgagttaaaaacaataaaagccctttcttgagttaaaaagaaaaaaaaaaaaaaaaaa

SEQ ID NO: 222 - DNA, 756 bp, Homo sapiens
  misc_feature (593)..(593): n equals a,t,g, or c
  misc_feature (619)..(619): n equals a,t,g, or c
  misc_feature (676)..(676): n equals a,t,g, or c
  misc_feature (704)..(704): n equals a,t,g, or c
  misc_feature (713)..(713): n equals a,t,g, or c
gcggacgcgtgggcggacgctggkcgcggtcagctattgacacttcctggtgggatccgagtgaggcgacggggtaggggttggcgctcaggcggcgaccatggcgtatcacggcctcactgtgcctctcattgtgatgagcgtgttctggggcttcgtcggcttcttggtgccttggttcatccctaagggtcctaaccggggagttatcattaccatgttggtgacctgttcagtttgctgctatctcttttggctgattgcaattctggcccaactcaaccctctctttggaccgcaattgaaaaatgaaaccatctggtatctgaagtatcattggccttgaggaagaagacatgctctacagtgctcagtctttgaggtcacgagaagagaatgccttctagatgcaaaatcacctccaaaccagaccacttttcttgacttgcctgttttggccattagctgccttaaacgttaacagcacatttgaatgccttattctacaatgcagcgtgttttcctttgccttttttgcactttggtgaattacgtgcctccataacctgaactgtgccgacyccacaaaacgnattatgtactcttctgagatagaagntgctgttccttctgaagagatacgttactctctccttggaaatctggtggaatttgnaagaatgggcctccttgcccttctccancggtggggnaatccaagtgaaaagttggtttaagaaaaatgggttggcaaag

SEQ ID NO: 223 - DNA, 965 bp, Homo sapiens
  misc_feature (1)..(1): n equals a,t,g, or c
  misc_feature (5)..(5): n equals a,t,g, or c
  misc_feature (22)..(22): n equals a,t,g, or c
  misc_feature (75)..(76): n equals a,t,g, or c
nggantaccctttaacaaaagntgccgctccaccgcggtggcggccgctctagaactagtggatcccccgggctnnaggaattcggcacgaggaacaacccaraaaccttcacctctcatgctgaagctcacacccttgccctccaagatgaaggtttctgcagcgcttctgtgcctgctgctcatggcagccactttcagccctcagggacttgctcagccagattcagtttccattccaatcacctgctgctttaacgtgatcaataggaaaattcctatccagaggctggagagctacacaagaatcaccaacatccaatgtcccaaggaagctgtgatcttcaagaccaaacggggcaaggaggtctgtgctgaccccaaggagagatgggtcagggattccatgaagcatctggaccaaatatttcaaaatctgaagccatgagccttcatacatggactgagagtcagagcttgaagaaaagcttatttattttccccaacctcccccaggtgcagtgtgacattattttattataacatccacaaagagattatttttaaataatttaaagcataatatttcttaaaaagtatttaattatatttaagttgttgatgttttaactctatctgtcatacatcctagtgaatgtaaaatgcaaaatcctggtgatgtgttttttgtttttgttttcctgtgagctcaactaagttcacggcaaaatgtcattgttctccctcctacctgtctgtagtgttgtggggtcctcccatggatcatcaaggtgaaacactttggtattctttggcaatcagtgctcctgtaagtcaaatgtgtgctttgtactgctgttgttgaaattgatgttactgtatataactatggaattttgaaaaaaaatttcaaaaagaaaaaaatatatataatttaaaactaaaaaaaaaaaaaaaaaactcga

SEQ ID NO: 224 - DNA, 2381 bp, Homo sapiens
ccacgcgtcccgcaaggccagttctagtgtagagagaaaaaggagccggcagcggctcttacgcgtcccggggctgcgcgccactctctcggccggtaacgcggtgctttgcggctgtcgtcaagcgcggcgttgggccggcgggcgggggctgaggggctgccatggcggcggcgggccggctcccgagctcctgggccctcttctcgccgctcctcgcagggcttgcactactgggagtcgggccggtcccagcgcgggcgctgcacaacgtcacggccgagctctttggggccgaggcctggggcacccttgcggctttcggggacctcaactccgacaagcagacggatctcttcgtgctgcgggaaagaaatgacttaatcgtctttttggcagaccagaatgcaccctattttaaacccaaagtaaaggtatctttcaagaatcacagtgcattgataacaagtgtagtccctggggattatgatggagattctcaaatggatgtccttctgacatatcttcccaaaaattatgccaagagtgaattaggagctgttatcttctggggacaaaatcaaacattagatcctaacaatatgaccatactcaataggacttttcaagatgagccactaattatggatttcaatggtgatctaattcctgatatttttggtatcacaaatgaatccaaccagccacagatactattaggagggaatttatcatggcatccagcattgaccactacaagtaaaatgcgaattccacattctcatgcatttattgatctgactgaagattttacagcagatttattcctgacgacattgaatgccaccactagtaccttccagtttgaaatatgggaaaatttggatggaaacttctctgtcagtactatattggaaaaacctcaaaatatgatggtggttggacagtcagcatttgcagactttgatggagatggacacatggatcatttactgccaggctgtgaagataaaaattgccaaaagagtaccatctacttagtgagatctgggatgaagcagtgggttccagtcctacaagatttcagcaataagggcacactctggggctttgtgccatttgtggatgaacagcaaccaactgaaataccaattccaattacccttcatattggagactacaatatggatggctatccagacgctctggtcatactaaagaacacatctggaagcaaccagcaggcctttttactggagaacgtcccttgtaataatgcaagctgtgaagaggcgcgtcgaatgtttaaagtctactgggagctgacagacctaaatcaaattaaggatgccatggttgccaccttctttgacatttacgaagatggaatcttggacattgtagtgctaagtaaaggatatacaaagaatgattttgccattcatacactaaaaaataactttgaagcagatgcttattttgttaaagttattgttcttagtggtctgtgttctaatgactgtcctcgtagataacaccctttggagtgaatcaacctggaccttatatcatgtatacaactgtagatgcaaatgggtatctgaaaaatggatcagctggccaactcagccaatccgcacatttagctctccaactaccatacaacgtgcttggtttaggtcggagcgcaaattttcttgaccatctctacgttggtattccccgtccatctggagaaaaatctatacgaaaacaagagtggactgcaatcattccaaattcccagctaattgtcattccataccctcacaatgtccctcgaagttggagtgccaaactgtatcttacaccaagtaatattgttctgcttactgctatagctctcatcggtgtctgtgttttcatcttggcaataattggcattttacattggcaggaaaagaaagcagatgatagagaaaaacgacaagaagcccaccggtttcattttgatgctatgtgacttgcctttaatattacataatggaatggctgttcacttgattagttgaaacacaaattctggcttgaaaaaataggggagattaaatattatttataaatgatgtatcccatggtaattattggaaagtattcaaataaatatggtttgaatatgtcacaaggtctttttttttaaagcactttgtatataaaaatttgggttctctattctgtagtgctgtacatttttgttcctttgtggaatgtgttgcatgtactccagtgtttgtgtatttataatcttatttgcatcatgatgatggaaaaagttgtgtaaataaaaataattaaatgagcaggaaaaaaaaaaaaaaaaaaaaaaaaaaaaaaaaaaaaaa

SEQ ID NO: 225 - DNA, 608 bp, Homo sapiens
ggttgttttgcgtcttagttccgccctcctgtccatcaggagaaggaaaggataaaccctgggccatgaggctacccctgctcctggtttttgcctctgtcattccgggtgctgttctcctactggacaccaggcaatttttaatctataatgaagatcacaagcgctgcgtggatgcagtgagtcccagtgccgtccaaaccgcagcttgcaaccaggatgccgaatcacagaaattccgatgggtgtccgaatctcagattatgagtgttgcatttaaattatgcctgggagtgccatcaaaaacggactgggttgctatcactctctatgcctgtgactcaaaaagtgaatttcagaaatgggagtgcaaaaatgacacacttttggggatcaaaggagaagatttattttttaactacggcaacagacaagaaaagaatattatgctctacaagggatcgggtttatggagcaggtggaagatctatggaaccacagacaatctgtgctccagaggttatgaagccatgtatacgctactaggcaatgccaatggagcaacctgtgcattcccgttcagtttgaaaacaagtggtacgcagatt

SEQ ID NO: 226 - DNA, 1575 bp, Homo sapiens
agttccgcgtcgtcgcgcagagctgactctgggaggcgtttgggcccagagaagtggatccgccgcttgcgccgcatggagtccgaatcggaaagcggggctgctgctgacacccccccactggagaccctaagcttccatggtgatgaagagattatcgaggtggtagaacttgatcccggtccgccggacccagatgacctggcccaggagatggaagatgtggactttgaggaagaagaggaggaagagggcaacgaagagggctgggttctagaaccccaggaaggggtggtcggcagcatggagggccccgacgatagcgaggtcacctttgcattgcactcagcatctgtgttttgtgtgagcctggaccccaagaccaataccttggcagtgaccgggggtgaagatgacaaagccttcgtatggcggctcagcgatggggagctgctctttgagtgtgcaggccataaagactctgtgacttgtgctggtttcagccatgactccactctagtggccacaggggacatgagtggcctcttgaaagtgtggcaggtggacactaaggaggaggtctggtcctttgaagcgggagacctggagtggatggagtggcatcctcgggcacctgtcctgttggcgggcacagctgacggcaacacctggatgtggaaagtcccgaatggtgactgcaagaccttccagggtcccaactgcccagccacctgtggccgagtcctccctgatgggaagagagctgtggtaggctatgaagatgggaccatcaggatttgggacctgaagcagggaagccctatccatgtactgaaagggactgagggtcaccagggcccactcacctgtgttgctgccaaccaggatggcagcttgatcctaactggctctgtggactgccaggccaagctggtcagtgccaccaccggcaaggtggtgggtgtttttagacctgagactgtggcctcccagcccagcctgggagaaggggaggagagtgagtccaactcggtggagtccttgggcttctgcagtgtgatgcccctggcagctgttggctacctggatgggaccttggccatctatgacctggctacgcagactcttaggcatcagtgtcagcaccagtcgggcatcgtgcagctgctgtgggaggcaggcactgccgtggtatatacctgcagcctggatggcatcgtgcgcctctgggacgcccggaccggccgcctgcttactgactaccggggccacacggctgagatcctggactttgccctcagcaaagatgcctccctggtggtgaccacgtcaggagaccacaaagcgaaagtattttgtgtccaaaggcctgaccgttaatggctgcagcccctgcctgtgtgtctggtgttgaggggacgaagggacccctgcccctgtctgcagcagaggcagtagggcacagagggaagaggagggtggggccctggatgactttccagcctcttcaactgacttgctcccctctccttttcttctctttagagacccagcccagggccytccmacccttga

SEQ ID NO: 227 - DNA, 1015 bp, Homo sapiens
tttagggcccaccctaatccaatatgacctcatcttaacttgattacatctgtaaaaaccttattttcaaataaggtcacattgacaggtacttggggttaggacttgcgcttttctttttgggtgacacagcttagcccagcactaactgtgtcaccaggactgtcgcttgaggcaggaatgaagcacatcctgtttgtaagctgtcttgtgccatgcggctgctccgtacaagaattgttaggaattgatgcagtggaattttgcatacagtttttcctctcttcagaaacaactttggagaagtaaaggctgaatagcaatacacaagcaccttattttattttattttagattcaggggcacgtgtacatgtttgtcacatgggaatattgtgcactggtggggactgggcttccggtatcgcatggagagggactctttctgcgctcccccgcccccgcctccctactgtaaagtgcccggtgcctgctctctccatcttcgtgtccatgggcacccattgtttagctcccacttataagtgagaacagtcagtatttgattttctgtttctgagttagttcacttagggtaatggcctctagctccatccgtgttgctgcagaggacatgattttattcttttttatggctgcagcaatacacaagctccttatttttatttatttatttatttatttttgttgtttgtttgtttgttttgagacggagtctggctctcgtcccccaggctggagtgagccgagatcccgccactgcactccagcctgggcgacagagcgagactccgtctcaaaaaaaaaaaaaaaaaaaaaaaaaatacaaaaattagctgaggttgtggtgtgtgcctgtaatcccagctactcagcaggctaaggcaggagaatctcttgaacctgggaggcggaggttacagtgacccgagattgcaccactgcactccagcctgggtgacagagactctgtctcaaaaaaaaaaaaaaaaaaa

SEQ ID NO: 228 - DNA, 2696 bp, Homo sapiens
  misc_feature (2658)..(2658): n equals a,t,g, or c
cttggagggtgggcgtgggaactcaggaccccagagtggcgagtggtgtggggagggagagcctctctcccccttttctgtgtgagaggaactcttagtgtctgcaccttagaaaaaaaaaagaaaaatcaaaaaaacaaaaaaacaaaaacaaaaaaagaaggaaaatcttggagggtgggcgtgggaactcaggaccccagagtggcgagtggtgtggggagggagagcctctctcccccttttctgtgtgagaggaactcttagtgtctggtgcagctattaaatgtgcaatgtgtcaagtagcttgttttacacgctacaacatagctcatttgtaacccattgtataagctgtgtatttacaaatataacacaacaatttaacttttccttagaatacaaaaagtcatgcatggtctggggaactatatgcttttccatttttaagtcaggactgcaatactgattccagttaatgagcagctaagatccaatctgtctaatacagtgaccccctagccatccgggcctggcaatatacaattttttttcccctccaagtttgtaacactccccttccrgaaaggcattgtgcaacacaggattatttttaaatgattctgaatttgaattaactttttggagaattctgtgatgcccttagaagaaattggacacgtattgagtgtcacaaagctggggctgggaattgctggtctaatgtttcattagacttaagaacctaaaatttttctcagttgggtggataaaaccactaacgcttagaaactgttttctcatgcagctatgtttctcttatttatgccttgaggactaatttctggttttctagctgttaatgcactgttgaccttcataatggtgccttacgcaagcgatcccttctgtgggggtctcatacaggggtgtgggcgatgcatgctttattaaggctcttgtttcacctggcagtgtactgtatcaacgtataatacagaaaaaaaatctctttaaggtcctccttcacaaagacatagagtgaaactccctttacatgtcagtatttgttcaacactttaggcaacttgactgtcagtgttaaaatggaaaacaggaaaatggaaaaatctgaccaattctgccaccttgagactttcatatagaccttgcacaacaattgtatagatcacacaccggctgtatttaatatgtaacattttcacacatattaaagatacagaagtattaaaaaacccccaatgttaatgtatttgcttaaaaggcacaagtttcacatatctgtctagctatctgttggtaatacagaaagtatactacttttttaaaaaagtgggcagaattcttgtgtatgtatatttgtgtgtacagtatgtgtatgtgtgtatatatatatattatatatatagataatatataaatattttttttaaggagaaactagaatgtttagctagaaaattccacagcctgtgaagaaatatttcaaaatggccataaaggaggtaaaaatgaaaaccataacctaacttttatagaggctttatctttaatttaacgatgtgcggaggactttcttgcttgaatctgttccgggctgtctgctctgtccatcaaatgggcaggtctggaatggggcaccttcggccgttcagaagtggcctgaacagaatgctggaacccaggctggactcggacacactaaggttttgattttgaatttcagccttattagaagatctaacctaagagtaagctaaccacagggattcttttgtagaacactttttatgcagatgaagctattttttccagcaagtagattcttccagtttttccaaggagtaatttccccgaattggcataccacggcgtggacagctgatatttcacccagctgctggcttgtgggtgtggctctttgctttatatatatatacacacatgtgagtctggctgggctggtattttgtttgatcttcctggaaatgagcagtgactaacgctcacataactggttttttttttatctgggctgatgaatacatttacctaagaaactcatttcgttttacttaagaggggaagtgcagttttcttttggcagttcagaatccaagcacttgatttgctgggtttggaaaactccttttttggccttctatgtgcttagccataacaattccattaagcaagaaggtaagcaaaagacaaaaaaaaaaaaaaaaaaaaaaaaaaaaaaaaaacttgcactggcttgtctcacttacgaaacatgtcggagctgtttgcctgggtggggctgggtaccgtacctgtcaatgcctgtgattttcataattagcacgtacataaagaagtacattctgttcaggtgataactgagcctcaatcaagcagaaactttttgcttgaaattaaaaaaaaatttctattagtgaaatttctttttttttttttttggaagcaccctgttatctaaagaatctttgtaagatttttgtaaaattttgttttacaagattttatttgaaattgttttttgcaagattgttatatttctgtatgaatgtattttttattggaataacataaaagaattcttatcagcaaaaaaaaaaaaaaagggcggccgtntagaggaccaagcttacgtacgcgtgcatgcacgcata

SEQ ID NO: 229 - DNA, 2459 bp, Homo sapiens
  misc_feature (1335)..(1335): n equals a,t,g, or c
  misc_feature (1367)..(1367): n equals a,t,g, or c
  misc_feature (2455)..(2459): n equals a,t,g, or c
agaggccagctcagacctcccggctcgacaggcggcgcgggcggcggtaaaatgtcggttccaggaccttaccaggcggccactgggccttcctcagcaccatccgcacctccatcctatgaagagacagtggctgttaacagttattaccccacacctccagctcccatgcctgggccaactacggggcttgtgacggggcctgatgggaagggcatgaatcctccttcgtattatacccagccagcgcccatccccaataacaatccaattaccgtgcagacggtctacgtgcagcaccccatcacctttttggaccgccctatccaaatgtgttgtccttcctgcaacaagatgatcgtgagtcagctgtcctataacgccggtgctctgacctggctgtcctgcgggagcctgtgcctgctggggtgcatagcgggctgctgcttcatccccttctgcgtggatgccctgcaggacgtggaccattactgtcccaactgcagagctctcctgggcacctacaagcgtttgtaggactcagccagacgtggagggagccgggtgccgcaggaagtcctttccacctctcatccagcttcacgcctggtggaggttctgccctggtggtctcacctctccagggggcccaccttcatgtcttcttttggggggaatacgtcgcaaaactaacaaatctccaaaccccagaaattgctgcttggagtcgtgcataggacttgcaaagacattccccttgagtgtcagttccacggtttcctgcctccctgagaccctgagtcctgccatctaactgtgatcattgccctatccgaatatcttcctgtgatctgccatcagtggctcttttttcctgcttccatgggcctttctggtggcagtctcaaactgagaagccacagttgccttatttttgaggctgttctgcccagagctcggctgaaccagcctttagtgcctaccattatcttatccgtctcttcccgtccctgatgacaaagatcttgccttacagactttacaggcttggctttgagattctgtaactgcagacttcattagcacacagattcactttaatttcttaattttttttttaaatacaaggagggggctattaacacccagtacagacatatccacaaggtcgtaaatgcatgctagaaaaatagggctggatcttatcactgccctgtctccccttgtttctctgtgccagatcttcagtgcccctttccatacagggatttttttctcatagagtaattatatgaacagtttttatgacctccttttggtctgaaatacttttgnaacagaatttcttttttttaaaaaaaaacagngatggggtcttactatgttgcccaggctggtgtcgaactcctgggctcaagcgatccttctgccttggcctcccgaagtgctgggattgcaggcataagctaccatgctgggcctgaacataatttcaagaggaggatttataaaaccattttctgtaatcaaatgattggtgtcattttcccatttgccaatgtagtctcacttaaaaaaaaaaaaaagaaaaagaaatggataatttcatctactgcctttacttggggttaatgtgattcttaaacaccttcatcatggaactctcagagtggggtccgttttggtttcctggtggtgggttttgaaagataagggaaagcacattttgagcatgtctgggtaccatggtgcggatgcttgggaaccagaactgtttcagaggaatctaaagtctgattttagttttcagagacacagcttgttgtaaaacatgagaagacatgatttctaggactcaagcagcaagccaggattctaggttggctgctgtgtcatctttgaagtcaagacaaagctgggctcgaccttcaagggtcctcgttttgataatacttcagaatagggaactcatgtgaatactactatgtagaaataaaacctagaccttgagcgaacatctgtatattggttgaaaacgatagtggtaaccattgatcccccttcatttgatgtttggaaaattccagtaattatcatttttgcaacgaatatggataccacatagtactttggtgttacctgcttttgaaaaataaagtctttggttcacccggtgaactatttatgagttcttttggtgtgaagaaagggctcatgttgcatttccagccattgctacaaagaacctttatttgttcagtaacggtagaaaatccttcccgattaaaaacttcagacttgctgaatatcctgcaatgtcaagatgaccgatgttgagttgggtggatttgctaacgagtcagatttgaacatgaggctattggaacccaataggcgtcattgatggcggcaagccatagctttcaaggtttaataaaatgcacaaaagaaaaannnnn

SEQ ID NO: 230 - DNA, 1415 bp, Homo sapiens
atatgaagggaaagaatttgattatgttttctcaattgatgtcaatgaaggtggaccatcatataaattgccatataataccagtgatgacccttggttaactgcatacaacttcttacagaagaatgatttgaatcctatgtttctggatcaagtagctaaatttattattgataacacaaaaggtcaaatgttgggacttgggaatcccagcttttcagatccatttacaggtggtggtcggtatgttccgggctcttcgggatcttctaacacactacccacagcagatccttttacaggtgctggtcgttatgtaccaggttctgcaagtatgggaactaccatggccggagttgatccatttacagggaatagtgcctaccgatcagctgcatctaaaacaatgaatatttatttccctaaaaaagaggctgtcacatttgaccaagcaaaccctacacaaatattaggtaaactgaaggaacttaatggaactgcacctgaagagaagaagttaactgaggatgacttgatacttcttgagaagatactgtctctaatatgtaatagttcttcagaaaaacccacagtccagcaacttcagattttgtggaaagctattaactgtcctgaagatattgtctttcctgcacttgacattcttcggttgtcaattaaacaccccagtgtgaatgagaacttctgcaatgaaaaggaaggggctcagttcagcagtcatcttatcaatcttctgaaccctaaaggaaagccagcaaaccagctgcttgctctcaggactttttgcaattgttttgttggccaggcaggacaaaaactcatgatgtcccagagggaatcactgatgtcccatgcaatagaactgaaatcagggagcaataagaacattcacattgctctggctacattggccctgaactattctgtttgttttcataaagaccataacattgaagggaaagcccaatgtttgtcactaattagcacaatcttggaagtagtacaagacctagaagccacttttagacttcttgtggctcttggaacacttatcagtgatgattcaaatgctgtacaattagccaagtctttaggtgttgattctcaaataaaaaagtattcctcagtatcagaaccagctaaagtaagtgaatgctgtagatttatcctaaatttgctgtagcagtggggaagagggacggatatttttaattgattagtgtttttttcctcacatttgacatgactgataacagataattaaaaaaagagaatacggtggattaagtaaaattttacatcttgtaaagtggtggggaggggaaacagaaataaaatttttgcactgctgaaaaaaaaaaaaaaaaaaaaaarraaacycggggggggcccgg

SEQ ID NO: 231 - DNA, 2164 bp, Homo sapiens
  misc_feature (2126)..(2126): n equals a,t,g, or c
  misc_feature (2134)..(2134): n equals a,t,g, or c
  misc_feature (2136)..(2136): n equals a,t,g, or c
aattcggcacgaggggaggggaggtgtttaggagaaagtaggggctgtgggtgtcgggagccggctgacgggtggacaagggggggttagcagctgggctgcgaccgttagggaggggctcaaggtgtgcatgtgtgagggaagagagagagagagaagggcgcctcagaggtgactttcagcctgcgagccttcttcccggggcgccataaacgcccccaatttcccagctgctaaaggaagaggaagatcttagcaaagcaatgtctcaagatggtgcttctcagttccaagaagtcattcggcaagagctagaattatctgtgaagaaggaactagaaaaaatactcaccacagcatcatcacatgaatttgagcacaccaaaaaagacctggatggatttcggaagctatttcatagatttttgcaagaaaaggggccttctgtggattggggaaaaatccagagaccccctgaagattcgattcaaccctatgaaaagataaaggccaggggcttgcctgataatatatcttccgtgttgaacaaactagtggtggtgaaactcaatggtggtttgggaaccagcatgggctgcaaaggccctaaaagtctgattggtgtgaggaatgagaatacctttctggatctgactgttcagcaaattgaacatttgaataaaacctacaatacagatgttcctcttgttttaatgaactcttttaacacggatgaagataccaaaaaaatactacagaagtacaatcattgtcgtgtgaaaatctacactttcaatcaaagcaggtacccgaggattaataaagaatctttacttcctgtagcaaaggacgtgtcttactcaggggaaaatacagaagcttggtaccctccaggtcatggtgatatttacgccagtttctacaactctggattgcttgatacctttataggagaaggcaaagagtatatttttgtgtctaacatagataatctgggtgccacagtggatctgtatattcttaatcatctaatgaacccacccaatggaaaacgctgtgaatttgtcatggaagtcacaaataaaacacgtgcagatgtaaagggcgggacactcactcaatatgaaggcaaactgagactggtggaaattgctcaagtgccaaaagcacatgtagacgagttcaagtctgtatcaaagttcaaaatatttaatacaaacaacctatggatttctcttgcagcagttaaaagactgcaggagcaaaatgccattgacatggaaatcattgtgaatgcaaagactttggatggaggcctgaatgtcattcaattagaaactgcagtaggggctgccatcaaaagttttgagaattctctaggtattaatgtgccaaggagccgttttctgcctgtcaaaaccacatcagatctcttgctggtgatgtcaaacctctatagtcttaatgcaggatctctgacaatgagtgaaaagcgggaatttcctacagtgcccttggttaaattaggcagttcttttacgaaggttcaagattatctaagaagatttgaaagtataccagatatgcttgaattggatcacctcacagtttcaggagatgtgacatttggaaaaaatgtttcattaaagggaacggttatcatcattgcaaatcatggtgacagaattgatatcccacctggagcagtattagagaacaagattgtgtctggaaaccttcgcatcttggaccactgaaatgaaaaatactgtggacacttaaataatgggctagtttcttacaatgaaatgttctctaggattctaaaataggcaggtactttactatgttactgtaccctgcagtgttgatttttaaaatagagttttctgcagtatgcttttagtctaagaaaagcacagatggagcaatactttccttctttgaagagaatcccaaaagttagttcatcttaaagtgcaatattgtttaatcttaaaactgggcaactttggaagaacttttaacagaagcctcaatgatgatcactttgaattgcttgtgatttcaaaaataaagcagtgaagcaawaaaaaaaaaaaaaaaaaaaaggggggssgccccgnacccattngnccttaggggggggtttcaaataatggcc

SEQ ID NO: 232 - DNA, 1341 bp, Homo sapiens
  misc_feature (1304)..(1305): n equals a,t,g, or c
  misc_feature (1314)..(1317): n equals a,t,g, or c
  misc_feature (1321)..(1321): n equals a,t,g, or c
  misc_feature (1337)..(1338): n equals a,t,g, or c
atgcaagcttcagggttgagagtgtataagagacagactgtagataagacgattgtcatttccacttggaaagtgaatctcccataataattgtatttgtttgaaactaagctgtcctcagattttaacttgactcaaacatttttcaattatgacagcctgttaatatgacttgtactattttggtattatactaatacataagagttgtacatattgttacattctttaaatttgagaaaaactaatgttacatacattttatgaagggggtacttttgaggttcacttattttactattatagaccctcttttatagattatcagggattatatatataaatatataaatatacataaaaatgttatggaattaatttattagaaacacttaagaagtacatatttttgtgcagtagatttttgaatcgatactttttttgaaaaccagtttccttgcttttttaagttctttctatatttttctttggaaatgcaaacattacaaamcaatgccatttttcaaatgcactgccatttaagattgattatagatggatttcttaattgaagtacttttataatcacagtgrctgaacaaaatattttcaaagacatttgtcattccttaaagccaagattttaaagactaatgtccttcctgagggttactttactatactgtgtatggtgtatagccacagaaagtcagtctgataaattttcaatgtgtaagtgtgatgcattcaacccagattattgtagacttaacttattatatttcctctgatatgtaaaatgacaaactcttctttcctttttaatctttgtctttaatccatgaattaggtgcattatctgctgttgattcttttatatctgcactcattttatgacgtcagacaaaatgttttctaggtgttgctattgtatgagtcataattggtataattttaaagaaaattgtaatattgttttttggtgaaatatattattagtagtatattttccaaaatgattttattgtagtatgaactgataagtgagtcccgtgtccaagagactgtatttattactcttaaacacgctattccaaatgatattactactataaacaaagaatattaccggtctcagcaatcagtgatctttataaaagtacttttaaaaaatgatgaattatcaccaggcgctgtggctcacgcctgtaatcccagcactttgggaggccgaggcgggcggatcacgaggtcaggagatcaagaccatcctggctaacacggtgaaaccctgtctctactannaaaaaaaannnnaaanaaaaaaaaaaaaaaannggg

SEQ ID NO: 233 - DNA, 1372 bp, Homo sapiens
  misc_feature (1366)..(1366): n equals a,t,g, or c
actataggaatttgccctcgggccaagatccggcacktkacacttcacttgtgtagtactgaaaagatatataaagaattttatagaagtgaagtgattaagaattccttgaatcccacgtggcgaagtctcgattttggaattatgccagaccgtcttgatacatctgtgtcttgtttcgtggtgaagatatggggtggaaaggagaacatctaccagctgttgattgaatggaaagtctgtttggatgggctgaaatacttgggtcagcagattcatgcccgaaaccaaaatgaaataatttttgggctgaatgatggatactatggtgctccatttgaacataagggttattcaaatgctcagaagactattcttctgcaggtggatcagaactgtgttcgcaattcttacgatgtcttctctttgctacggcttcatagagcccagtgtgcaattaaacagactcaggtaactgttcagaaaattggaaaggaaattgaagaaaaactaagactcacatctacaagcaatgaactgaaaaaaaaaagtgaatgcctgcagttaaaaattttggtgcttcagaatgaactggaacggcagaagaaagctttgggacsggaggtggcattactgcataagcmacaaattgcattacaagacaaaggaagtgcattttcagctgagcacctcaaacttcaactccagaaggaatccctaaatgagctgaggaaggagtgcactgcaaaaagagaactcttcttgaagactaatgctcagttgacaattcgttgcaggcagttactctctgagctttcctacatttaccctattgatttgaatgaacataaggattactttgtatgcggtgtcaagttgcctaattctgaggacttccaagcaaaagatgatggaagcattgctgttgcccttggttatactgcacatctggtctccatgatttcctttttcctacaagtgcccctcagatatcctataattcataaggggtctagatcaacaatcaaagacaatatcaatgacaaactgacggaaaaggagagagagtttccactgtatccaaaaggaggggagaagttgcagtttgattatggtgtctatcttctgaacaaaaatatagcacagctaagatatcaacatggactagggactccagacttgcggcaaacccttcccaacctgaaaaacttcatggagcatggactaatggtcaggtgtgacagacatcacacctccagtgcaatccctgttcctaagaracaaagctccatatttgggggtgcaratgtagcttctctggggggatcccttcccagacaaaggactcgaaaacgggccagctctnagaatt

SEQ ID NO: 234 - DNA, 1717 bp, Homo sapiens
tcgacccacgcgtccgggagctctctgatgtcaccctcattgagggtgtgggtaatgaggtgatggtggtggcaggtgtggtggtgctgattctagccttggtcctagcttggctctctacctacgtagcagacagcggtagcaaccagctcctgggcgctattgtgtcagcaggcgacacatccgtcctccacctggggcatgtggaccacctggtggcaggccaaggcaaccccgagccaactgaactcccccatccatcagaggacaagcaggtgcaggcagcagcagtccagaggcccccctgagatctgaggatagcacctgcctccctcccagccctggcctcatcactgtgcggctcaaattcctcaatgataccgaggagctggctgtggctaggccagaggataccgtgggtgccctgaagagcaaatacttccctggacaagaaagccagatgaaactgatctaccagggccgcctgctacaagacccagcccgcacactgcgttctctgaacattaccgacaactgtgtgattcactgccaccgctcacccccagggtcagctgttccaggcccctcagcctccttggccccctcggccactgagccacccagccttggtgtcaatgtgggcagcctcatggtgcctgtctttgtggtgctgttgggtgtggtctggtacttccgaatcaattaccgccaattcttcacagcacctgccactgtctccctggtgggagtcaccgtcttcttcagcttcctagtatttgggatgtatggacgataaggacataggaagaaaatgaaaggcatggtctttctcctttacggcctccccacttttcctggccagagctgggcccaagggccggggagggaggggtggaaaggatgtgatggaaatctcctccataggacacaggaggcaagtatgcggcctccccttctcatccacaggagtacagatgtccctcccgtgcgagcacaactcatgtagaaatgaggatgtcatcttccttcacttttagggacctctgaaggagttcaaagctgctggccaagctcagtggggagcctgggctctgagattccctcccacctgtggttctgactcttcccagtgtcctgcatgtctgcccccagcacccagggctgcctgcaagggcagctcatcatggccccagcacaactccgtagggagcctggagtatccttccatttctcagccaaatactcatcttttgagactgaaatcacactggcgggaatgaagattgtgccagccttctcttatgggcacctagcccgacttcaccttcttactctaccccttagcaggaatagggtgtcctcccttctttcaaagcactttgcttgcattttattttatttttttaagagtccttcatagagctcagtcaggaaggggatggggcaccaagccaagcccccagcattgggagcggccaggccacagctgctgctcccgtagtcctcaggctgtaagcaagagacagcactggcccttggccagcgtcctaccctgcccaactccaaggactgggtatggattgctgggccctaggctcttgcttctggggctattggagggtcagtgtctgtgactgaataaagttccattttgtggtaaaaaaaaaaaaaaaaaaaaaaaaaaaaaaaaaaaaaaaaaaaaaaaaaaaaaaagggc

SEQ ID NO: 235 - DNA, 2030 bp, Homo sapiens
ccacgcgtccggcctctgctcgcgctgcctgctcggagccgcttgctcggctgcctctggctgggctccgcgatcctctcccccaccctcgggcactgctccgcctccctcccggcgggctgtccccgcagtgctcccggacccggcgagccttcggggcgcgcgtcgctggtggtggttgaggctctagcgataataaatgatagaggatacaatgactttgctgtctctgctgggtcgcatcatgcgctacttcttgctgagacccgagacgcttttcctgctgtgcatcagcttggctctatggagttacttcttccacaccgacgaggtgaagaccatcgtgaagtccagccgggacgccgtgaagatggtgaagggcaaggtagccgagatcatgcagaacgatcgactcggggggcttgatgtgctcgaggccgagttttccaagacctgggagttcaagaaccacaacgtgggcggtgtactccatccagggccggagagaccacatggaggaccgcttcgaagttctcacggatctggccaacaagacgcacccgtccatcttcgggatcttcgacgggcacgggggagagactgcagctgaatatgtaaaatctcgactcccagaggcccttaaacagcatcttcaggactacgagaaagacaaagaaaatagtgtattatcttaccagaccatccttgaacagcagattttgtcaattgaccgagaaatgctagaaaaattgactgtatcctatgatgaagcaggcacaacgtgtttgattgctctgctatcagataaagacctcactgtggccaacgtgggtgactcgcgcggggtcctgtgtgacaaagatgggaacgctattcctttgtctcatgatcacaagccttaccagttgaaggaaagaaagaggataaagagagcaggtggtttcatcagtttcaatggctcctggagggtccagggaatcctggccatgtctcggtccctgggggattatccgctgaaaaatctcaacgtggtcatcccagacccagacatcctgacctttgacctggacaagcttcagcctgagttcatgatcttggcatcagatggtctctgggatgctttcagcaatgaagaagcagttcgattcatcaaggagcgcttggatgaacctcactttggggccaagagcatagttttacagtcattttacagaggctgccctgacaatataacagtcatggtggtgaagttcagaaatagcagcaaaacagaagagcagtgaacccttcaggggtctcagctgccttagactaaaggactttcaacacactggtctcttttaatttagtgaaaagtgtgggagttgtaattaggatcatccaccccagacatggaatcccccctccctggtggtcttaggtctataatcagtgacgaacagagggtgcccttgggccatgtagttaagaaactggaaaatggtttcttcatgttttcccaactctttcatccagtgtccaaaatatataagtaaatagctgtagagtcacatatatgaagtgaatagcatatgtgtcatttagtctccctgaagattcttttcaagatcctgttcagggtcctccaggcatcagctgttgtgtcctctctttgtaacagtggacaggacagaccacccagtgctgcaggagacaggccactgcgtcacctgtgagtggtcaggggctgatgtggcaacaccctctgccaagagacagagctgtcctgagaatgctttgtccttctgagcccatgttttctgctcagtagcagcttggaagcagatttggaatggtttattattttggctgctcttggggactgcgagaagcagagagaatgagagaccagtggcaactgcctgcacagcagagataaccctcttcccttgcttcctttaatagttaaatagactttgtataccaaaaaaaaaaaaaattttttaataaaaaaaaaaaaaaaaaaaaaaaaaaaaaaaaaaaaaaaaaaa

SEQ ID NO: 236 - DNA, 1408 bp, Homo sapiens
ccacgcgtccggcatattttaagacgcatggcttagagtggttatatggacttgtagacctaaaaacatctgagagcctagaagtgcacagcagtgtgcggatagattgagaggacttggctctgcaggtggacaacactctatttgaaagttgagagcagcatgttttgcccactgaaactcatcctgctgccagtgttactggattattccttgggcctgaatgacttgaatgtttccccgcctgagctaacagtccatgtgggtgattcagctctgatgggatgtgttttccagagcacagaagacaaatgtataattcaagatagactggactctgtcaccaggagagcacgccaaggacgaatatgtgctatactattactccaatctcagtgtgcctattgggcggttccagaaccgcgtacacttgatgggggacaacttatgcaatgatggctctctcctgctccaagatgtgcaagaggctgaccagggaacctatatctgtgaaatccgcctcaaaggggagagccaggtgttcaagaaggcggtggtactgcatgtgcttccagaggagcccaaagagctcatggtccatgtgggtggattgattcagatgggatgtgttttccagagcacagaagtgaaacacgtgaccaaggtagaatggatattttcaggacggcgcgcaaaggtaacaaggaggaaacatcactgtgttagagaaggctctggctgatggtatcaggacaaaggtagaatcaggcacatgaggaggtgttgcaagagcctgggctttggtgcttatcagaactggaccttctcctagcaatttcagctttctggtgggaaagataactccaatgaagaacaagaacaagaagatgatgatgatgcttaactttttggatgccgatatgagattgtacatgtaaagcattttgtataagacttggcccctgcattttagtttccttctttctcccttttccttcgtatagagtccatgggagaatgagggagatgattttgtggcccagccaagaaagcaatgggctagacattaaagtgattacacttttattcttactggggttagttctgtgagttttcatctgtgccccattgccccatttatgtgatggagggaattttcatgggtacttcacgtgttgggattgattgatcctgggggccagggtgaagggtattttacgggaactctataaagcaggaagaagcaagtttattctttagaccagtagctctcaaccatgatgtggtcgtatatttatgggtcaacatgtgttgtggggatatcccaagtaacttgttattaataaaagttaagttgcaaaatttaaaaaaaaaaaaaaaaaaaaaaaaaaaaaaaaaaaaaaaaaaa

SEQ ID NO: 237 - DNA, 2013 bp, Homo sapiens
  misc_feature (1993)..(1993): n equals a,t,g, or c
ccacgcgtccgggctgaggcgcgatggcaggtgtcggggctgggcctctgcgggcgatggggcggcaggccctgctgcttctcgcgctgtgcgccacaggcgcccaggggctctacttccacatcggcgagaccgagaagcgctgtttcatcgaggaaatccccgacgagaccatggtcatcggcaactatcgtacccagatgtgggataagcagaaggaggtcttcctgccctcgacccctggcctgggcatgcacgtggaagtgaaggaccccgacggcaaggtggtgctgtcccggcagtacggctcggagggccgcttcacgttcacctcccacacgcccggtgaccatcaaatctgtctgcactccaattctaccaggatggctctcttcgctggtggcaaactgcgggtgcatctcgacatccaggttggggagcatgccaacaactaccctgagattgctgcaaaagataagctgacggagctacagctccgcgcccgccagttgcttgatcaggtggaacagattcagaaggagcaggattaccaaaggtatcgtgaagagcgcttccgactgacgagcgagagcaccaaccagagggtcctatggtggtccattgctcagactgtcatcctcatcctcactggcatctggcagatgcgtcacctcaagagcttctttgaggccaagaagctggtgtagtgccctctttgtatgacccttcctttttacctcatttatttggtactttcccacacagtcctttatccacctggatttttagggaaaaaaatgaaaaagaataagtcacattggttccatggccacaaaccattcagatcagccacttgctgaccctggttcttaaggacacatgacattagtccaatctttcaaaatcttgtcttagggcttgtgaggaatcagaactaacccaggactcagtcctgcttcttttgcctcgagtgattttcctctgtttttcactaaataagcaaatgaaaactctctccattaccttctgctttctctttgtccacttacgcagtaggtgactggcatgtgccacagagcaggccctgcctcactgtctgctggtcagttctgggttcacttaatggctttgtgaatgtaaataaggggcaggtcttggccctagaggattgagatgtttttctaaatcttagaactatttttggataaattatatattttccttcctagtagaagtgttactgcctgtaactagctcaaaataccaatgcagtttctgcattctgggttttgtttttcctttttttttttttttttttttttttgagttttgctcttgtcgcccaggctggagtgcaatggcgtgatctcagctcactggcaacatctgcctcccgggttcaaatgattctcctgcctcagtctcctgagtagctgggattacaggtgcccgccaccacgctcagctaatttttgtatttttagtagagatggggttttaccatgttggccaggctggtcttagactcctgacctcagttgatccacctgcctcagcctctgcattcagtttattcacatatttttggtaactcccatggcagctcctaggatttcagcggtctgtgggccagaaagcaggcaccagggctgacctcaaggccgtatcagagggccaagcagagttcttttggatacctgcttttcatcccacagggccttagagtcagaggtaaggtagcaacagagctagaatggggcaatgcactcttaccctccttctcaacttttatttaagctgtgctaaatgttttcttcaagggaaccagatttagttctttacagaattttccagtgaaataaaacatgttgtaataaaaaaaaaaaaaaaaaaaaaaaaaaaaaaaaaaaaaaaaaaaaaaagggcggccgctctagaggatccctcgaggggcckcaagttacgcgtgcatgcgacgtcatactctctcccntatagtgagtcgtaytataa

SEQ ID NO: 238 - DNA, 2445 bp, Homo sapiens
  misc_feature (22)..(22): n equals a,t,g, or c
tttaagcaaaaaggtcctttanggtgacactatagaaggtacgcctgcaggtaccggtccggaattcgcggccgcgtcgactgaagaggagctcagacagctcttaccacatgatacaagagccggctggtggaagagtggggaccagaaagagaatttgctgaagaggagaaggaaaaaaaaaacaccaaaaaaaaaaataaaaaaatccacacacacaaaaaaacctgcgcgtgaggggggaggaaaagcagggccttttaaaaaggcaatcacaacaacttttgctgccaggatgcccttgctttggctgagaggatttctgttggcaagttgctggattatagtgaggagttcccccaccccaggatccgaggggcacagcgcggcccccgactgtccgtcctgtgcgctggccgccctcccaaaggatgtacccaactctcagccagagatggtggaggccgtcaagaagcacattttaaacatgctgcacttgaagaagagacccgatgtcacccagccggtacccaaggcggcgcttctgaacgcgatcagaaagcttcatgtgggcaaagtcggggagaacgggtatgtggagatagaggatgacattggaaggagggcagaaatgaatgaacttatggagcagacctcggagatcatcacgtttgccgagtcaggaacagccaggaagacgctgcacttcgagatttccaaggaaggcagtgacctgtcagtggtggagcgtgcagaagtctggctcttcctaaaagtccccaaggccaacaggaccaggaccaaagtcaccatccgcctcttccagcagcagaagcacccgcagggcagcttggacacaggggaagaggccgaggaagtgggcttaaagggggagaggagtgaactgttgctctctgaaaaagtagtagacgctcggaagagcacctggcatgtcttccctgtctccagcagcatccagcggttgctggaccagggcaagagctccctggacgttcggattgcctgtgagcagtgccaggagagtggcgccagcttggttctcctgggcaagaagaagaagaaagaagaggagggggaagggaaaaagaagggcggaggtgaaggtggggcaggagcagatgaggaaaaggagcagtcgcacagacctttcctcatgctgcaggcccggcagtctgaagaccaccctcatcgccggcgtcggcggggcttggagtgtgatggcaaggtcaacatctgctgtaagaaacagttctttgtcagtttcaaggacatcggctggaatgactggatcattgctccctctggctatcatgccaactactgcgagggtgagtgcccgagccatatagcaggcacgtccgggtcctcactgtccttccactcaacagtcatcaaccactaccgcatgcggggccatagcccctttgccaacctcaaatcgtgctgtgtgcccaccaagctgagacccatgtccatgttgtactatgatgatggtcaaaacatcatcaaaaaggacattcagaacatgatcgtggaggagtgtgggtgctcatagagttgcccagcccagggggaaagggagcaagagttgtccagagaagacagtggcaaaatgaagaaatttttaaggtttctgagttaaccagaaaaatagaaattaaaaacaaaacaaaaaaaaaaaaaaaaaaacaaaagtaaattaaaaacaaaacctgatgaaacagatgaaggaagatgtggaaaaaatccttagccagggctcagagatgaagcagtgaaagagacaggaattgggagggaaagggagcaagagttgtccagagaagacagtggcaaaatgaagaaatttttaaggtttctgagttaaccagaaaaatagaaattaaaaacaaaacaaaaaaaaaaacaaaaaaaaacaaaagtaaattaaaaacaaaacctgatgaaacagatgaaggaagatgtggaaaaaatccttagccagggctcagagatgaagcagtgaaagagacaggaattgggagggaaagggagaatggtgtaccctttatttcttctgaaatcacactgatgacatcagttgtttaaacggggtattgtcctttccccccttgaggttcccttgtgagccttgaatcaaccaatctagtctgcagtagtgtggactagaacaacccaaatagcatctagaaagccatgagtttgaaagggcccatcacaggcactttcctacccaattacccaggtcataaggtatgtctgtgtgacacttatctctgtgtatatcagcatacacacacacacacacacacacacacacacacasggcatttccacacattacatatatacacatactggtaaaagaacaatcgtgtgcaggtggtcacacttcctttttctgtaccayttttgcaacaaaac

SEQ ID NO: 239 - DNA, 1908 bp, Homo sapiens
  misc_feature (1869)..(1869): n equals a,t,g, or c
cctcgccctggtggtgcacgcccgggctgggcgctcagaggtcgggtgggcgcccactccgttcgctgcgcgcacagcgcccggcgagaggctcggagtttgatcacacacagcgtccggcttcctgtccccagcgccccctcccgccccgtttcccttgcccctccctctccccggcccgatccgcccgccggctccccctcccccgatccctcgggtcccgggatgggggggcggtgaggcaggcacagccccccgcccccatggccgcccgtcggagccagaggcggagggggcgccggggggagccgggcaccgccctgctggtcccgctcgcgctgggcctgggcctggcgctggcctgcctcggcctcctgctggccgtggtcagtttggggagccgggcatcgctgtccgcccaggagcctgcccaggaggagctggtggcagaggaggaccaggacccgtcggaactgaatccccagacagaagaaagccaggatcctgcgcctttcctgaaccgactagttcggcctcgcagaagtgcacctaaaggccggaaaacacgggctcgaagagcgatcgcagcccattatgaagttcatccacgacctggacaggacggagcgcaggcaggtgtggacgggacagtgagtggctgggaggaagccagaatcaacagctccagccctctgcgctacaaccgccagatcggggagtttatagtcacccgggctgggctctactacctgtactgtcaggtgcactttgatgaggggaaggctgtctacctgaagctggacttgctggtggatggtgtgctggccctgcgctgcctggaggaattctcagccactgcggccagttccctcgggccccagctccgcctctgccaggtgtctgggctgttggccctgcggccagggtcctccctgcggatccgcaccctcccctgggcccatctcaaggctgcccccttcctcacctacttcggactcttccaggttcactgaggggccctggtctccccrcagtcgtcccaggctgccggctcccctcgacagctctctgggcacccggtcccctctgccccaccctcagccrctctttgctccagacctgcccctccctctagaggctgcctgggcctgttcacgtgttttccatcccacataaatacagtattcccactcttatcttacaactcccccaccgcccactctccacctcactagctccccaatccctgaccctttgaggcccccagtgatctcgactcccccctggccacagacccccagggcattgtgttcactgtactctgtgggcaaggatgggtccagaagaccccacttcaggcactaagaggggctggacctggcggcaggaagccaaagagactgggcctaggccaggagttcccaaatgtgaggggcgagaaacaagacaagctcctcccttgagaattccctgtggatttttaaaacagatattatttttattattattgtgacaaaatgttgataaatggatattaaatagaataagtcatagtctctctctttattggggctcaggggacactctcagggtagctgggggccacgtgaaggggggcgttgcggagcggcacagctggaactccgggatgatgttcaggcttgggggcggggacctccatgcctccagcccccaggtgggagcagaggtaggaaggcacactgcccaggaaaaaaatcaatcctccgcccaaggtacagcagaagcggcctccttggcctaggaggcagacttcctcctgcggggaaatccctccctggctgggaggagcaggggcccttcctcttggtggcctcggacattcagcangtgctggcacaggccctggctgggaggtggggcgggcag

SEQ ID NO: 240 - DNA, 1036 bp, Homo sapiens
  misc_feature (989)..(989): n equals a,t,g, or c
  misc_feature (1008)..(1008): n equals a,t,g, or c
  misc_feature (1016)..(1016): n equals a,t,g, or c
  misc_feature (1020)..(1020): n equals a,t,g, or c
  misc_feature (1024)..(1024): n equals a,t,g, or c
  misc_feature (1030)..(1030): n equals a,t,g, or c
gcggccgctctagaactagtggatcccccgggctgcaggatttcggcacgaggaaaaccgaagcggcagaaggcagtggcagcaggcagtggcagcaggcagtggcccaggctggacgagaggaaggcgctgatcccctgcaagagattatttgaatatattttgctgtataaggatggagtgatgtttcagattgaccaagccaccaagcagtgctcaaagatgaccctgacacagccctgggatcctcttgacattcctcaaaactccacctttgaagaccagtactccatyggggggcctcaggagcagatcaccgtccaggagtggtcggacagaaagtcagctagatcctatgaaacctggattggcatctatacagtcaaggattgctatcctgtccaggaaacctttaccataaactacagtgtgatattgtctacgcggttttttgacatccagctgggtattaaagacccctcggtgtttacccctccaagcacgtgccagatggcccaactggagaagatgagcgaagactgctcctggtgagcctgtgcatagggaagcggcagcatcggatgtcagccccctgcggccccagctggagatggatatgagactagtcaagatgtgaatgctaattggagagaaatataattttaggaagatgcacattgatgtggggttttgatgtgtctgattttgactactcaagctctgtttacagaagaaaattgaatggcgagggtgtggccatatgaactgactagatggctaatatggacactttgggtatttctaatgcctgttcagggctggttttctgcatgcacgggtatacacataatgcagtgccatgcacatagggaagggtcagtaagagaagtttgccttggcagcaagtatttattgttgacattattcagaattagtgataataaaaagcagagtgattttggtcaattttattattaattcttaaattnccctgcagagaatgccccnttgrgmtnttcngtgngtttcncttagg

SEQ ID NO: 241 - DNA, 2848 bp, Homo sapiens
ccacgcgtccgggccgcggcgcccgccagcctgtcccgcgccatggccccgcgcgcccggcggcgccgcccgctgttcgcgctgctgctgctctgcgcgctgctcgcccggctgcaggtggctttgcagatcgctcctccatgtaccagtgagaagcattatgagcatctgggacggtgctgtaacaaatgtgaaccaggaaagtacatgtcttctaaatgcactactacctctgacagtgtatgtctgccctgtggcccggatgaatacttggatagctggaatgaagaagataaatgcttgctgcataaagtttgtgatacaggcaaggccctggtggccgtggtcgccggcaacagcacgaccccccggcgctgcgcgtgcacggctgggtaccactggagccaggactgcgagtgctgccgccgcaacaccgagtgcgcgccgggcctgggcgcccagcacccgttgcagctcaacaaggacacagtgtgcaaaccttgccttgcaggctacttctctgatgccttttcctccacggacaaatgcagaccctggaccaactgtaccttccttggaaagagagtagaacatcatgggacagagaaatccgatgtggtttgcagttcttctctgccagctagaaaaccaccaaatgaaccccatgtttacttgcccggtttaataattctgcttctcttcgcgtctgtggccctggtggctgccatcatctttggcgtttgctataggaaaaaagggaaagcactcacagctaatttgtggcactggatcaatgaggcttgtggccgcctaagtggagataaggagtcctcaggtgacagttgtgtcagtacacacacggcaaactttggtcagcagggagcatgtgaaggtgtcttactgctgactctggaggagaagacatttccagaagatatgtgctacccagatcaaggtggtgtctgtcagggcacgtgtgtaggaggtggtccctacgcacaaggcgaagatgccaggatgctctcattggtcagcaagaccgagatagaggaagacagcttcagacagatgcccacagaagatgaatacatggacaggccctcccagcccacagaccagttactgttcctcactgagcctggaagcaaatccacacctcctttctctgaacccctggaggtgggggagaatgacagtttaagccagtgcttcacggggacacagagcacagtgggttcagaaagctgcaactgcactgagcccctgtgcaggactgattggactcccatgtcctctgaaaactacttgcaaaaagaggtggacagtggccattgcccgcactgggcagccagccccagccccaactgggcagatgtctgcacaggctgccggaaccctcctggggaggactgtgaacccctcgtgggttccccaaaacgtggacccttgccccagtgcgcctatggcatgggccttccccctgaagaagaagccagcaggacggaggccagagaccagcccgaggatggggctgatgggaggctcccaagctcagcgagggcaggtgccgggtctggaagctcccctggtggccagtcccctgcatctggaaatgtgactggaaacagtaactccacgttcatctccagcgggcaggtgatgaacttcaagggcgacatcatcgtggtctacgtcagccagacctcgcaggagggcgcggcggcggctgcggagcccatgggccgcccggtgcaggaggagaccctggcgcgccgagactccttcgcggggaacggcccgcgcttcccggacccgtgcggcggccccgaggggctgcgggagccggagaaggcctcgaggccggtgcaggagcaaggcggggccaaggcttgagcgccccccatggctgggagcccgaagctcggagccagggctcgcgagggcagcaccgcagcctctgccccagccccggccacccagggatcgatcggtacagtcgaggaagaccacccggcattctctgcccactttgccttccaggaaatgggcttttcaggaagtgaattgatgaggactgtccccatgcccacggatgctcagcagcccgccgcactggggcagatgtctcccctgccactcctcaaactcgcagcagtaatttgtggcactatgacagctatttttatgactatcctgttctgtgggggggggggtctgttttccccccatatttgtattccttttcataacttttcttgatatctttcctccctcttttttaatgtaaaggttttctcaaaaattctcctaaaggtgagggtctctttcttttctcttttccttttttttttctttttttggcaacctggctctggcccaggctagagtgcagtggtgcgattatagcccggtgcagcctctaactcctgggctcaagcaatccaagtgatcctcccacctcaaccttcggagtagctgggatcacagctgcaggccacgcccagcttcctccccccgactccccccccagagacacggtcccaccatgttacccagcctggtctcaaactccccagctaaagcagtcctccagcctcggcctcccaaagtactgggattacaggcgtgagcccccacgctggcctgctttacgtattttcttttgtgcccctgctcacagtgttttagagatggctttcccagtgtgtgttcattgtaaacacttttgggaaagggctaaacatgtgaggcctggagatagttgctaagttgctaggaacatgtggtgggactttcatattctgaaaaatgttctatattctcatttttctaaaaaaaaaaaaaaagg

SEQ ID NO: 242 - DNA, 1886 bp, Homo sapiens
tttttttttttktttttttttttttttttgaatgtaacaagcatttattaaaaactgtgctgcacaaaacatgttagaaactagccaggtgctaggagtctaatcaaggcaggggcagggtaaaaacatgggaatattacatggacaagcttgtctagcatggcagtctataacccttgagggtttacataaaataaaggaacatttttgtggctcaggctccccagagttctctttatgtttgggcagagactgccccatcccttagtgatcccaccttagagccaggttttcaaagtcatttctcccagtatatctgtctctgtatgcaagtttcctctggttgccttgagcaaaaacaatcatccaactcaaatttgctagccctatgctgggccagcccacgttcccgtaggacatctgtaggctaagtaagccccgggtgatctgtgtcttggtcttcctaattccgttgcagctcttcctctctcagccaggagtggaaagtcctaagcctccttccattcatcccattatcaaggtgatggctctccctccccagctctgcttccaggaagatgacatcccaataacttgggtatcaccaaaacccctccctgaccaccagggaaactgctgtctgtcttatgtccatttggacagactatccatctgttgcttgtttcaagacttgttgatggggtggacagaccagacatttcatgtatttctgtggatcaagatctctcttttttctctctctctctcttttgagtattgtgatctcttttggttctttcacagcttccccaggccatctcactagtcagttcttcaagagaamcagggttcacaagctctggcattttcctgtttattcagttctctccactatggcttgttgggtggggcaagcctcctcaatattagcaacagcccagatagaagtggctccaggttctatctctgcctctcctaatttccccaaatttaggttggtctgctcattgttgcctgtaccctaggccaccgttttccttactgaccctgacagagggatgagaactccttagcaggggtagacttttctctagagcatagtaatcacactattacagtacatagatctctatgtttcaagatattaacactataaggtcataaatacataagtcccacccagactgaggaggtagttgtttagtcacaggtacacaagattcagtggggcaccagcttagaattctgggcagataaaaggcagttttccagaaattgagaggtctatttaaaaaaaaacacaatctatgaaattaagagaagaatctgatctggaggaggtattggtcctaaattttatttccaggtcatgagccattaagctgggcttggcccataagtgtgctctgaagtgaaaagaagcagtaagagaattaaagtctcctcttggcatacggagcagagctggagttacagggaggctattccacttagagggagtcctggagcccccttattactcatggtaatgtctttttgccttctggaagaaatcaaaaaggttgcccaggaacttacaaaggaaagggtagaaaaaaatgaatacttgtatgggctttactctttaattaaaaacatgtatcacttttgtcgcatgaagatgtcttcgaacttttaaaaacacgctgggtttcatcagatctttcaggtatatggattttttctcttttcttggtctgttcactctcttccctctccattgtgttggttccacatttataagagttgcgaggccgcttcttcttcttccatttccatagaattagacagaaaaccatcacacatataataacrtgttggaagtacagctgtaatccaaggaatgg

SEQ ID NO: 243 - DNA, 1476 bp, Homo sapiens
ccttttttttttttttttttcagagacctttttttattaaatgtgtaaaaagcagttctcatcttacaagctcaaaatcagacgaatgtatgagggtgtataattgttatatttataaactgtatcacccaaaaactcaatgaggacacaatctatattacattcaacatttgcatatttacatgatacttactgcaaagtaaatacaaaatgaactcccatcattttagttcagaacacaggtgatataatttcaaaacaaaggcaatttttttcaacaaagaacagaagtctcccaagtaccaattcactattttgcagaaaaatacaacactaattataagatttccattccagtttagtcagtaagatacgttgtttgtttgtttgtttgttttatttttagaaacagggtctcactctgtcatacgggctggagttcagtggtgcgatcagaattcactgcagccttgaactcctgggctcaagaatcttcccacctcagcctcccaaagcactgggattacaggtgtgagccatcacagtctagtaaggtatgtttttgttactgaaatacagctaaagttttggattttaatcaccaaaataacagtacttctggtttacaattgactttaaaataaaggatactaatatatatttattttcacattttttttaaatcttcaaaactgaaatacaattctgaaagtatttgtgccttgtcatttgttcaataaatttgatttgtttttaaacaggtcacaaaagttcaattagctaaccagaattctatatctattgcctgtctactggggttcagtcttaagtctgactatatcaaaagcagcagctcagaatttatttcataaaattaatcccaagagttactgggtagcttttaaagtatttcatcgcttataatacaactcactagatagatagtctatactagtgactcgtgacatcaaaattatctggagagttttttaaaaaatacgtaggatccacatcataactacactaagaatcaagaatgtctgtattttttttaacgttcccaggttataatgctatgcagcctagcgtgggaaaccccaacgtaccactaagcctgtggttctcaacttttcaggtgcactggaatcactgggggaaactttaaaaacaaaaagcaaagcaaaacaaacaaagaaaacagatgtgcttcagtagatagagaattgtgtgcaggaaccagcattttaaacaaccactgcagttggtcccaaatgactcagaaacgctgtactacctttgtcagatatcatattataatgagtacattcagcaatttaggtgacattgtctgcaagccctaatgaatcctgccctaggcagttttagcaagtgtttgagggcaacactcagcctttcaaataaaatatatttatattcttaaatattaggtcaaagtcaactgaatcggacgcgtgg

SEQ ID NO: 244 - DNA, 2371 bp, Homo sapiens
  misc_feature (19)..(19): n equals a,t,g, or c
gcttccgctaaagctattnaggtgacactatagaaggtacgcctgcaggtaccggtccggaattcccgggtcgacccactcttcccctcccaccttctctcccctcctctctgctttaattttctcagaattctctggactgaggctccagttctggcctttggggttcaagatcactgggaccaggccgtgatctctatgcccgagtctcaaccctcaactgtcaccccaaggcacttgggacgtcctggacagaccgagtcccgggaagccccagcactgccgctgccacactgccctgagcccaaatgggggagtgagaggccatagctgtctggcatgggcctctccaccgtgcctgacctgctgctgccrctggtgctcctggagctgttggtgggaatatacccctcaggggttattggactggtccctcacctaggggacagggagaagagagatagtgtgtgtccccaaggaaaatatatccaccctcaaaataattcgatttgctgtaccaagtgccacaaaggaacctacttgtacaatgactgtccaggcccggggcaggatacggactgcagggagtgtgagagcggctccttcaccgcttcagaaaaccacctcagacactgcctcagctgctccaaatgccgaaaggaaatgggtcaggtggagatctcttcttgcacagtggaccgggacaccgtgtgtggctgcaggaagaaccagtaccggcattattggagtgaaaaccttttccagtgcttcaattgcagcctctgcctcaatgggaccgtgcacctctcctgccaggagaaacagaacaccgtgtgcacctgccatgcaggtttctttctaagagaaaacgagtgtgtctcctgtagtaactgtaagaaaagcctggagtgcacgaagttgtgcctaccccagattgagaatgttaagggcactgaggactcaggcaccacagtgctgttgcccctggtcattttctttggtctttgccttttatccctcctcttcattggtttaatgtatcgctaccaacggtggaagtccaagctctactccattgtttgtgggaaatcgacacctgaaaaagagggggagcttgaaggaactactactaagcccctggccccaaacccaagcttcagtcccactccaggcttcacccccaccctgggcttcagtcccgtgcccagttccaccttcacctccagctccacctatacccccggtgactgtcccaactttgcggctccccgcagagaggtggcaccaccctatcagggggctgaccccatccttgcgacagccctcgcctccgaccccatccccaacccccttcagaagtgggaggacagcgcccacaagccacagagcctagacactgatgaccccgcgacgctgtacgccgtggtggagaacgtgcccccgttgcgctggaaggaattcgtgcggcgcctagggctgagcgaccacgagatcgatcggctggagctgcagaacgggcgctgcctgcgcgaggcgcaatacagcatgctggcgacctggaggcggcgcacgccgcggcgcgaggccacgctggagctgctgggacgcgtgctccgcgacatggacctgctgggctgcctggaggacatcgaggaggcgctttgcggccccgccgccctcccgcccgcgcccagtcttctcagatgaggctgcgcccctgcgggcagctctaaggaccgtcctgcgagatcgccttccaaccccacttttttctggaaaggaggggtcctgcaggggcaagcaggagctagcagccgcctacttggtgctaacccctcgatgtacatagcttttctcagctgcctgcgcgccgccgacagtcagcgctgtgcgcgcggagagaggtgcgccgtgggctcaagagcctgagtgggtggtttgcgaggatgagggacgctatgcctcatgcccgttttgggtgtcctcaccagcaaggctgctcgggggcccctggttcgtccctgagcctttttcacagtgcataagcagttttttttgtttttgttttgttttgttttgtttttaaatcaatcatgttacactaatagaaacttggcactcctgtgccctctgcctggacaagcacatagcaagctgaactgtcctaaggcaggggcgagcacggaacaatggggccttcagctggagctgtggacttttgtacatacactaaaattctgaagttaaaaaaaaaaaaaaaaaaagatatgcggccgcctatcttttttttttttttttttttttttttttttcccccccggaattttcccttcttattattttgcttttttaaagggggtttttttcaggg

SEQ ID NO: 245 - DNA, 1255 bp, Homo sapiens
  misc_feature (416)..(416): n equals a,t,g, or c
  misc_feature (555)..(555): n equals a,t,g, or c
catatgaaattctaataaatccattttatttgtggcaccacaatattatcattaagctctctttttacacagtctgcaatttgtatcagctgccccmgtgtgactctgcccttaytttaggaacaaccttttgctgggtggcgtcctagaaggtctgggcctgggcagcagccactgggaagcccacctgtgctttcccccatctgggtggggcggcassagagaccctgagaatcagcggttatgggagctgtgtgttagctgtgtgttattggctttggcttcagcatgtcctgcctaggagtctccagcagctgtggtttccttggactggaggctttttctcctgatgacaatcgtgacaggtccatcaggcagtgccttgatgatgttccaggcttcaaaccgtgtgaagnccctgcatggcagtgccacccagctgcaagatttcatctccaggctggactgtctcactttgttctgaggctgctcctttgaaaatcctgttaatggtgagaggcttgtctccgtgtagggagcccttccctccttccnagctgaagcccagccctgccgacatcttctccagtgtcaccgtgcagactgtggcctctgctgtagattctacagaaacatcactggctgcagaggctgaggctgcagagtcagtggaggagttgaggtcgggcatggcctctggagtcagcttccttgtgacaatcacagcttgcctgggctctcgagcttggcggaggatggccaaggcatcatggtgcgtggtccccttgagagacttgccgttgatggaaagaacctcattgcccttctgaatagtcccttcctgggaggccagcccatttggaaacactctgtgaaccgtaatcaccttgttttctagatctgctcctcctgccaagctgaacccaagaccagcaccttcctccttgtgtaagatggtgacatggatgccgtctaattgctttaatgttgcttcatccagaaccttcacctcctcgatgagtttttttaattcttctgagctcagcagggagataacggactgaccagactgaagggaactgtggtccccatcatcgtcttccttggcttccgtgagaccctctgtatattctctcagctctgaaaggttgagcgagaaccctgtgtccaaggcagatgtttcagsagaaccatttgcagctgagtcttcgttggatgatgatgttggagatgccccttccttggggctcgtgcc

SEQ ID NO: 246 - DNA, 1972 bp, Homo sapiens
ccacgcgtccgcggaggttggcaatagctgtgttcctctcctaaaggcaacagctcccgacaggtgtccctcctcagctcagggtctccgctcatcaggccacagtagacctggggtggtaatgacaccctgcagtcatcaaccctggggctttagcctattccgtgttgatttctttaaactctaccccaacttggtaagtagtccttttatgaatctctcaattactccattggagcttctcatctcttttctactgggattctcaccaataatttattcatctgtgaaatggaaaagttgactaactgaagtttctgatggatctgtgtttctcatgcaattactactaatccctttcgaaccagtgactgattctgacaaaatgtgttgtaattctgagttgtgtaaagatatacctcctgccctatgtgcacttcagtgtacctgccctgtaagatgataacagtttggactgtgcccttctcagataattttcaaaccattttgatgaaattttgccctaggattgaggatagggttgtgttgttttcatgaatgatgtttctgtgttcctgaggtttagtacatacattggaactgaaataaagagagaggctttcatccttaattctgtggatatcctctttctaaatcatcttgtgttcaatcaaatgccctcacttccccaaatcctgtgtggataaagaatgatccaaaacaaacctgaataggacaatagaggattcagctgacccccagatcccgtgtagatttcagtggtgagccccaaacttgcttgaccgagtaagattgaaagaagttctcataggatcacaggatttggatggctccttaaagtcttcagttccctccttcatcagataggtcaacgtggggtagagaaacttttccaagtctcccaaacactgcttaaacagttgcaaagacaaggagctagcccaggaagcttttaggtttttcaagatggcctgtttgattttgactggatttagtacattgtttctgacaatggcttacaaagaaagagagagagagagagagagagagagggagggagggaaggaaggagggagggaaggaaggaaggaaaagaaggaaggaaggaaggaaaagagagagaggaaggaagttagtttagctctctgacctcctcttccatttctgccacaccagttctgtgactcttccctgggcctcaggttcctaaatggaacgcctgggggttgtcttggatgccatagttaaatcctgtccatttgctgagcactgcatgcttttcaaagtgcaatggggtcctttgcacttgtgggatacactgaacatatggtagtgttttcatttttctgacagagatagaaatataatctactggtgataccaagagaatatctggtttgctgctttgataactggagtagctactccactgtaagtagcacactggctttgttcacttttctgtgtgcccaggcacaagcgaatgtctttgaatgggtttcaggaatgccacagtatggcccccttcagcccttacagtggctggcagacaggtggtcatctctgcctaggagctttacctgagcaccacacaaatactgccatttcgccctgtggatcatgatggggtaaagatggggaagcattattcccttgccccctcccccgcctctcgtctttctctttttctgcatattgccagtgctcatcacctcttttctgtttctttgtggtttatagatgatcatgacgcagtcctgaggtttaatggggcacccacagccaacttccaacaagatgtgggcacaaaaactaccattcgcctgatgaactctcaggtaaaatttcttctgtgcagcaaaccaccatggcacatgtatacctatgtaataaacctgcacgttctgcacatgtatcccagaactgaaaagataataaaaaaaaaaaaaaa

SEQ ID NO: 247 - DNA, 1707 bp, Homo sapiens
  misc_feature (1520)..(1520): n equals a,t,g, or c
  misc_feature (1529)..(1529): n equals a,t,g, or c
  misc_feature (1532)..(1532): n equals a,t,g, or c
  misc_feature (1568)..(1568): n equals a,t,g, or c
ggcgggccctgcgcgccctgcgctcgccatggcggtttgggcggcgacgtgagcggctccgcggaccccgagcggggccccggccgcgacctgagccgccgccgagcgcccggggccatgcgaccgacgctgctgtggtcgctgctgctgctgctcggagtcttcgccgccgccgccgcggccccgccagaccctctttcccagctgcccgctcctcagcacccgaagattcgcctgtacaacgcagagcaggtcctgagttgggagccagtggccctgagcaatagcacgaggcctgttgtctaccaagtgcagtttaaatacaccgacagtaaatggttcacggccgacatcatgtccataggggtgaattgtacacagatcacagcaacagagtgtgacttcactgccgccagtccctcagcaggcttcccaatggatttcaatgtcactctacgccttcgagctgagctgggagcactccattctgcctgggtgacaatgccttggtttcaacactatcggaatgtgactgtcgggcctccagaaaacattgaggtgaccccaggagaaggctccctcatcatcaggttctcctctccctttgacatcgctgatacctccacggcctttttttgttattatgtccattactgggaaaaaggaggaatccaacaggtcaaaggccctttcagaagcaactccatttcattggataacttaaaaccctccagagtgtactgtttacaagtccaggcacaactgctttggaacaaaagtaacatctttagagtcgggcatttaagcaacatatcttgctacgaaacaatggcagatgcctccactgagcttcagcaagtcatcctgatctccgtgggaacattttcgttgctgtcggtgctggcaggagcctgtttcttcctggtcctgaaatatagaggcctgattaaatactggtttcacactccaccaagcatcccattacagatagaagagtatttaaaagacccaactcagcccatcttagaggccttggacaaggacagctcaccaaaggatgacgtctgggactctgtgtccattatctcgtttccggaaaaggagcaagaagatgttctccaaacgctttgaaccaaagcatgggcctagcccactggctccctggaagagatcaagccatcggagctgctagagttctgtctggactttccagagaccagtattcccttttgctgcctctaaaaggcctgtccctgcagacatgagagacagcaggtctcatgggggtgacaagctttttttttttttcttaaagaattttcaaaatcaaattccagaatgattttacggagatatcccaggaaaattaaggcttctcttaaacactaaaaaggcatgtaattgcttgttagcaaaatggatatgacacatctctgatacttttttcattattggttgggctgagcagtcagaagacctggtcgtcgtcttgactttggcaaatgagccggagcsctggnaggtmacanaancttccacgagcccgatgcctctagacatgtgcgctnagtatacttgaaaccctgatagattgttactgaaaaagttagcggtgtaaataaaaattgcgcgcctctggggcggcgttaaggcaccttatgctgaggagccactttgcgcgcgtgggccaccctctagggactgtgg

SEQ ID NO: 248 - DNA, 3229 bp, Homo sapiens
cccacgcgtccggaaggaccacagctcctcccgtgcatccactcggcctgggaggttctggattttggctgtcgagggagtttgcctgcctctccagagaaagatggtcatgaggcccctgtggagtctgcttctctgggaagccctacttcccattacagttactggtgcccaagtgctgagcaaagtcgggggctcggtgctgctggtggcagcgcgtccccctggcttccaagtccgtgaggctatctggcgatctctctggccttcagaagagctcctggccacgtttttccgaggctccctggagactctgtaccattcccgcttcctgggccgagcccagctacacagcaacctcagcctggagctcgggccgctggagtctggagacagcggcaacttctccgtgttgatggtggacacaaggggccagccctggacccagaccctccagctcaaggtgtacgatgcagtgcccaggcccgtggtacaagtgttcattgctgtagaaagggatgctcagccctccaagacctgccaggttttcttgtcctgttgggcccccaacatcagcgaaataacctatagctggcgacgggagacaaccatggactttggtatggaaccacacagcctcttcacagacggacaggtgctgagcatttccctgggaccaggagacagagatgtggcctattcctgcattgtctccaaccctgtcagctgggacttggccacagtcacgccctgggatagctgtcatcatgaggcagcaccagggaaggcctcctacaaagatgtgctgctggtggtggtgcctgtctcgctgctcctgatgctggttactctcttctctgcctggcactggtgcccctgctcagggaaaaagaaaaaggatgtccatgctgacagagtgggtccagagacagagaacccccttgtgcaggatctgccataaaggacaatatgaactgatgcctggactatcagtaaccccactgcacaggcacacgatgctctgggacataactggtgcctggaaatcaccatggtcctcatatctcccatgggaatcctgtcctgcctcgaaggagcagcctgggcagccatcacaccacgaggacaggaagcaccagcacgtttcacacctcccccttccctctcccatcttctcatatcctggctcttctctgggcaagatgagccaagcagaacattccatccaggacactggaagttctccaggatccagatccatggggacattaatagtccaaggcattccctcccccaccactattcataaagtattaaccaactggcaccaaggaattgcctccagcctgagtcctaggctctaaaagatattacatatttgaactaatagaggaactctgagtcacccatgccagcatcagcttcagccccagaccctgcagtttgagatctgatgcttcctgagggccaaggcattgctgtaagaaaaggtctagaaataggtgaaagtgagaggtgggggacaggggtttctctttctggcctaaggactttcaggtaatcagagttcatgggccctcaaaggtaaattgcagttgtagacaccgaggatggttgacaacccatggttgagatgggcaccgttttgcaggaaacaccatattaatagacatcctcaccatctccatccgctctcacgcctcctgcaggatctgggagtgagggtggagagtctttcctcacgctccagcacagtggccaggaaaagaaatactgaatttgccccagccaacaggacgttcttgcacaacttcaagaaaagcagctcagctcaggatgagtcttcctgcctgaaactgagagagtgaagaaccataaaacgctatgcagaaggaacattatggagagaaagggtactgaggcactctagaatctgccacattcattttcaaatgcaaatgcagaagacttaccttagttcaaggggaggggacaaagaccccacagcccaacagcaggactgtagaggtcactctgactccatcaaactttttattgtggccatcttaggaaaatacattctgcccctgaatgattctgtctagaaaagctctggagtattgatcactactggaaaaacacttaaggagctaaacttaccttcggggattattagctgataaggttcacagtttctctcacccaggtgtaactggattttttctggggcctcaatccagtcttgataacagcgaggaaagaggtattgaagaaacaggggtgggtttgaagtactattttcccagggtggcttcaatctccccacctaggatgtcagccctgtccaaggaccttccctcttctccccagttcctgggcaatcacttcaccttggacaaaggatcagcacagctggcctccagatccacatcaccactcttccactcgattgttcccagatcctccctgcctggcctgctcagaggttccctgttggtaacctggctttatcaaattctcatccctttcccacacccacttctctcctatcaccttcccccaagattacctgaacagggtccatggccactcaacctgtcagcttgcaccatccccacctgccacctacagtcaggccacatgcctggtcactgaatcatgcaaaactggcctcagtccctaaaaatgatgtggaaaggaaagcccaggatctgacaatgagccctggtggatttgtggggaaaaaatacacagcactccccacctttctttcgttcatctccagggccccacctcagatcaaagcagctctggatgagatgggacctgcagctctccctccacaaggtgactcttagcaacctcatttcgacagtggtttgtagcgtggtgcaccagggccttgttgaacagatccacactgctctaataaagttcccatccttaatgactcacttgtcaactagtggactaattaaccctccaccaaaaaaacacaaagtgcttctgtgagaccaattttgtgctaatgagcattgagactgatgctttgtaagtcacaccacaacaaatattgattgagggcgctgcatgtgctgggtacatttcttggcacttgggaatcagtagtcaagcgaaacccttgcctttgagagtttatggtctggataatataaataaacaagtaagcataaaaaaaaaaaaaaaaaaaaaaaaaaaaaaaaaaaaa

SEQ ID NO: 249 - DNA, 2364 bp, Homo sapiens
gtcgacccacgcgtccgggccgcggcgcccgccagcctgtcccgcgccatggccccgcgcgcccggcggcgccgcccgctgttcgcgctgctgctgctctgcgcgctgctcgcccggctgcaggtggctttgcagatcgctcctccatgtaccagtgagaagcattatgagcatctgggacggtgctgtaacaaatgtgaaccaggaaagtacatgtcttctaaatgcactactacctctgacagtgtatgtctgccctgtggcccggatgaatacttggatagctggaatgaagaagataaatgcttgctgcataaagtttgtgatacaggcaaggccctggtggccgtggtcgccggcaacagcacgaccccccggcgctgcgcgtgcacggctgggtaccactggagccaggactgcgagtgctgccgccgcaacaccgagtgcgcgccgggcctgggcgcccagcacccgttgcagctcaacaaggacacagtgtgcaaaccttgccttgcaggctacttctctgatgccttttcctccacggacaaatgcagaccctggaccaactgtaccttccttggaaagagagtagaacatcatgggacagagaaatccgatgtggtttgcagttcttctctgccagctagaaaaccaccaaatgaaccccatgtttacttgcccggtttaataattctgcttctcttcgcgtctgtggccctggtggctgccatcatctttggcgtttgctataggaaaaaagggaaagcactcacagctaatttgtggcactggatcaatgaggcttgtggccgcctaagtggagataaggagtcctcaggtgacagttgtgtcagtacacacacggcaaactttggtcagcagggagcatgtgaaggtgtcttactgctgactctggaggagaagacatttccagaagatatgtgctacccagatcaaggtggtgtctgtcagggcacgtgtgtaggaggtggtccctacgcacaaggcgaagatgccaggatgctctcattggtcagcaagaccgagatagaggaagacagcttcagacagatgcccacagaagatgaatacatggacaggccctcccagcccacagaccagttactgttcctcactgagcctggaagcaaatccacacctcctttctctgaacccctggaggtgggggagaatgacagtttaagccagtgcttcacggggacacagagcacagtgggttcagaaagctgcaactgcactgagcccctgtgcaggactgattggactcccatgtcctctgaaaactacttgcaaaaagaggtggacagtggccattgcccgcactgggcagccagccccagccccaactgggcagatgtctgcacaggctgccggaaccctcctggggaggactgtgaacccctcgtgggttccccaaaacgtggacccttgccccagtgcgcctatggcatgggccttccccctgaagaagaagccagcaggacggaggccagagaccagcccgaggatggggctgatgggaggctcccaagctcagcgagggcaggtgccgggtctggaagctcccctggtggccagtcccctgcatctggaaatgtgactggaaacagtaactccacgttcatctccagcgggcaggtgatgaacttcaagggcgacatcatcgtggtctacgtcagccagacctcgcaggagggcgcggcggcggctgcggagcccatgggccgcccggtgcaggaggagaccctggcgcgccgagactccttcgcggggaacggcccgcgcttcccggacccgtgcggcggccccgaggggctgcgggagccggagaaggcctcgaggccggtgcaggagcaaggcggggccaaggcttgagcgccccccatggctgggagcccgaagctcggagccagggctcgcgagggcagcaccgcagcctctgccccagccccggccacccagggatcgatcggtacagtcgaggaagaccacccggcattctctgcccactttgccttccaggaaatgggcttttcaggaagtgaattgatgaggactgtccccatgcccacggatgctcagcagcccgccgcactggggcagatgtctcccctgccactcctcaaactcgcagcagtaatttgtggcactatgacagctatttttatgactatcctgttctgtgggggggggggtctgttttccccccatatttgtattccttttcataacttttcttgatatctttcctccctcttttttaatgtaaaggttttctcaaaaattctcctaaaggtgagggtctctttcttttctcttttccttttttttttctttttt

SEQ ID NO: 250 - DNA, 789 bp, Homo sapiens
  misc_feature (479)..(479): n equals a,t,g, or c
  misc_feature (754)..(754): n equals a,t,g, or c
  misc_feature (771)..(771): n equals a,t,g, or c
  misc_feature (778)..(778): n equals a,t,g, or c
gttgctgatgtggctgagtcaggtcctggcctggccttcattgcctacccaaaagctgtgacaatgatgccgctgcccacattttggtccattcttttttttattatgcttctcttgcttggactggatagccagtttgttgaagttgaaggacagatcacatccttggttgatctttacccatccttcctaaggaagggttatcgtcgggaaatcttcatcgccttcgtgtgtagcatcagctacctgctggggctgacgatggtgacggagggtggcatgtatgtgtttcagctctttgactactatgcagctagcggtgtatgccttttgtgggttgcatctttgaatgttttgttattgcctggatatatggaggtgataactttatgatggtattgaggacatgattggctatcggcccgggscctggatgaagtacagctgggctgtgatcactccagttctctgtgttggangtttcatcttctcgctcgtcaagtacgtacccctgacctacaacaawacatacgtgtaccccaactgggccatgggctkggctggagcctggccctttcctccatgctctgsgttcccttggtcatcgtcatccgcctctgccagactgaggggccgttccttgtgagagtcaagtacctgctgaccccaagggaacccaaccgctgggctgtgggagcgcgagggaagccacaccttacaacttttcgcaccgtcatgaacggcggttttgtgnaaaccggaccccacatncattgtnggaggaccatg

SEQ ID NO: 251 - DNA, 588 bp, Homo sapiens
  misc_feature (458)..(458): n equals a,t,g, or c
  misc_feature (495)..(495): n equals a,t,g, or c
  misc_feature (569)..(569): n equals a,t,g, or c
ggcagagcgaactgggagcagagcacacagagccgtggagcgagagatgccggccctgggctgggccgtggctgccatcctgatgctgcagatggccatggcggagcctccccggggactctgcccaggaaggcaggggtgttttcagacctaagcaaccaagagctgaaggcagtgcacagcttcctctggtccaagaaggagctgaggctgcagccctccagtaccaccaccatggccaagaacaccgtgtttctcatcgagatgctgctgcccaagaagtaccatgtgctgaggtttctggataaaggtgaaaggcatcctgtgcgggaagcccgtgccgtcatcttctttggtgaccaggagcatcccaatgtcaccgagtttgctgtggggcccctgccagggccctgctacatgcgagcactgtcccccaggcctgggtaccagtcctcctngggcatcgaggcccatctccacagcagagtatgcccntcctcttacmamacctgcaggaagccaccaagccccttgcatcagttcttccttcaataccacaggctttcttnattccaagattgccatgac

SEQ ID NO: 252 - DNA, 1453 bp, Homo sapiens
acagttttccacgtgcgcgtagggcgccgggatcacgtggggaggcagaagccaatggggaagcgtttcgtgtaggtcttctgaggtggtggcgccagcggctacctcctgcctgtgaggagctggctgagaggggactgggcgccggcggggaaggaggagcgctaggtcggtgtacgaccgagattagggtgcgtgccagctccgggaggccgcggtgaggggccgggcccaagctgccgacccgagccgatcgtcagggtcgccagcgcctcagctctgtggaggagcagcagtagtcggagggtgcaggatattagaaatggctactccccagtcaattttcatctttgcaatctgcattttaatgataacagaattaattctggcctcaaaaagctactatgatatcttaggtgtgccaaaatcggcatcagagcgccaaatcaagaaggcctttcacaagttggccatgaagtaccaccctgacaaaaataagagcccggatgctgaagcaaaattcagagagattgcagaagcatatgaaacactctcagatgctaatagacgaaaagagtatgatacacttggacacagtgcttttactagtggtaaaggacaaagaggtagtggaagttcttttgagcagtcatttaacttcaattttgatgacttatttaaagactttggcttttttggtcaaaaccaaaacactggatccaagaagcgttttgaaaatcatttccagacacgccaggatggtggttccagtagacaaaggcatcatttccaagaattttcttttggaggtggattatttgatgacatgtttgaagatatggagaaaatgttttcttttagtggttttgactctaccaatcagcatacagtacagactgaaaatagatttcatggatctagcaagcactgcaggactgtcactcaacgaagaggaaatatggttactacatacactgactgttcaggacagtagttcttattctattctcactaaatccaactggttgactcttcctcattatctttgatgctaaacaattttctgtgaactattttgacaagtgcatgatttcactttaaacaatttgatatagctattaaatatatttaagggttttttttttttgacaaattcaacattcaacgagtagacaaaatgctaattatttccctgattaggaaagtttctttaaaaaacacgtaattttgcctagtgctttttctctacctgcccttgggctcactaatatcaccagtattattaccaagaaaatattgagtttacctgattaaactttaaaagttaattgtagatttaaattgtgtgaacctaatgatttttgcagtgaaacctttactaattcaaagttgcatgttctatgacatctgtgacttgcgttgcagagtgtacatgaaactgtataattgagtc

SEQ ID NO: 253 - DNA, 3222 bp, Homo sapiens
ccacgcgtccgacaacacctgtggctccagcgacctcacctggcccccagcgatcaagctgggcttctacgcctacttgggcgtcctgctggtgctaggcctgctgctcaacagcctggcgctctgggtgttctgctgccgcatgcagcagtggacggagacccgcatctacatgaccaacctggcggtggccgacctctgcctgctgtgcaccttgcccttcgtgctgcactccctgcgagacacctcagacacgccgctgtgccagctctcccagggcatctacctgaccaacaggtacatgagcatcagcctggtcacggccatcgccgtggaccgctatgtggccgtgcggcacccgctgcgtgcccgcgggctgcggtcccccaggcaggctgcggccgtgtgcgcggtcctctgggtgctggtcatcggctccctggtggctcgctggctcctggggattcaggagggcggcttctgcttcaggagcacccggcacaatttcaactccatggcgttcccgctgctgggattctacctgcccctggccgtggtggtcttctgctccctgaaggtggtgactgccctggcccagaggccacccaccgacgtggggcaggcagaggccacccgcaaggctgcccgcatggtctgggccaacctcctggtgttcgtggtctgcttcctgcccctgcacgtggggctgacagtgcgcctcgcagtgggctggaacgcctgtgccctcctggagacgatccgtcgcgccctgtacataaccagcaagctctcagatgccaactgctgcctggacgccatctgctactactacatggccaaggagttccaggaggcgtctgcactggccgtggctcccagtgctaaggcccacaaaagccaggactctctgtgcgtgaccctcgcctaagaggcgtgctgtgggcgctgtgggccaggtctcgggggctccgggaggtgctgcctgccaggggaagctggaaccagtagcaaggagcccgagatcagccctgaactcactgtgtattctcttggagccttgggtgggcagggacggcccaggtacctgctctcttgggaagagagagggacagggacaagggcaagaggactgaggccagagcaaggccaatgtcagagacccccgggatggggcctcacacttgccacccccagaaccagctcacctggccagagtgggttcctgctggccagggtgcagccttgatgacacctgccgctgcccctcggggctggaataaaactccccacccagagtcagtcctagtggggccctctgtgtttcgcactcgtgtggtgggaggcagggagggagcgcgtggctcagagggctggcggacatcttccagggacccttcggggctcttcactttgaggtcccccttggaccctttcaccccttcccacccccacccacctggagcgtgagcaggggctgttggaagctcctggcaggaccacagtagaggcccccagcccaggtttccttgctcaagacagggctgggagcagctgatctccatgtaggggctgcacagcggtgcaagggggggtgaccaaggtcaagcaggtgagggtgggttggggtgggtggcagtgaagggggtggccagggcctgtcaaggaacccagccctcttctccttccttcagggaaaggctggaaaccatgtctggcaggggcaggggttgggtgcccactcaggtaaaggcacgatgtcctgctggtttctgcctctcctgtactcctgcatggagggcatctcgaaacccaagctggaaggacagggcactccagagacctcctgtgagtgtgggccagcacggcctgggctcaaaccccatcctgtcatcccatattgcatgtccacaggcaccgccccaccctgttccatgttccacaggactggagagagatggcagtcatgttctggcagggacatggcacaagcatgcggctgatggcatctcacaggacccaggctccggagggcccatgcccaggagagccccataagggctctgtgcctaaaagggtgcatgcccaggtgggcccatgcccaggaaggtccatgcccaggatggtccatgagcaggagggcctcattcccaggagggtcccgtgcccaggagggctctatgcccaaaagggtcccatgtccgggagggtccatacgcaagggtgtccatgcctggttggggggggtctatgtccaggagggtcccatgcctggaagggtccatgctcaggagggttcatgcccaggagagtttatgccctggagggccccatgcccgggagagtcacgtgcacagagggccctgtgctcaggaggatacatgtccaggagtgtccctgtccaggaggctccatgcccaggaggctccatgtcaagaaagattcatgcctaggagggttcatgcccaggagtgtccctgcctaggaagatccattaccagaagggcccatgtcaaggagcgttcatgcccaggaaggtccagcccaggagggtccatgtcaaggaggttccatgcccaggagggtccatgctgaggtgggtccatgcccaggagggttcatgtccagaaaggtccatgcctaggagggcccatacacaacagagccctgtgcccaggaaggaccatgtcaaggagaaccccatgcccatgagggtccatgcccagtaagggccatgcccatgagatcctcatgcccaggaaggcccatgcccaggagggtccatgcccaggccagttcatgcacaggagggccccatgcctaaaagtgtccatgcccaggaaggtccatgtccagaagagtccatacccaggagggctgatatggttaggctttgtgtctccacccaaatctcatcttgaattgtaatccctataataaccatagtccccatgtgtcaagggagagaccaggtggaggcaattggatcatgggggctgtttcccacatgctgttctcatgatagtgagtgagttctcatgagatctgatggttttataaggggctcttcccttcacttctccttcctactgtcttatgaagaaggttccttgcttccccttcaccttctgccatgattgtaagtttcctgaggcctccctagccatgctgaagtgtgagtcaattaaacctctttcctttaaaaaaaaaaaaaaaaaaaaaaaa

SEQ ID NO: 254 - DNA, 1029 bp, Homo sapiens
  misc_feature (954)..(954): n equals a,t,g, or c
  misc_feature (968)..(968): n equals a,t,g, or c
  misc_feature (1009)..(1009): n equals a,t,g, or c
ggatccacccgcctcggcctcccaaaatgctgggattacaggcatgagccaccatgccggccgccatgctgtgtttttctaagagcctctgtgggcccatgggattggtaataaaagcccttttattggctggagagacatgttatttggttctgacatcccctaatgactttaaaggttgcatctgacttctgggatcctcaggggtttaatagattggtgtgtctgttctccctttgggctctggtttatctcaaagagacacacaaggccagccctgagtgatttcttgtctcaggtgttccttgacttgtgcgtacaggtgatcaacactccggaaatcctgcggaagccctcccagcctcctccccggccccctccagattatctgcgtggtgggtccccacctgcaccactgccagctcacctgagcagggctgctaggaactccccagggcccgggtctcaaatagagaggacggagtcgtccaggaggcctcctccaagccggccaattccccccgcaccaaattgcatcgtttcccaggtaagtggataatcagcaaccttgggctgggaacattgcttttaaggccactttcaatgggtaatggcaaaggtggggaaggtgaaacttgtggggtcatgagctgactgccttttctgcaattcagtcaatacgggggcgcacagcaggttagagcaacgaacgtggggaaatagactctctaagaagctcctaaaccatgtggcattttctcccgggttggcctattttatgacaagccactacccaccttccaccccatattaacttctgtcagttcccccatgctcgtctgcctgctaggtctttgtaaatgctgcttgttctgcctgatacgctccttctctccttggtggggccamcttctgctcatcctcaagatctgctcctaaatgccgyttcttccnaggaagtctatccngaattcctcaattctkgagggttgaatggggaactgggacnttcttctttaatcaataagg

SEQ ID NO: 255 - DNA, 2706 bp, Homo sapiens
ggtgacactatagaaggaacgcctgcaggtaccggtccggtaattcccgggtcgtacccacgcgtccggctgcttagctggcatgtggccgcatgagaatgccaggagacccttccctgcccatggagagtaggctgcgccccccagcccttcctgacgctcagcctcggggcctctctccaactctgccggcccaccgtggcatcgggaggccatgctcaggtctgaagcaggtttggggcctgctgacagcaatagcccgcctttgggaaccccttgctgtgaactctctcactcagtgacctcagtcaccaacctcctctgccctcggggcaccccacacaaaagggaagtgctggccgtgctggtcctgccctgctggtggcctgccgggcctggcgccggtgagcggaatcgatgggatgagggtgacagggcctgctcctgtcctgaggcccagccttgtccctcctgccacgtcctgtccacatgcatgcctctgcctgatgccctgctccactctctggtctgcccgtggggcagttgggaaggcgtctttctttctcccctcaactctgacagcacccagcccttgtggatggacttgggcttctattcaggcttatgcatggcaggctgccagggggaagtgccttcttcagaggtcctccaggacacatgtgtgcagaaacggtggatgtggaacacacaggaccagaatggaagcgtgtgatgcacggtggctgctctggctgagaggccctgctgggcatgtttcatctgtccccttttagctccacctgacattgcaggatccatggggactcagcccagggccttctcggatgtcacctcaccgctgtggcccttctgccgttcttctccacttggctccagctgcagctgttgacagatcaagcatgtcctgtgggagcttagaaccctgaagttctagtgtctgaaagatcagactccacgtcctgctgtcagccttgtcatcttgtctgatgtctttcagctgggagccccaaaccaggacagttctcggaccaaagatgcccccacactcaaaagtctgtcccgtcttgtgtttggagaaggaaacaatgttggcaggcagcactctgtggtggtcagccctcagagctgtttctaggcatctctcagatcagacagcaaagaatctacccagatctgggctgggtggaggtgtggctgggctgggggccattctgagcctgcagtgagagtttggcccagcctcagtccttgctcttctctggctacctctgcagggagctgcaggggcaagcactctctccagcactcaggaagcccggccgagggtacctcctcgtggaaagaatgcactttaaagctctgctgaggagttcggagcccaggctttcaggcgacctctgccctccctgcctctcctcaccctccctctcttcctgcagggcctgggaagggctttgagggagcctgggagccatgtgaagaggggcacgcctgggctgtcccacagtttagatccagttggaggttctccctggctcctgcaggcctgcggggatctctccccacttcaggcctccggccagctgcctgccctcttgtctgtgcttcagccctgcacaaaagcagcttggtgacaccactcagccacccagagtacgtgtttacaggctttccagatcaccttcctgtggggtgaacgtaatgaggcggggctggtccttggaatttcccctggaaaatggtaacagactccatccttgacccggggatgagcatgaaggcattgtcccaaaggcagaggccaccgtggtaggaattccaccaaggccagaagggaaaaaggaagaacccaccgtgtctggctgtgcgggccctggggagggtcgtgagtgcagcccctctctacttctgtgcctttgtaaaacgtgtagataaccgcagtggttggctgagccaagaactctcctaaatcagtggctttctccccaccccttgctggggagtcatttttaaaaaaatctgtgggatataaaattggcctcctgctgcttcagcctacctctccctctgctgacttaatgtcgtgattctgtttcttcagatatttaaggctgttaggttgtgtgagccttgaagtgtgtgtgtgtgtcccagcgactgtccactgtccaggagatgcatgtctttgtattggagatatttctgtaactcattctcttggtgctcacgattgccatggccatagggccacagtgccgtatctgctgcagacatgattgtttcttgttctagaggttttcttgttttcgaatcttgccctgatgaatccagccagaccaaggggcctagatttgacctctgtcctgggctcctgggccaggtgcaggaacatctgaggccactctgctggccacctccagtgggtgctgaccacaggatgggctttgtttacactcattttcaccctgattcttgcccccactttcataaaagaaacttcaaaatgctgacgctttggagagtaagaaaatcaatcttggctgggcacggtggctcctgcctgtgaatcctagcactttgggaggctgaagctgaaggatcacttgagctcaggagttggagaccaaccctggcaacataacaagaccctgtctctacaaaaaaaaaaaaaaaaaaaaaaaaaaa

SEQ ID NO: 256 - DNA, 3753 bp, Homo sapiens
  misc_feature (3703)..(3703): n equals a,t,g, or c
  misc_feature (3706)..(3706): n equals a,t,g, or c
  misc_feature (3732)..(3732): n equals a,t,g, or c
gaacagcaggtggcaaagcgacggactaaacgggacgtgtaccaggagcccacagaccccaagtttcctcagcagtggtacctgtctggtgtcactcagcgggacctgaatgtgaaggcggcctgggcgcagggctacacagggcacggcattgtggtctccattctggacgatggcatcgagaagaaccacccggacttggcaggcaattatgatcctggggccagttttgatgtcaatgaccaggaccctgacccccagcctcggtacacacagatgaatgacaacaggcacggcacacggtgtgcgggggaagtggctgcggtggccaacaacggtgtctgtggtgtaggtgtggcctacaacgcccgcattggaggggtgcgcatgctggatggcgaggtgacagatgcagtggaggcacgctcgctgggcctgaaccccaaccacatccacatctacagtgccagctggggccccgaggatgacggcaagacagtggatgggccagcccgcctcgccgaggaggccttcttccgtggggttagccagggccgaggggggctgggctccatctttgtctgggcctcggggaacgggggccgggaacatgacagctgcaactgcgacggctacaccaacagtatctacacgctgtccatcagcagcgccacgcagtttggcaacgtgccgtggtacagcgaggcctgctcgtccacactggccacgacctacagcagtggcaaccagaatgagaagcagatcgtgacgactgacttgcggcagaagtgcacggagtctcacacgggcacctcagcctctgcccccttagcagccggcatcattgctctcaccctggaggccaataagaacctcacatggcgggacatgcaacacctggtggtacagacctcgaagccagcccacctcaatgccaacgactgggccaccaatggtgtgggccggaaagtgagccactcatatggctacgggcttttggacgcaggcgccatggtggccctggcccagaattggaccacagtggccccccagcggaagtgcatcatcgacatcctcaccgagcccaaagacatcgggaaacggctcgaggtgcggaagaccgtgaccgcgtgcctgggcgagcccaaccacatcactcggctggagcacgctcaggcgcggctcaccctgtcctataatcgccgtggcgacctggccatccacctggtcagccccatgggcacccgctccaccctgctggcagccaggccacatgactactccgcagatgggtttaatgactgggccttcatgacaactcattcctgggatgaggatccctctggcgagtgggtcctagagattgaaaacaccagcgaagccaacaactatgggacgctgaccaagttcaccctcgtactctatggcaccgcccctgaggggctgcccgtacctccagaaagcagtggctgcaagaccctcacgtccagtcaggcctgtgtggtgtgcgaggaaggcttctccctgcaccagaagagctgtgtccagcactgccctccaggsttcgccccccaagtcctcgatacgcactatagcaccgagaatgacgtggagaccatccgggccagcgtctgcgccccctgccacgcctcatgtgccacatgccaggggccggccctgacagactgcctcagctgccccagccacgcctccttggaccctgtggagcagacttgctcccggcaaagccagagcagccgagagtccccgccacagcagcagccacctcggctgcccccggaggtggaggcggggcaacggctgcgggcagggctgctgccctcacacctgcctgaggtggtggccggcctcagctgcgccttcatcgtgctggtcttcgtcactgtcttcctggtcctgcagctgcgctctggctttagttttcggggggtgaaggtgtacaccatggaccgtggcctcatctcctacaaggggctgccccctgaagcctggcaggaggagtgcccgtctgactcagaagaggacgagggccggggcgagaggaccgcctttatcaaagaccagagcgccctctgatgagcccactgcccaccccctcaagccaatcccctccttgggcactttttaattcaccaaagtatttttttatcttgggactgggtttggaccccagctgggaggcaagaggggtggagactgyttcccatcctaccctcgggcccacctggccacctgaggtgggcccaggaccagctggggcgtggggagggccgtaccccaccctcagcaccccttccatgtggagaaaggagtgaaacctttagggcagcttgccccggccccggccccagccagagttcctgcggagtgaagaggggcagcccttgcttgttgggattcctgacccaggccgcagctcttgcccttccctgtccctctaaagcaataatggtcccatccaggcagtcgggggctggcctaggagatatctgagggaggaggccacctctccaagggcttctgcaccctccaccctgtcccccagctctggtgagtcttggcggcagcagccatcataggaagggaccaaggcaaggcaggtgcctccaggtgtgcacgtggcatgtggcctgtggcctgtgtcccatgacccacccctgtgctccgtgcctccaccaccactggccaccaggctggcgcagccaaggccgaagctctggctgaaccctgtgctggtgtcctgaccaccctcccctctcttgcacccgcctctcccgtcagggcccaagtccctgttttctgagcccgggctgcctgggctgttggcactcacagacctggagcccctgggtgggtggtggggaggggcgctggcccagccggcctctctggcctcccacccgatgctgctttcccctgtggggatctcaggggctgtttgaggatatattttcactttgtgattatttcactttagatgctgatgatttgtttttgtatttttaatgggggtagcagctggactacccacgttctcacacccaccgtccgccctgctcctccctggctgccctggccctgaggtgtgggggctgcagcatgttgctgaggagtgaggaatagttgagccccaagtcctgaagaggcgggccagccaggcgggctcaaggaaagggggtcccagtgggaggggcaggctgacatctgtgtttcaagtggggctcgccatgccgggggttcataggtcactggctctccaagtgccagaggtgggcaggtggtggcactgagcccccccaacactgtgccctggtggagaaagcactgacctgtcatgcccccctcaaacctcctcttctgacgtgccttttgcacccctcccattaggacaatcagtcccctcccatctgggagtccccttttcttttctaccctagccattcctggtacccagccatctgcccaggggtgccccctcctctcccatccccctgccctcgtggccagcccggctggttttgtaagatrctgggttggtgcacagtgatttttttcttgtaatttaaacaggcccagcattgctggttctatttaatggacatgagataatgttagaggttttaaagtgattaaacgtgcagactatgcaaaccagaaaaaaaaaaaaaaaaaaaaaaaaggnggncgctctaaaaggttcctcgaaggggnccagcttaagcgtgcatggga

SEQ ID NO: 257 - DNA, 1559 bp, Homo sapiens
  misc_feature (14)..(14): n equals a,t,g, or c
  misc_feature (1394)..(1394): n equals a,t,g, or c
  misc_feature (1500)..(1500): n equals a,t,g, or c
  misc_feature (1532)..(1532): n equals a,t,g, or c
  misc_feature (1546)..(1546): n equals a,t,g, or c
  misc_feature (1555)..(1555): n equals a,t,g, or c
ggaaaccctttcgngaaatyaaccctcactaaagggaacaaaagctggagctccaccgcggtggcggccgctctagaactagtggatccyccgggctgcaggaattcggcacgagaaaaagttcagcatattagaatcaccgggaggccttgttaaaagagttcgctgggcccatcttcagagtctctgagttgttggtctggaatagagccaaatgttttgtgtgtctaacaattcccaggtgctgttgctgctgctactattccaggaacacactttgagaaccattgtgttattgctctgcacgcccacccactctcaactcccacgaaaaaaatcaacttccagagctaagatttcggtggaagtcctggttccatatctggtgcaagatctcccctcacgaatcagttgagtcaacattctwgctcaacaacatcacacgattaacattaaygaaaattattcatttgggaaactatcagccagttttcacttctgaaggggcaggagagtgttatgagaaatcacggcagttttcagcagggtccagattcagattaaataactattttctgtcatttctgtgaccaaccacatacaaacagactcatctgtgcactctccccctcccccttcaggtatatgttttctgagtaaagttgaaaagaatctcagaccagaaaatatagatatatatttaaatcttacttgagtagaactgattacgacttttgggtgttgaggggtctataagatcaaaacttttccatgataatactaagatgttatcgaccatttatctgtccttctctcaaaagtgtatggtggaattttccagaagctatgtgatacgtgatgatgtcatcactctgctgttaacatataataaatttattgctattgtttataaaagaataaatgatattttttaaaaaaaaaaaaaaaaaaaaaaaactcgagggggggcccggtacccaattcgccctatagtgagtcgtattacaattcactggccgtcgttttacaacgtcgtgactgggaaaaccctggcgttacccaacttaatcgccttgcagcacatccccctttcgccagctggcgtaatagcgaaraggcccgcaccgatcgcccttcccaacagttgcgcagcctgaatggcgaatggcaaattgtaagcgttaatattttgttaaaattcgcgttaaattytygtaaatcagctcawtttttaaccmataggccgaaatcggsaaaatcccttataaatcaaaagaatagaccgagatagggttgagtgytgttccagtttggaacmagagtccmctwttwaagaacgkggmctccaacgtcaaagggcgaaaaaccgtctatcagggcgatggcccactacntgaaccatcaccctaatcaagttttttggggtcgaggtgccgtaaagcactaaatcggaaccctaaagggagcccccgatttaaaacttgacggggaaagccggcnaacgtggccaagaaaggaagggaagaaagccnaaaggaacgggccnctagggccncttg

SEQ ID NO: 258 - DNA, 1729 bp, Homo sapiens
gcctgcaggtaccggtccggaattcccgggtcgacccacgcgtccgggagccgcgcggctgcgggggcgcaaatagggtcagtgggccgcttggcggtgtcgttgcggtaccaggtccgcgtgaggggttcgggggttctgggcaggcacaatggcgtctcgagcaggcccgcgagcggccggcaccgacggcagcgactttcagcaccgggagcgcgtcgccatgcactaccagatgagtgtgactctcaagtatgaaatcaagaagctgatctacgtacatctggtcatatggctgctgctggttgctaagatgagcgtgggacacctgaggctcttgtcacatgatcaggtggccatgccctatcagtgggaatacccgtatttgctgagcattttgccctctctcttgggccttctctcctttccccgcaacaacattagctacctggtgctctccatgatcagcatgggactcttttccatcgctccactcatttatggcagcatggagatgttccctgctgcacagcagctctaccgccatggcaaggcctaccgtttcctctttggtttttctgccgtttccatcatgtacctggtgttggtgttggcagtgcaagtgcatgcctggcagttgtactacagcaagaagctcctagactcttggttcaccagcacacaggagaagaagcataaatgaagcctctttggggtgaagcctggacatcccatcgaatgaaaggacactagtacagcggttccaaaatcccttctggtgattttagcagctgtgatgttggtacctggtgcagaccaggccaaagttctggaaagctccttttgccatctgctgaggtggcaaaactataatttattcctggttggctagaactgggtgaccaacagctatgaaacaaatttcagctgtttgaagttgaactttgaggtttttctttaagaatgagcttcgtccttgcctctactcggtcattctccccatttccatccattaccccttagccattgagactaaaggaaatagggaataaatcaaattacttcatctctaggtcacgggtcaggaaacatttgggcagctgctcccttggcaggctgtggtctcctctgcaaaagcattttaattaaaaacctcaataaagatggccctgcccacactgtgccttgtgtttggggcttgatagagtgtgaaaggtgtgttgcttgaaaggtgtggccttagacactaggagatgatgggtagaagctccttgagaaacctagcagtggccatagagaagtagactgggtatggggaacctaagtcatagttgtaacctacagctgattggtaagaactatgggccagacatttaatctctccatctatgaaatagtccattctcatttatctaccttaggttatgggctcttcttttagttggatattcacatttatctttcagtgttaactgggtatcagttatgagtctactactgtataatggcatccaaaagaattttaaagtacctcggtttatagggatttacaattcagtagaaacttgttattcatgtgaaacagtgaacataatatctaatgatgtggagcaagtacattaaaaacaggaaggaagagatctgtgattaaactaaaggccctttcacacctaaaaaaaaaaaaaaaaaaaaaaaaaaaaaaaaaaaaaaaaaaaaaaaaaaaaaaaaa

SEQ ID NO: 259 - DNA, 2826 bp, Homo sapiens
ccacgcgtccgcttctgggggccggcttcctttatctctggcggccttgtagtcgtctccgagactccccacccctccttccctcttgaccccctaggtttgattgccctttccccgaaacaactatcatgagcgcgaggctgccggtgttgtctccacctcggtggccgcggctgttgctgctgtcgctgctcctgctgggggcggttcctggcccgcgccggagcggcgctttctacctgcccggcctggcgcccgtcaacttctgcgacgaagaaaaaaagagcgacgagtgcaaggccgaaatagaactatttgtgaacagacttgattcagtggaatcagttcttccttatgaatacacagcgtttgatttttgccaagcatcagaaggaaagcgcccatctgaaaatcttggtcaggtactattcggggaaagaattgaaccttcaccatataagtttacgtttaataagaaggagacctgtaagcttgtttgtacaaaaacataccatacagagaaagctgaagacaaacaaaagttagaattcttgaaaaaaagcatgttattgaattatcaacatcactggattgtggataatatgcctgtaacgtggtgttacgatgttgaagatggtcagaggttctgtaatcctggatttcctattggctgttacattacagataaaggccatgcaaaagatgcctgtgttattagttcagatttccatgaaagagatacattttacatcttcaaccatgttgacatcaaaatatactatcatgttgttgaaactgggtccatgggagcaagattagtggctgctaaacttgaaccgaaaagcttcaaacatacccatatagataaaccagactgctcagggccccccatggacataagtaacaaggcttctggggagataaaaattgcctatacttactctgttagcttcgaggaagatgataagatcagatgggcgtctagatgggactatattctggagtctatgcctcatacccacattcagtggtttagcattatgaattccctggtcattgtatctcttcttatctggaatggtagctatgattatgttacggacactgcacaaagatattgctagatataatcagatggactctacggaagatgcccaggaagaatttggctggaaacttgatcatggtgatatattccgtcctccaagaaaagggatgctgctatcagtctttctaggatccgggacacagattttaattatgacctttgtgactctatttttcgcttgcctgggatttttgtcacctgccaaccgaggagcgctgatgacgtgtgctgtggtcctgtgggtgctgctgggcacccctgcaggctatgttgctgccagattctataagtcctttggaggtgagaagtggaaaacaaatgttttattaacatcatttctttgtcctgggattgtatttgctgacttctttataatgaatctgatcctctggggagaaggatcttcagcagctattccttttgggacactggttgccatattggccctttggttctgcatatctgtgcctctgacgtttattggtgcatactttggttttaagaagaatgccattgaacacccagttcgaaccaatcagattccacgtcagattcctgaacagtcgttctacacgaagcccttgcctggtattatcatgggagggattttgccctttggctgcatctttatacaacttttcttcattctgaatagtatttggtcacaccagatgtattacatgtttggcttcctatttctggtgtttatcattttggtattacctgttctgaagcaactatacttctttgctatttccacctatgtgcagaggattatcattggcaatggcgttcattccttacgagtggctttactgcagtttatttcttaatctatgcagtacactacttcttttcaaaactgcagatcacgggaacagcaagcacaattctgtactttggttataccatgataatggttttgatcttctttctttttacaggaacaattggcttctttgcatgcttttggtttgttaccaaaatatacagtgtggtgaaggttgactgaagaagtccagtgtgtccagttaaaacagaaataaattaaactcttcatcaacaaagacctgtttttgtgactgccttgagttttatcagaattattggcctagtaatccttcagaaacaccgtaattctaaataaacctcttcccatacacctttcccccataagatgtgtcttcaacactataaagcatttgtattgtgatttgattaagtatatatttggttgttctcaatgaagagcaaatttaaatattatgtgcatttgtaaatacagtagctataaaattttccatacttctaatggcagaatagaggaggccatattaaataatactgatgaaaggcaggacactgcattgtaaataggattttctaggctcggtaggcagaaagaattatttttctttgaaggaaataactttttatcatggtaattttgaaggatgattcctatgatgtgttcaccaggggaatgtggcttttaaagaaaatcttctattggttgtaactgttcatatcttcttacttttctgtgttgacttcattattcccatggtattggccttttaaactatgtgcctctgagtctttcaatttataaatttgttatcttaataaatattataaaaaagaaaaaaaaaaaaaaaaaaaaaaaaaaaaaaaaaaaaaaaaaaaaaaaaaaaaaaaaaaaaaaaaaaaaaaaaaaa

SEQ ID NO: 260 - DNA, 1959 bp, Homo sapiens
tcgacccacgcgtccgaccggatgccgtggggtttacagcaggaaaatccgtggagacagcagatccgagaagcggcgatgtttgcgtagaaccctgtacgtgcttccttcggcctgtcgctcttcccttctctctgaccagcaccatgcttctcctggtgacaagccttctgctctgtgagttaccacacccagcattcctcctgatcccagagaaatcggatctgcgaacagtggcaccagcctctagtctcaatgtgaggtttgactccaggacgatgaatttaagctgggactgccaagaaaacacaaccttcagcaagtgtttcttaactgacaagaagaacagagtcgtggaacccaggctcagtaacaacgaatgttcgtgcacatttcgtgaaatttgtctgcatgaaggagtcacatttgaggttcacgtgaatactagtcaaagaggatttcaacagaaactgctttatccaaattcaggaagggagggtaccgctgctcagaatttctcctgtttcatctacaatgcggatttaatgaactgtacctgggcgaggggtccgacggcccccccgtgacgtccagtattttttgtacatacgaaactcaaagagaaggagggagatccggtgtccttattacatacaagactcaggaacccatgtgggatgtcacctggataacctgtcaggattaacgtctcgcaattactttctggttaacggaaccagccgagaaattggcatccaattctttgattcactttggacacaaagaaaatagaacgattcaaccctcccagcaatgtcaccgtacgttgcaacacgacgcactgcctcgtacggtggaaacagcccaggacctatcagaagctgtcgtacctggactttcagtaccagctggacgtccacagaaagaatacccagcctggcacggaaaacctactgattaatgtttctggtgatttggaaaatagatacaactttccaagctctgagcccagagcaaaacacagtgtgaagatcagagctgcagacgtccgcatcttgaattggagctcctggagtgaagccattgaatttggttctgacgacgggaacctcggctctgtgtacatttatgtgctcctaatcgtgggaacccttgctgtggcatcgtcctcggcttcctctttaaaaggttccttaggatacagcggctgttcccgccagttccacagatcaaagacaaactgaatgataaccatgaggtggaagacgagatcatctgggaggaattcaccccagaggaagggaaaggctaccgcgaagaggtcttgaccgtgaaggaaattacctgagacccagagggtgtaggaatggcatggacatctccgcctccgcgacacgggggaactgttttcttgatgatgctgtgaacctttatatcattttctatgtttttatttaaaaacatgacatttggggccaggcgcggtggctcacgcctgtaatcccagcactttgggaggccaaggcaggcggatcacctgaggccaggagttcaagaccagcctgcccaacatggtgaaaccccatctggactaaaaatgcagaaatttacccaggcacggcggcggacgcccatcatcccagctacttgggaggctgaggcaggagaattgcttgaacccgtgaggcggaggttgtagtgagccaagatcgcaccattgcacaccaacctgcgtgacagagcaagattgcatctcaaacaaacaataataataaataataaaaacctgaaaaaaaaaaaaaaaaaaaaaaaaaaaaaaaaaaaaaaaaaaaaaaaaaaaaaaaaaaaaaaaaaaaaaaaaaaaaaaaaaaaaaaaaaaaaaaaaaaaaaaaaaaaaaaaaaaaaaaaaaaaaaaaaaaaaaaaaaaaaaaaaaaaaaaaaaaaaaaaaaaaaaaaaaa

SEQ ID NO: 261 - DNA, 713 bp, Homo sapiens
  misc_feature (664)..(664): n equals a,t,g, or c
  misc_feature (697)..(697): n equals a,t,g, or c
ggcatttgctgcctgaccagagcacaagtcctccgacagcacgttcttggtgctcatgtctcatggcatcctggggggaatgtgtggaactgaacatgatgaggcaaacccagatgggctgctttccttcaggccaaagctgaaggaacacttgaagccaggattttgagaccaattgattcatagctcttgggagctatttttcaaatgaaagagaaaacagaaataatttttctaaaaactggtaactacaagatgatttcattatcactaggcacactgttgaatgacacttgagagaaaacaaagtggtatgtatgtgtgtgtgtgtgtgtttgtgtgtgtgtgtgtctgtgtgtttgtatgtgtatgggtctatgtgtatgaaactagttagaaagaacattaaaaaagaacaaggggattctgatagccatactgtaggaggcacagtagtgtgtagaaaattgttgtctctgcagcaaaccatggggaacagtgggtcagagactgtccagcatctttgggagtcatgtcttcacagtcacctaagaacctggaggatgcagtttgcaagacataccagagaaggacttcattgttttctgctcttcaacctcatgtatacgtcttttggtggtattaagtgatttgtgggcctgangctacctttgaatgattctaccaatcaagaatncctaagaaacaatgat

SEQ ID NO: 262 - DNA, 1142 bp, Homo sapiens
aagagctgctggtcagagcacttcctggaacttgctattggtcaggacgtttcctatgctaataaaggggtggcccgtagaagattccagcaccctcccctaactccaggccagactcctttcagctaaaggggagatctggatggcatctacttcgtatgactattgcagagtgcccatggaagacggggataagcgctgtaagcttctgctggggataggaattctggtgctcctgatcatcgtgattctgggggtgcccttgattatcttcaccatcaaggccaacagcgaggcctgccgggacggccttcgggcagtgatggagtgtcgcaatgtcacccatctcctgcaacaagagctgaccgaggcccagaagggctttcaggatgtggaggcccaggccgccacctgcaaccacactgtgatggccctaatggcttccctggatgcagagaaggcccaaggacaaaagaaagtggaggagcttgagggagagatcactacattaaaccataagcttcaggacgcgtctgcagaggtggagcgactgagaagagaaaaccaggtcttaagcgtgagaatcgcggacaagaagtactaccccagctcccaggactccagctccgctgcggcgccccagctgctgattgtgctgctgggcctcagcgctctgctgcagtgagatcccaggaagctggcacatcttggaaggtccgtcctgctcggcttttcgcttgaacattcccttgatctcatcagttctgagcgggtcatggggcaacacggttagcggggagagcacggggtagccggagaagggcctctggagcaggtctggaggggccatggggcagtcctgggtgtggggacacagtcgggttgacccagggctgtctccctccagagcctccctccggacaatgagtcccccctcttgtctcccaccctgagattgggcatggggtgcggtgtggggggcatgtgctgcctgttgttatgggttttttttgcggggggggttgcttttttctggggtctttgagctccaaaaaataaacacttcctttgagggagagcacaccttaaaaaaaaaaaaaaaaaaaaaaaaaaaaaaaaaaaaaaaaaaaagggcggccgct

SEQ ID NO: 263 - DNA, 1950 bp, Homo sapiens
  misc_feature (1941)..(1941): n equals a,t,g, or c
ggggtggcttgccacccacagcaattgtgactttgaaaggccattccaccgttctatcaatccagctgcttcaggatgatgggcaacgtggtaagaccagtgaattccacgaacatgagcccactgctgcacttctatggccgtaaattaacttgagaaagtggaatcgaattccgatgttgaattttccttctggccccattcatgtggcaggtggtgattcaggattgtcctcccgggctggcagcagggccccagcggcaccatgtctgccctcggagtcaccgtggccctgctggtgtgggcggccttcctcctgctggtgtccatgtggaggcaggtgcacagcagctggaatctgcccccaggccctttcccgcttcccatcatcgggaacctcttccagttggaattgaagaatattcccaagtccttcacccggttggcccagcgcttcgggccggtgttcacgctgtacgtgggctcgcagcgcatggtggtgatgcacggctacaaggcggtgaaggaagcgctgctggactacaaggacgagttctcgggcagaggcgacctccccgcgttccatgcgcacagggacaggggaatcatttttaataatggacctacctggaaggacatccggcggttttccctgaccaccctccggaactatgggatggggaaacagggcaatgagagccggatccagagggaggcccacttcctgctggaagcactcaggaagacccaaggccagcctttcgaccccaccttcctcatcggctgcgcgccctgcaacgtcatagccgacatcctcttccgcaagcattttgactacaatgatgagaagtttctaaggctgatgtatttgtttaatgagaacttccacctactcagcactccctggctccagctttacaataattttcccagctttctacactacttgcctggaagccacagaaaagtcataaaaaatgtggctgaagtaaaagagtatgtgtctgaaagggtgaaggagcaccatcaatctctggaccccaactgtccccgggacctcaccgactgcctgctcgtggaaatggagaaggaaaagcacagtgcagagcgcttgtacacaatggacggtatcaccgtgactgtggccgacctgttctttgcggggacagagaccaccagcacaactctgagatatgggctcctgattctcatgaaataccctgagatcgaagagaagctccatgaagaaattgacagggtgattgggccaagccgaatccctgccatcaaggataggcaagagatgccctacatggatgctgtggtgcatgagattcagcggttcatcaccctcgtgccctccaacctgccccatgaagcaacccgagacaccattttcagaggatacctcatccccaagggcacagtcgtagtgccaactctggactctgttttgtatgacaaccaagaatttcctgatccagaaaagtttaagccagaacacttcctgaatgaaaatggaaagtttaagtacagtgactatttcaagccattttccacaggaaaacgagtgtgtgctggagaaggcctggctcgcatggagttgtttcttttgttgtgtgccattttgcagcattttaatttgaagcctctcgttgacccaaaggatatcgacctcagccctatacatattgggtttggctgtatcccaccacgttacaaactctgtgtcattccccgctcatgagtgtgtggaggacaccctgaaccccccgctttcaaacaagatttcgaattgtttgaggtcaggatttctcaaactgattcctttctttgcatatgagtatttgaaaataaatattttcccagaatataaataaatcatcacatgattattttaactawaaaaaaaaaaaaaaaaaaaaaaaaaaaaaaaaaaanaaaaaaaaa

SEQ ID NO: 264 - DNA, 868 bp, Homo sapiens
ccacgcgtccgcccacgcgtccggtgagtttccaagccccagctcactctgaccacttctctgcctgcccagcatcatgaagggccttgcagctgccctccttgtcctcgtctgcaccatggccctctgctcctgtgcacaagttggtaccaacaaagagctctgctgcctcgtctatacctcctggcagattccacaaaagttcatagttgactattctgaaaccagcccccagtgccccaagccaggtgtcatcctcctaaccaagagaggccggcagatctgtgctgaccccaataagaagtgggtccagaaatacatcagcgacctgaagctgaatgcctgaggggcctggaagctgcgagggcccagtgaacttggtgggcccaggagggaacaggagcctgagccagggcaatggccctgccaccctggaggctacctcttctaagagtcccatctgctatgcccagccacattaactaactttaatcttagtttatgcatcatatttcattttgaaattgatttctattgttgagctgcattatgaaattagtattttctctgacatctcatgacattgtctttatcatcctttcccctttcccttcaactcttcgtacattcaatgcatggatcaatcagtgtgattagctttctcagcagacattgtgccatatgtatcaaatgacaaatctttattgaatggttttgctcagcaccaccttttaatatattggcagtacttattatataaaaggtaaaccagcaaaaaaaaaaaaaaaaaaaaaaaaaaaaaaaaaaaaaaaaaaaaaaaaaaaaaaaaaaaaaaaaaaaaaaaaaaaaaaaaaaaaaaaaaaaaaaa

SEQ ID NO: 265 - DNA, 1233 bp, Homo sapiens
ggaccactcagacaccgtgtcctcttgcctgggagaggggaagcagatctgaggacatctctgtgccaggccagaaaccgcccacctgcaggtgaggcccggacccctgcccagttccttctccgggatggacgtggggcccagctccctgccccaccttgggctgaagctgctgctgctcctgctgctgctgcccctcaggggccaagccaacacaggctgctacgggatcccagggatgcccggcctgcccggggcaccagggaaggatgggtacgacggactgccggggcccaagggggagccaggaatcccagccattcccgggatccgaggacccaaagggcagaagggagaacccggcttacccggccatcctgggaaaaatggccccatgggaccccctgggatgccaggggtgcccggccccatgggcatccctggagagccaggtgaggagggcagatacaagcagaaattccagtcagtgttcacggtcactcggcagacccaccagccccctgcacccaacagcctgatcagattcaacgcggtcctcaccaacccgcagggagattatgacacgagcactggcaagttcacctgcaaagtccccggcctctactactttgtctaccacgcgtcgcatacagccaacctgtgcgtgctgctgtaccgcagcggcgtcaaagtggtcaccttctgtggccacacgtccaaaaccaatcaggtcaactcgggcggtgtgctgctgaggttgcaggtgggcgaggaggtgtggctggctgtcaatgactactacgacatggtgggcatccagggctctgacagcgtcttctccggcttcctgctcttccccgactagggcgggcagatgcgctcgagacccacgggccttccacctccctcagcttcctgcatggacccaccttactggccagtctgcatccttgcctagaccattctcccctccagggagcccaccctgacccacccccactgcaccccctccccatgggttctctccttcctctgaacttctttaggagtcactgcttgtgtggttcctgggacacttaaccaatgccttctggtactgccattcttttttttttttttcaagtattggaaggggtggggagatatataaataaatcatgaaatcaatacaaaaaaaaaaaaaaaaaaaaaaaaaaaaaaaaaaaaaaaaaaaaaaaaaaaaaaagggcggcc

SEQ ID NO: 266 - DNA, 768 bp, Homo sapiens
tcgacccacgcgtccgcaaccactgcctccaactgccccatgctgcctgagaaggcactgcacggccacccccaactgccccgcactgtccctacccgggcagccatgcgagcggctggaactctgctggccttctgctgcctggtcttgagcaccactgggggcccttccccagatacttgttcccaggaccttaactcacgtgtgaagccaggatttcctaaaacaataaagaccaatgacccaggagtcctccaagcagccagatacagtgttgaaaagttcaacaactgcacgaacgacatgttcttgttcaaggagtcccgcatcacaagggccctagttcagatagtgaaaggcctgaaatatatgctggaggtggaaattggcagaactacctgcaagaaaaaccagcactgcgtctggatgactgtgactttccaaaccaaccacaccttgaagcagactctgagctgctactctgaagtctgggtcgtgccctggctccagcacttcgaggtgcctgttctcccgttgtcactgacccccgcctcttcagcaagaccacagccatgacaaacaccaggatgcatgctccttgtcccctcccacccgcctcatgacccagcctcacagaccctctcaggcctctgacgagtgagcgggtgaagtgccactgggtcaccgcagggcagctggaatggcagcatggtagcacctcctaacagattaaatagatcacatttgcttctaaaaaaaaaaaaaaaa

SEQ ID NO: 267 - DNA, 948 bp, Homo sapiens
ggccgggggcaggccctgcctagtctgcgtctttttcccccgcaccgcgcgccgctccgccactcgggcaccgcagtagggcaggaggctggagagcctgctgcccgcccgcccgtaaaatggtcccctcggctggacagctcgccctgttcgctctgggtattgtgttggctgcgtgccaggccttggagaacagcacgtccccgctgagtgcagacccgcccgtggctgcagcagtggtgtcccattttaatgactgcccagattcccacactcagttctgcttccatggaacctgcagtttttggtgcaggaggacaagccagcatgtgtctgccattctgggtacgttggtgcacgctgtgagcatgcggacctcctggccgtggtggctgccagccagaagaagcaggccatcaccgccttggtggtggtctccatcgtggccctggctgtccttatcatcacatgtgtgctgatacactgctgccaggtccgaaaacactgtgagtrgtgccgggccctcatctgccggcacgagaagcccagcgccctcctgaagggaagaaccgcttgctgccactcagaaacagtggtttgaagagcccagaggaggagtttggccaggtggactgtggcagatcaataaagaaaggcttcttcaggacagcactgccagagatgcctgggtgtgccacagaccttcctacttggcctgtaatcacctgtgcagccttttgtgggccttcaaaactctgtcaagaactccgtctgcttggggttattcagtgtgacctagagaagaaatcagcggaccacgatttcaagacttgttaaaaaagaactgcaaagagacggactcctgttcacctaggtgaggtgtgtgcagcagttggtgtctgagtccamatgtgtgcagttgtcttctgccagccatggattccaggc

SEQ ID NO: 268 - DNA, 2579 bp, Homo sapiens
ggctcccagcctttgctgggcgccagacccggctttgccgtccggctattagcctactgtggctagtcacccccggggtcccggccttctcgggctggggccgccgccaccgcggcaggacggggaggcgggccatggcgtcctgcgtggggagccggaccctaagcaaggatgatgtgaactacaaaatgcatttccggatgatcaacgagcagcaagtggaggacatcaccattgacttcttctaccggccgcataccatcaccctgctcagcttcaccatcgtcagcctcatgtacttcgcctttaccagggatgactctgttccagaagacaacatctggagaggcatcctctctgttattttcttctttcttatcatcagtgtgttagctttccccaatggtccgttcactcgacctcatccagccttatggcgaatggtttttggactcagtgtgctctacttcctgttcctggtattcctactcttcctgaatttcgagcaggttaaatctctaatgtattggctagatccaaatcttcgatacgccacaagggaagcagatgtcatggagtatgctgtgaactgccatgtgatcacctgggagaggattatcagccactttgatatttttgcatttggacatttctggggctgggccatgaaggccttgctgatccgtagttacggtctctgctggacaatcagtattacctgggagctgactgagctcttcttcatgcatctcctccccaattttgccgagtgctggtgggatcaagtcattctggacatcctgttgtgcaatggcggtggcatttggctgggcatggtcgtttgccggtttttagagatgaggacttaccactgggcaagcttcaaggacattcataccaccaccgggaagatcaagagagctgttctgcagttcactcctgctagctggacctatgttcgatggtttgaccccaaatcttcttttcagagagtagctggagtgtaccttttcatgatcatctggcagctgactgagttgaataccttcttcttgaagcatatctttgtgttccaagccagtcatccattaagttggggtagaattctctttattggtggcatcacagctcccacagtgagacagtactacgcttacctcaccgacacacagtgcaagcgcgtaggaacacaatgctgggtgtttggggtcattggtttcctggaggccattgtttgcataaaatttggacaagatctcttctctaagacccaaatactctatgttgtgctttggcttctttgcgtggctttcaccactttcctctgtctgtacggcatgatttggtatgcagaacactatggtcaccgagaaaagacctactcggagtgtgaagatggcacctacagtccagagatctcctggcatcacaggaaagggacaaaaggttctgaagacagcccacccaagcatgcaggcaacaacgaaagccattcttccaggagaaggaatcggcattccaagtcaaaagtcaccaatggcgttggaaagaaatgaaaaaccctggttaatcaaagatgttccagagtgcctagaactgagagggaaatggaactcatttggaactccccgtgaggaggtcgaggcgcacagggcaagcaggaagaggcgagggcacttgggggtcattatttgagatcgtaagtcttgtttcccacagacctggccgcgtcaggcagatcatcgcctggggggcctttgccaacgtggggtctcttctaacttcagcacttgacatgcggtcaccggtggcagcgcggtgtgttgaagggaaacggtagctattcattcacagttgccaagagcagctccgcgcctgctggatcgtggatgcagcgtaaacatcttccttcagacgaggcattaaccccatggttaatggactggtcaccagtttttattttatttttatgaatctacctttccattgattgatttaagttcaggccacttttctgtcttttatttggttactgttgttatttgtttttaagttaggatgctttttaacagcctttagaagccgctgctgaaattgatactgggggaagggttccccttccttctagagcagaaaagggagagaggtgttgtattcctgtttggtaacctcagtctcctgtaagacctcctaccacatggcgagtatacaccaatcaggagagggtagctgcctgcataggagcctcgcttccgattattcccttcccaatattattcatccagacttagccacagtgcacaaaagcaaacctgctagagaggcagtgaacaccacagcttctccccagctaggtgccttttacatcgggtttgttctccttccatggtgtgttgctgacattgtcactgagtcccatgtgaggtgctggtgagtattacctttcatctgtgccatgctctagaaccttgaccttgatagttcaccacctctgatggatccctgttttaaataaaaacgattcactttaaagcctaaaaaaaaaaaaaaagggsgaccgctcgcgatctagaactagt

SEQ ID NO: 269 - DNA, 750 bp, Homo sapiens
  misc_feature (701)..(701): n equals a,t,g, or c
  misc_feature (731)..(731): n equals a,t,g, or c
gggtggcttccttgtggttcctcagtggtgcctgcaacccctggttcacctccttccaggttctggctccttccagccatggctctcagagtccttctgttaacagccttgaccttatgtcatgggttcaacttggacactgaaaacgcaatgaccttccaagagaacgcaaggggcttcgggcagagcgtggtccagcttcagggatccagggtggtggttggagccccccaggagatagtggctgccaaccaaaggggcagcctctaccagtgcgactacagcacaggctcatgcgagcccatccacctgcaggtccccgtggaggccgtgaacatgtccctgggcctgtccctggcagccaccaccagcccccctcagctgctggcctgtggtcccaccgtgcaccagacttgcagtgagaacacgtatgtgaaagggctctgcttcctgtttggatccaacctacggcagcagccccagaagttcccagaggccctccgagggtgtcctcaagargatagtgacattgccttcttgattgatggctctggtagcatcatcccacatgactttcggcggatgaaggartttgtctcaactgtgatggagcaattaaaaaagtccaaaaccttgttctctttgatgcagtactctgaagaattccggattcactttacttcaaagagttccagaacaancctaacccaagatcactggtgaagccaatnacgcagctgcttggggcgg

SEQ ID NO: 270 - DNA, 3828 bp, Homo sapiens
cccgggtcgacccacgcgtccggtggagtctccatctgagccctttcctagtccaggcatcccgatgttggtggatggcccatctgagcggccagccctgtgcttcttgctgttggctgtggcaatgtctttcttcggctcagctctatccatagatgaaacacgggcgcatctgttgttgaaagaaaagatgatgcggctgggggggcggctggtgctgaataccaaggaggagctggccaatgagaggctcatgacgctcaaaatcgctgagatgaaggaggccatgaggaccctgatattcccacccagcatgcactttttccaggccaagcatctcattgagagaagtcaagtgtttaatattctaaggatgatgccaaaaggggctgccttgcacctccatgacattggcatcgtgactatggactggctggtgaggaatgtcacctacaggcctcactgccacatctgtttcaccccaagggggatcatgcagttcagatttgctcacccaactccccgtccatcagaaaaatgttccaagtggattctgctggaggattatcggaagcgggtgcagaacgtcactgagtttgatgacagcttgctgaggaatttcactctggtgacccagcacccggaggtgatttacacaaaccaaaatgttgtctggtcgaaatttgaaaccatcttcttcaccatctctggtctcatccattacgcaccagtgttcagagactatgtcttccggagcatgcaggaattctacgaagacaacgtgctctacatggagatcagagccaggctgctgccggtgtatgagctcagtggagagcaccatgacgaagagtggtcagtgaagacttaccaggaagtagctcagaagtttgtggaaactcaccctgagtttattggaatcaaaatcatttattcggatcacagatccaaagatgtggctgtcatcgcagaatccatccgaatggccatggggctccgaatcaagttccccacggtggtggcagggtttgacctggtggggcatgaggacactggccactccttgcatgactacaaggaagctctgatgatccccgccaaggatggcgttaagctgccttacttcttccacgccggagaaacagactggcagggtacttccatagacaggaacattctggatgctctgatgctgaacactaccagaatcggccatggatttgctttgagcaaacaccccgcagtcaggacttactcctggaaaaaggacatccccatagaagctgtcccatctctaaccaggtgctgaaactggtgtctgacttgaggaaccaccctgtagccactctgatggccactgggcaccccatggtgatcagctctgatgacccagctatgtttggtgccaaaggcttgtcctacgatttctatgaggtcttcatgggcattggggggatgaaggctgacctgaggaccctcaaacagctggccatgaactctatcaagtacagtaccctgttggagagtgagaaaaatactttcatggaaatctggaagaagagatgggataagttcatagcagatgtggctacaaagtgaggagaagctagccagccctctacaagctgtcttcttgcacacgctgtcacttcctctcactcgttcttgaatcagctccatgtgcccatgaaatcaatggcctctgtatggagcgaccctgtgagaagcacttggctggctgagcaaattcatcctctggaaatattctctctcagccacagtgacattgaccctcttggttttctcctctctctggccatttcttccagtttccctatttcagagtcttctctctctctgatctctgtgctgtttcctcaggactcagtcctgggctctcttctattctggtctctttatttttttatttttgtattttttcgagatggagttttgctcttgttgcccaggctggagtacaatggtgcgatctcagctcagtgcaacctccgccacccgggttcaggcaattctcatgcatcagcctcccgagtagttggaattataggcatgtgccaccacacccagctgatttttgcatttttagtagagacaggttttcaccatgttggcgaggctggtatccaactcttgacctcaggtgatccactcgccccttagctcccaaagtgctggaattacaggcgttagccaccatgcctggcctattctggtctctttaactctctcctctttatttctcttctctctctgtacacttttcctgggtggtctcatccattcctttgctttttcataccatttatttgttaatgattcccacatttatttatgcacttggagagctcacaggaatctcagaaactgatgaggtacaattctgaaccctcagtctcttccctttaaacctttctttttctctactttaatttttctaaagagtgtcttgctatgttgcccaggctggtctccaactcaagtgatcctcctgccgcagtctcccgaagtgctgggattactgacatgagccaccacactcagccctttaaacctttccctggcctttcccatagctggtgaaggacacctccatccattccacccagttgctcaaagcagaaattttcagtgcaagtcttgatgctgcgccgtcccccactccctacatcagaacgcatccctcatctggactccagcggtggcttcttgatgctgcgcggtcccccactccctacatcagaatgcatcccgcatccagactccagcggtggcgctctacctgcacgctgttgccaagtccaagctaccatactcctgcctgagctatgacaacagcctcctcactgatctcccctttcttccctttgcctcctccagctcatttttcacagtgtagaatgacattttgtttgtttgtttgttttgtttgagatggagtctcgctctgttgcccagggtggagtgcagcggtgcgatctcggctcactgcaacctccacctcccgggttcaagcggattctcgtgcctcagcctcctgagtagctgggattacaggcatgcaccaccatgcccggataatttttgtatttttagtagagatggggtttcactatgttggccaggctggtctcgaacacctgacctcgtggtccacccgcctcggcctcccaaagcactgggattacaggcgtgagccacccggcctggcctagaatgacttttaaaagatcaaattaaatcaggtcactcctttgcttacaacgcagtgcgtttagaggtacaccccatgtctccacagggcacacagcatccgatttaatctggatccattccggcgccttcctctcccagtcacccagagggccccaaccccggcggccctttattcctcagatgtcctcggctctataccgtgtcctgggtctcttctctttctactctgcctggaacattccttgtttccccttttgtcttgcccactcctgtttacccttcaagtttcaagttcatgtcactgtctcagagaggttttcttgtgctcgccctgtttcttctcaggaagccttgctcttttccatcatgcctctaatcacagcttataatcggatatttatttctgtgtctacagtcttgccctgccagactgtaagccccatttgggtcaggcgctcatgattgtttctgattgtttcacgcatgctgctaacccagagcctgggcccaaagctagttagtactcaataaacaatgcattgaaaaaaaaaaaaaaaaaaaaaaaaaaaaaaaaagggcggccgctctagagga

SEQ ID NO: 271 - DNA, 1177 bp, Homo sapiens
ccacgcgtccgccactcagacaccgtgtccccttgcctgggagaggggaagcagatctgaggacatctctgtgccaggccagaaaccgcccacctgcagttccttctccgggatggacgtggggcccagctccctgccccaccttgggctgaagctgctgctgctcctgctgctgctgcccctcaggggccaagccaacacaggctgctacgggatcccagggatgcccggcctgcccggggcaccagggaaggatgggtacgacggactgccggggcccaagggggagccaggaatcccagccattcccgggatccgaggacccaaagggcagatacaagcagaaattccagtcagtgttcacggtcactcggcagacccaccagccccctgcacccaacagcctgatcagattcaacgcggtcctcaccaacccgcagggagattatgacacgagcactggcaagttcacctgcaaagtccccggcctctactactttgtctaccacgcgtcgcatacagccaacctgtgcgtgctgctgtaccgcagcggcgtcaaagtggtcaccttctgtggccacacgtccaaaaccaatcaggtcaactcgggcggtgtgctgctgaggttgcaggtgggcgaggaggtgtggctggctgtcaatgactactacgacatggtgggcatccagggctctgacagcgtcttctccggcttcctgctcttccccgactagggcgggcagatgcgctcgagccccacgggccttccacctccctcagcttcctgcatggacccaccttactggccagtctgcatccttgcctagaccattctccccaccagatggacttctcctccagggagcccaccctgacccacccccactgcaccccctccccatgggttctctccttcctctgaacttctttaggagtcactgcttgtgtggttcctgggacacttaaccaatgccttctggtactgccattcttttttttttttttttcaagtattggaaggggtggggagatatataaataaatcatgaaatcaatacataaaaaaaaaaaaaaaaaaaaaaaaaaaaaaaaaaaaaaaaaaaaaaaaaaaaaaaaaaaaaaaaaaaaaaaaaaaaaaaaaaaaaaaaaaaaaaaaaaaaaaaaaaaaaaaaaaaaa

SEQ ID NO: 272 - DNA, 2196 bp, Homo sapiens
acgcgtccgcccacgcgtccgcccacgcgtccgggaggcctgtctggttattatacagacgcataactggaggtgggatccacacagctcagaacagctggatcttgctcagtctctgccaggggaagattccttggaggaggccctgcagcgacatggagggagctgctttgctgagagtctctgtcctctgcatctggatgagtgcacttttccttggtgtgggagtgagggcagaggaagctggagcgagggtgcaacaaaacgttccaagtgggacagatactggagatcctcaaagtaagcccctcggtgactgggctgctggcaccatggacccagagagcagtatctttattgaggatgccattaagtatttcaaggaaaaagtgagcacacagaatctgctactcctgctgactgataatgaggcctggaacggattcgtggctgctgctgaactgcccaggaatgaggcagatgagctccgtaaagctctggacaaccttgcaagacaaatgatcatgaaagacaaaaactggcacgataaaggccagcagtacagaaactggtttctgaaagagtttcctcggttgaaaagtgagcttgaggataacataagaaggctccgtgcccttgcagatggggttcagaaggtccacaaaggcaccaccatcgccaatgtggtgtctggctctctcagcatttcctctggcatcctgaccctcgtcggcatgggtctggcacccttcacagagggagcagccttgtactcttggaacctgggatggagttgggaatcacagccgctttgaccgggattaccagcagtaccatggactacggaaagaagtggtggacacaagcccaagcccacgatctggtcatcaaaagccttgacaaattgaaggaggtgagggagtttttgggtgagaacatatccaactttctttccttagctggcaatacttaccaactcacacgaggcattgggaaggacatccgtgccctcagacgagccagagccaatcttcagtcagtaccgcatgcctcagcctcacgcccccgggtcactgagccaatctcagctgaaagcggtgaacaggtggagagggttaatgaacccagcatcctggaaatgagcagaggagtcaagctcacggatgtggcccctgtaagcttctttcttgtgctggatgtagtctacctcgtgtacgaatcaaagcacttacatgagggggcaaagtcagagacagctgaggagctgaagaaggtggctcaggagctggaggagaagctaaacattctcaacaataattataagattctgcaggcggaccaagaactgtgaccacagggcagggcagccaccaggagagatatgcctggcaggggccaggacaaaatgcaaacttttttttttttctgagacagagtcttgctctgtcgccaagttggagcttgcagtgagccgagatatcgccactgcactccagcctgggtgacagagcgagactccatctcaaaaaaaaaaaaaaaaaagaatatattgacggaagaatagagaggaggcttgaaggaaccagcaatgagaaggccaggaaaagaaagagctgaaaatggagaaagcccaagagttagaacagttggatacaggagaagaaacagcggctccactacagacccagccccaggttcaatgtcctccgaagaatgaagtctttccctggtgatggtcccctgccctgtctttccagcatccactctcccttgtcctcctgggggcatatctcagtcaggcagcggcttcctgatgatggtcattggggtggttgtcatgtgatgggtcccctccaggttactaaagggtgcatgtcccctgcttgaacactgaagggcaggtggtgggccatggccatggtccccagctgaggagcaggtgtccctgagaacccaaacttcccagagagtatgtgagaaccaaccaatgaaaacagtcccatcgctcttacccggtaagtaaacagtcagaaaattagcatgaaagcagtttagcattgggaggaagctcagatctctagagctgtcttgtcgccgcccaggattgacctgtgtgtaagtcccaataaactcacctactcatcaagcaaaaaaaaaaaaaaaaaaaaaaaaaaaaaaaaaaaaaaaaaaaaaaaa

SEQ ID NO: 273 - DNA, 606 bp, Homo sapiens
  misc_feature (568)..(568): n equals a,t,g, or c
  misc_feature (586)..(586): n equals a,t,g, or c
  misc_feature (605)..(605): n equals a,t,g, or c
gtctgactgtgccctcctacttgggacttttcaatagcttcctctcacctgcaggaaaatgtaatgcttcctagcgtggcttatgagtcccatcatacccagaatactgcttacctctgcagtgcaatttgtctggctctacctcctgagttttgctcaagtacccaccatcatgcttcacatttctaagtttcatctcatgcgttacctctgcttagaaagtccttcatagtttctccccatgggttaactccatgtgttagtttcatctcagtcatttcctcccaaagaattcttcgagtccaacaatgtgtcaagtgctctttttctacatcccaaggcaccctatatgcatctccagcagaatacttattcctttcacattagaatggcctctctctgcctgtcttctctcactgagatagagctccctgtgggcagagtcctcatcttactcatcttggrawctgctggaatctttgggaatctacctagaagagtgccttgcacacaataggsacttaatatgtggttctttttgttcctacactggtcaagctcggtttcngtctttccagcattacanatggtggttccactaactng

SEQ ID NO: 274 - DNA, 1821 bp, Homo sapiens
ccgggtcgacccacgcgtccgttcaaatccacgttgatacaatgaaggtaattaatgatcctatccatggccacattgagctccaccacctcccagctgtttgatgtatcgaagacgttgaaattgaggtgtatcaatgattcggacgaggagagggtggagctcaatgtggccatggataggggtggggtatctagcaggatgtctagttcacgcactgggtgaaaaacaaccagagctgcagataagtgaacgagatgttctctgtgttcagattgctggactttgtcatgatctcggtcatgggccattttctcacatgtttgatggacgatttattccacttgctcgcccggaggtgaaatggacgcatgaacaaggctcagttatgatgtttgagcaccttattaattctaatggaattaagcctgtcatggaacaatatggtctcatccctgaagaagatatttgctttataaaggaacaaattgtaggaccacttgaatcacctgtcgaagattcattgtggccatataaagggcgtcctgaaaacaaaagcttcctttatgagatagtatctaataaaagaaatggcattgatgtggacaaatgggattattttgccagggactgccatcatcttggaatccaaaataattttgattacaagcgctttattaagtttgcccgtgtctgtgaagtagacaatgagttgcgtatttgtgctagagataaggaagttggaaatctgtatgacatgttccacactcgcaactctttacaccgtagagcttatcaacacaaagttggcaacattattgatacaatgattacagatgctttcctcgaagcagatgactacatagagattacaggtgctggaggaaaaaagtatcgcatttctacagcaattgacgacatggaagcctatactaagctgacagataacatttttctggagattttatactctactgatcccaaattgaaagacgcacgagagattttaaaacaaattgaataccgtaatctattcaagtatgtgggtgagacgcagccaacaggacaaataaagattaaaagggaggactatgaatctcttccaaaagaggttgccagtgctaaacccaaagtattgctagacgtgaaactgaaggctgaagattttatagtggatgttatcaacatggattatggaatgcaagaaaagaatccaattgatcatgttagcttctattgtaagactgcccccaacagagcaatcaggattactaaaaaccaggtttcacaacttctgccagagaaatttgcagagcagctgattcgagtatattgtaagaaggtggacagaaagagtttgtatgccgcaagacaatattttgttcagtggtgtgcagacagaaatttcaccaagccgcaggatggcgatgttatagccccactcataacacctcaaaaaaaggaatggaacgacagtacttcagtccaaaatccaactcgcctccgagaagcatccaaaagcagagtccagctttttaaagatgacccaatgtgaatgtctgtagtcagttgtttacaaactccctctcctgcacaattcatttagaggcttcaatcatagaattctgcaaattaatgacaactcatgctttaattttgtattttgaatgtacacgcatgctgaagctaagtaacttttaatcaaagaaataagatggtattaggcaaatcttactatactatgaaaagcattaccttgcctatttttaatattattaaagcctttctccttcaaaaaaaaaaaaaaaaaaaaaaaaaaaa

SEQ ID NO: 275 - DNA, 2032 bp, Homo sapiens
cacgaggagaacagaagaagagaaagctcagcaaattttcttgccatacttcatgacttcactgtggctaagtgtggggaccagacaggactcgtggagacatccaggtgctgaagccttcagctactgtctcagttttttgaagtttagcaatggcgtctttctctgctgagaccaattcaactgacctactctcacagccatggaatgagcccccagtaattctctccatggtcattctcagccttacttttttactgggattgccaggcaatgggctggtgctgtgggtggctggcctgaagatgcagcggacagtgaacacaatttggttcctccacctcaccttggcggacctcctctgctgcctctccttgcccttctcgctggctcacttggctctccagggacagtggccctacggcaggttcctatgcaagctcatcccctccatcattgtcctcaacatgtttgccagtgtcttcctgcttactgccattagcctggatcgctgtcttgtggtattcaagccaatctggtgtcagaatcatcgcaatgtagggatggcctgctctatctgtggatgtatctgggtggtggcttttgtgatgtgcattcctgtgttcgtgtaccgggaaatcttcactacagacaaccataatagatgtggctacaaatttggtctctccagctcattagattatccagacttttatggagatccactagaaaacaggtctcttgaaaacattgttcagccgcctggagaaatgaatgataggttagatccttcctctttccaaacaaatgatcatccttggacagtccccactgtcttccaacctcaaacatttcaaagaccttctgcagattcactccctaggggttctgctaggttaacaagtcaaaatctgtattctaatgtatttaaacctgctgatgtggtctcacctaaaatccccagtgggtttcctattgaagatcacgaaaccagcccactggataactctgatgcttttctctctactcatttaaagctgttccctagcgcttctagcaattccttctacgagtctgagctaccacaaggtttccaggattattacaatttaggccaattcacagatgacgatcaagtgccaacacccctcgtggcaataacgatcactaggctagtggtgggtttcctgctgccctctgttatcatgatagcctgttacagcttcattgtcttccgaatgcaaaggggccgcttcgccaagtctcagagcaaaacctttcgagtggccgtggtggtggtggctgtctttcttgtctgctggactccataccacatttttggagtcctgtcattgcttactgacccagaaactcccttggggaaaactctgatgtcctgggatcatgtatgcattgctctagcatctgccaatagttgctttaatcccttcctttatgccctcttggggaaagattttaggaagaaagcaaggcagtccattcagggaattctggaggcagccttcagtgaggagctcacacgttccacccactgtccctcaaacaatgtcatttcagaaagaaatagtacaactgtgtgaaaatgtggagcagccaacaagcaggggctcttaggcaatcacatagtgaaagtttataagaggatgaagtgatatggtgagcagcggacttcaaaaactgtcaaagaatcaatccagcggttctcaaacggtacacagactattgacatcagcatcacctagaaacttgttagaaatgcaaattctcaagccgcatcccagacttgctgaatcggaatctctgggggttgggacccagcaagggcacttaacaaaccctcgtttctgattaatgctaaatgtaagaatcattgtaaacattagttctatttctatcccaaactaagctatgtgaaataagagaagctactttgtttttaaatgatgttgaatatttgtcgatatttccatcattaaatttttccttagcattgaaaaaaaaaaaaaaaaaa

SEQ ID NO: 276 - DNA, 670 bp, Homo sapiens
  misc_feature (18)..(18): n equals a,t,g, or c
  misc_feature (211)..(211): n equals a,t,g, or c
  misc_feature (223)..(223): n equals a,t,g, or c
aaagaagtagcccccagnagcctccattttgttctgtactaagaaaawttcttctgccttragatgctgttactctytkaaacatgtgctgtgtcaactcagggtgaaatggattaagggctgtgcaagatgtgctttgttaaccagatgcttgaaggcagcatgctcgttaccagtcatcaccactccctaatctcaagtacccagggcncaaacaccgcgnaagctgcagggacctctgcctaggaaagccaggtatgccaaggtttctccccatgtcatagtctgaaatatggcctcgtgagaaggaaagacctgaccgtcccccagcccgacacccttaaagggtctgtgctgaggagggttagtataagaggaaggaacgcctctttgcagttgagacaagaggaaggcatctgtctcctgcctgtccctgggcaatggaatgtctcggtataaaacccgattgtacgttccatctactgagataggggaaaaccgccttagggctggaggtgggacatgcgggcagtaatactgtaaggcattgagatgtttatgtgtatgcatatctaaagcacagcacttaattctttaccttgactatgatgcagagacctttgttcacatgtttatctgctgaccttgtctccactattatccgatgacc

SEQ ID NO: 277 - DNA, 1506 bp, Homo sapiens
  misc_feature (1)..(1): n equals a,t,g, or c
  misc_feature (6)..(6): n equals a,t,g, or c
  misc_feature (1482)..(1482): n equals a,t,g, or c
ncactnttactggaaccctmgtaacggccgccagtgtgctggaattcgccctttttaggtgacactatagaaaggtacgcctgcaggtaccggtccggaattcccgggtcgacccacgcgtccgcctcgctcgggcgcccagtggtcctgccgcctggtctcacctcgccatggttcgtctgcctctgcagtgcgtcctctggggctgcttgctgaccgctgtccatccagaaccacccactgcatgcagagaaaaacagtacctaataaacagtcagtgctgttctttgtgccagccaggacagaaactggtgagtgactgcacagagttcactgaaacggaatgccttccttgcggtgaaagcgaattcctagacacctggaacagagagacacactgccaccagcacaaatactgcgaccccaacctagggcttcgggtccagcagaagggcacctcagaaacagacaccatctgcacctgtgaagaaggctggcactgtacgagtgaggcctgtgagagctgtgtcctgcaccgctcatgctcgcccggctttggggtcaagcagattgctacaggggtttctgataccatctgcaagccctgcccmsycggcwycttctccaatgtgtcatctgctttcgaaaaatgtcacccttggacaagctgtgagaccaaagacctggttgtgcaacaggcaggcacaaacaagactgatgttgtctgtggtccccaggatcggctgagagccctggtggtgatccccatcatcttcgggatcctgtttgccatcctcttggtgctggtctttatcaaaaaggtggccaagaagccaaccaataaggccccccaccccaagcaggaaccccaggagatcaattttcccgacgatcttcctggctccaacactgctgctccagtgcaggagactttacatggatgccaaccggtcacccaggaggatggcaaagagagtcgcatctcagtgcaggagagacagtgaggctgcacccacccaggagtgtggccacgtgggcaaacaggcagttggccagagagcctggtgctgctgctgctgtggcgtgagggtgaggggctggcactgactgggcatagctccccgcttctgcctgcacccctgcagtttgagacaggagacctggcactggatgcagaaacagttcaccttgaagaacctctcacttcaccctggagcccatccagtctcccaacttgtattaaagacagaggcagaagtttggtggtggtggtgttggggtatggtttagtaatatccaccagaccttccgatccagcagtttggtgcccagagaggcatcatggtggcttccctgcgcccaggaagccatatacacagatgcccattgcagcattgtttgtgatagtgaacaactggaagctgcttaactgtccatcagcaggagactggctaaataaaattagaatatatttatacaaanaaaaaaaaaaaraagggcggccgc

SEQ ID NO: 278 - DNA, 2697 bp, Homo sapiens
acgcgtccgcctggatagcagctttgtttgtagaggcaggtggtgggagagaccctaggacagcctgagagtaactggacctggtattggtgcggagtggggaatatcccttgtctaaatgcagagcagctgagagaagttagcggggctcttcctccgttctcattgtttcctgctttccttccccacccaccccttcctcagcactctgtgttgtagcctgtactatcctgcttcaagcctccgtgtcccttgtaccttccccctaccttgagttgccagttctttactccctcaaatgttcccatgccacctctggggtttctgttatctgacatccctggctgctttcctggtagatgccattcccagagaggccaacagcgttcccaggcgtggctggctggtccgcatctctcagactcactctgccaggctacagttttgagaataccttttttgttgttgttttgtacctggagaactttttatgaatgagtaaatcttcagaaaggaattcctccacccttactgggttattgtcaggtgtaaacggcctttcagctgagcaatgttcctatgagaaggaagccatttctcttggctcatgaacactgccttttgggtagtatacccacacccagatctgtgaagagacctggaattgaagtctccatgtcgtcaggacttggtggcatgtggatcttgcttgacttgggaaaagagagggtggtggtgaactaataattatggagtccccctaatgtgtcgaacacaatgctagatgatttccatgataataattactcatacttgtgctaagcacttgcgatatcgtacttctcacaacagtccatgaggtactgattattatccccattttctcatgagactaaagctccgagctctaggatagtatacagtggcaagaggaatttacatccaagcactcagatttcaaagcccacattcttaactaccggactattcatattacagagcaggaaaagggtctcagacaggttaagcaacctgcccagagtcacacagctaatgagtagcagaatcaggattcaaacccagagctgtcaaaagcaaaccttatgttccttccactgtcccctgcttccttgcccttcagaaaggtcttggaaacaggggccagaggatgtggtagccacttcactggtgttctgtgtctgaatgggactttctcacaggcaggccatgctgggacctcagccatgggggtggccagggaggtggttgagcagaaggatagctggggacactgactgggggtagagtcacccagtgtctttagacatcctgctgtctaaagcactgtgtccaaagggtatggcacacttatatggacaggtcaccattccaaacaaggaggcccagtgtgtcaataggagaggtcctaaagcaacaaaaagggcggggtgtcttggatgggcttcaggaagggaaagaccgttgtgtctggagctcagagaatgggggctggtgtttgagatgaggctggagattgggcatggcatcctcacgcatgttaaggaattggggactttatccttaacatcctggaagccagtgatcccatggagagtgagaagatctgatctgtgtttcaaaggtcacttgactgccgagcagctggaggcgagttgctcctttaggagactgctgcagttgcctgggtgagaggctagaggggtctggtctatagcagtggcaggggagatggaaagaagagaatgatttgaggggcattcggggggcaaaatcaacaggacctggggggagacgaagggatcaagaatgatgcccagattctgggtgagtggcagtgctgggattgcaggcacacgccaccacgcccggctggtttttgtatttttagtagagacggggtttcaccatgtcagccaggcttttcttgaacttctgatctcaagtgatcctcccgcctcagcctcccaaattgctgggattacaggcgtgagccaccacgcccacctgtaaccattatttttaagattgctaccattggatagttctgtcatggtccaacttttggatatttaaaattgatccctgtgtggctaacagaattaatgtttccaaaaatgttgaaaattatatagttctcttaattccccacctctaactatatttttgggttatttctttaggaacagatgcccaggagtcatattactgagaatctagaaatcttttgcaaagttcttgttatattgccaaattgcttcccaaaagggttgttctaaaccataatttcaccagcaatgtaggggagaaccatttttatgctgcccttgtgagaattgggtatgaaaacatttttaaaatgatttttgatgaggtgaaaataatatttgaatatattttaatttgcctttcccccacttatagtgagcttaaacattttttccttttcctagctgtatttctccctttgttattcgttcttttgtccatttatctactggggagatggggagtgttatctttttagtttatcagttatttgcattttaaatataaccatttgccatattttaacaacgatttttccattaaataattctttttataaaaaaactttaaaaaaaaaaaaaaaaaaaaaaaaaaaaaaaaaaaaaaaaaaaaaaaaaaaaaaaaaaaaaa

SEQ ID NO: 279 - DNA, 3203 bp, Homo sapiens
ggaaggaccacagctcctcccgtgcatccactcggcctgggaggttctggattttggctgtcgagggagtttgcctgcctctccagagaaagatggtcatgaggcccctgtggagtctgcttctctgggaagccctacttcccattacagttactggtgcccaagtgctgagcaaagtcgggggctcggtgctgctggtggcagcgcgtccccctggcttccaagtccgtgaggctatctggcgatctctctggccttcagaagagctcctggccacgtttttccgaggctccctggagactctgtaccattcccgcttcctgggccgagcccagctacacagcaacctcagcctggagctcgggccgctggagtctggagacagcggcaacttctccgtgttgatggtggacacaaggggccagccctggacccagaccctccagctcaaggtgtacgatgcagtgcccaggcccgtggtacaagtgttcattgctgtagaaagggatgctcagccctccaagacctgccaggttttcttgtcctgttgggcccccaacatcagcgaaataacctatagctggcgacgggagacaaccatggactttggtatggaaccacacagcctcttcacagacggacaggtgctgagcatttccctgggaccaggagacagagatgtggcctattcctgcattgtctccaaccctgtcagctgggacttggccacagtcacgccctgggatagctgtcatcatgaggcagcaccagggaaggcctcctacaaagatgtgctgctggtggtggtgcctgtctcgctgctcctgatgctggttactctcttctctgcctggcactggtgcccctgctcagggaaaaagaaaaaggatgtccatgctgacagagtgggtccagagacagagaacccccttgtgcaggatctgccataaaggacaatatgaactgatgcctggactatcagtaaccccactgcacaggcacacgatgctctgggacataactggtgcctggaaatcaccatggtcctcatatctcccatgggaatcctgtcctgcctcgaaggagcagcctgggcagccatcacaccacgaggacaggaagcaccagcacgtttcacacctcccccttccctctcccatcttctcatatcctggctcttctctgggcaagatgagccaagcagaacattccatccaggacactggaagttctccaggatccagatccatggggacattaatagtccaaggcattccctcccccaccactattcataaagtattaaccaactggcaccaaggaattgcctccagcctgagtcctaggctctaaaagatattacatatttgaactaatagaggaactctgagtcacccatgccagcatcagcttcagccccagaccctgcagtttgagatctgatgcttcctgagggccaaggcattgctgtaagaaaaggtctagaaataggtgaaagtgagaggtgggggacaggggtttctctttctggcctaaggactttcaggtaatcagagttcatgggccctcaaaggtaaattgcagttgtagacaccgaggatggttgacaacccatggttgagatgggcaccgttttgcaggaaacaccatattaatagacatcctcaccatctccatccgctctcacgcctcctgcaggatctgggagtgagggtggagagtctttcctcacgctccagcacagtggccaggaaaagaaatactgaatttgccccagccaacaggacgttcttgcacaacttcaagaaaagcagctcagctcaggatgagtcttcctgcctgaaactgagagagtgaagaaccataaaacgctatgcagaaggaacattatggagagaaagggtactgaggcactctagaatctgccacattcattttcaaatgcaaatgcagaagacttaccttagttcaaggggaggggacaaagaccccacagcccaacagcaggactgtagaggtcactctgactccatcaaactttttattgtggccatcttaggaaaatacattctgcccctgaatgattctgtctagaaaagctctggagtattgatcactactggaaaaacacttaaggagctaaacttaccttcggggattattagctgataaggttcacagtttctctcacccaggtgtaactggattttttctggggcctcaatccagtcttgataacagcgaggaaagaggtattgaagaaacaggggtgggtttgaagtactattttcccagggtggcttcaatctccccacctaggatgtcagccctgtccaaggaccttccctcttctccccagttcctgggcaatcacttcaccttggacaaaggatcagcacagctggcctccagatccacatcaccactcttccactcgattgttcccagatcctccctgcctggcctgctcagaggttccctgttggtaacctggctttatcaaattctcatccctttcccacacccacttctctcctatcaccttcccccaagattacctgaacagggtccatggccactcaacctgtcagcttgcaccatccccacctgccacctacagtcaggccacatgcctggtcactgaatcatgcaaaactggcctcagtccctaaaaatgatgtggaaaggaaagcccaggatctgacaatgagccctggtggatttgtggggaaaaaatacacagcactccccacctttctttcgttcatctccagggccccacctcagatcaaagcagctctggatgagatgggacctgcagctctccctccacaaggtgactcttagcaacctcatttcgacagtggtttgtagcgtggtgcaccagggccttgttgaacagatccacactgctctaataaagttcccatccttaatgactcacttgtcaactagtggactaattaaccctccaccaaaaaaacacaaagtgcttctgtgagaccaattttgtgctaatgagcattgagactgatgctttgtaagtcacmccmcaacaaatattgattgagggcgctgcatgtgctgggtacatttcttggcacttgggaatcagtagtcaagcgaaacccttgcctttgagagtttatggtctggataatataaataaacaagtaagcataaaaaaaaaaaaaaaaaaaaaa

SEQ ID NO: 280 - DNA, 1344 bp, Homo sapiens
cacgcgtccggcgcggccgttgggcgtgcagcggcgccagtcggcggacgaggggcccccgggagttgctggactgagacatgagcctccaactgtgtggttgggctcggtagcacatcgtgggacttgggtgtgcgcccacagatggtttggccctgcagtgaccagagcagcccaagccgccaccatggtgaaattgctagtggccaaaatcctgtgcatggtgggcgtgttcttcttcatgctgctcggctccctgctccccgtgaagatcatcgagacagattttgagaaggcccatcgctcgaaaaagatcctctctctctgcaacacctttggaggaggggtgtttctggccacgtgcttcaacgctctgctgcccgctgtgagggaaaagctccagaaggtcctgagcctcggccacatcagcaccgactacccgctggccgaaaccatcctcctgctgggcttcttcatgaccgtcttcctggagcagctgatcctgaccttccgcaaggagaagccgtccttcatcgacctggataccttcaacgccggatcggacgtgggcagcgactcggagtatgagagccccttcatggggggcgcgcggggccacgcgctgtacgtggagccccacggccacggccccagcctgagcgtgcagggcctctcgcgcgccagccccgtgcgcctgctcagcctggccttcgcgctgtcggcccactcggtctttgagggcctggccctgggcctgcaggaggagggggagaaagtggtgagcctgttcgtgggggtggccgtccacgagacactggtggccgtggccctgggcatcagcatggcccggagtgccatgcccctgcggtacgcggccaagctggcggtcaccgtaagcgccatgatccccctgggcatcggcctgggcctgggcattgagagcgcccagggcgtgccgggcagcgtggcgtccgtgctgctgcagggcctggagggcggcaccttcctcttcatcaccttcctggagatctggcaaggagctggaggagaagagtgaccgctggtaaggcctcttctgggtgggctacaccgtctggccgggatggcttctcaagtggtgagcggctcgcattggcctgccgggagccccgggccggacacaggccgcgtcccccggccgcgcgtcccccaagagcgagcactgtggccctgggccaccacctgtgcacaaggggcctcccgggaccaggctgtgcccccgatcctacaccctgagcctcagagcactgctactttttaaaatacttctttctcttaaaaaaaaaaaaaaaaaaaaaaaaaaaa

SEQ ID NO: 281 - DNA, 4476 bp, Homo sapiens
  misc_feature (1837)..(1837): n equals a,t,g, or c
catcttgcgcgcagctggagtcggtgcctgaggttgcagccgagagtgtgcgccagcccgcggcccagccgaagctctttcccgccgcctctccgcgcctcgcccaggttcagcyccgcctgaccctccgcttggcacggtcccctgaccctcagtccggccyggtccggcctyccagccgccccggggacgatgaacggaggataaatggtgcccaaggcagacagcggcgccttcctgctgctcttcctgctcgtgctcactgtcaccgagccgctgcggccagagctgcggtgcaaccctgggcagtttgcgtgtcgcagcggcamcatccagtgcatccccctcccctggcagtgtgacggctgggcgamttgcgaggatgagagcgacgaagccaaytgtccagaagtgamcggggargtgcgtcctcatcatgggaaggaggctgtggatccgcggcaggggcgggccagaggaggcgacccttcgcacttccacgcggtgaacgtggcgcaccgttcgcttcagcagtttcctagggaagtgcccgacagggtggcaccactacgaaggcacggccagctgctaccgggtctacctgagcggggagaactactgggatgccgcgcagacctgccagcgcctgaatggctctctcgccaccttctccactgaccaggagctgcgctttgtcctggcccaggaatgggaccagcccgagcggagctttggttggaaggaccagcgcaagttgtgggttggctatcagtatgttatcactggccggaaccgctccttggaaggtcgctgggaggtggcattcaaaggctcttcagaggtgttcctgcccccagaccccatctttgcctcggccatgtctgagaacgacaacgtgttctgtgcccagcttcagtgcttccatttccccacyctgcggcaccacgacctccacagctggcacgccgagagctgctacgagaagtcttcatttctgtgtaaaagaagtcaaacatgtgttgacatcaaggacaacgtggtggatgaagggttctacttcacccctaagggggacgacccatgcctgagctgcacctgccatggaggggagcctgagatgtgtgtggctgctctctgtgagaggccccagggctgccaacagtaccgcaaggaccccaaagagtgctgcaagttcatgtgtctggacccagatggcaacagtctgtttgactccatggccagcgggatgcgcctggtcgtcagctgcatctcctccttcctcatcctgtcactgctgctcttcatggtccaccggctgcgccagcggcgccgggagcgcatcgagtccctgattggagcaaacttgcaccacttcaacctcggccgcaggatccctggctttgattacggcccagacgggtttggcacgggcctcacgccgctgcatctttctgacgacggagagggtgggactttccatttccacgaccctccacctccctacacggcatacaagtacccggacatcggccagcccgacgaccctccgccgccctacgaggcctccatccacccggacagtgtgttctatgaccctgcagacgatgatgcttttgagcctgyggaggtcagcctgccagcccctggggatggtgggagtgaaggtgcattactccggcgcctggagcagcctctgcccactgcgggggcctctctggcagacctggaagactctgccgacagcagcagcgccctgctcgtgccccctgaccctgcccagagcgggagcaccccagctgcagaggcactgccagggggtggccgccacagccgcagntccctcaatactgtggtgtagacggcctggcctgtaccccaacggtctgggagcacctgtctgttgtagaaaacaccggtccctggggagamttgaaaggcccctgtcccagcctggacgccacgcactgccgcamgtcactggcgggctcgcgtgtgtacatagagaccacagcccgccttctgccaaaagaagtgatggcctgcaccgagcttccttgagggcttcagaaacatgcatagctttggatcactgtcttctcctttataaatggcagaagagtgacaaaattcattcagaccgcacatgttagaggcagggaatgaagaaggtactktgggccatggccacacctgatgcgtttttggtgggcttacttggtgcagtgtgctgtccagagagacctgctgacccagtctgggacaggcacagtgggagctgccacagtgccccttgctggccgccctcaggagggggcctctggaccgtcagtgtggcgtaggcagtgggtctgcttcagggaggcagcctcttgactttgtcacaacggttgcactgaagatggcccccacaagcccagttgtgaatatcaaggtgaccctgcccctggctgggagctcccctggggctctggaacctgaagccctgagaaggagagcttggaaggaggttgagctcttcactgtgtctttccatctgggctctgcagcccagctctgtggcaggaggcctgaccccaccccatcagtccctctcccagcattgctgtgcatggctccctcaggaagaagctctggagtggggccgaggccccagatgctctgctggggtctggggactgagctgcctcctgtctctccactctggagccctgggctcttgcctcctgttgaattgcccctgggcctgcccccggccccatttgtgccataaagggttgcttcattgcaggaggggtggctgaaaccaccatcctgggctgcatctatctccttaaagtccactccttacatcaccgccactactgcagctcagtgcccagcggccgcatgcacacctcccggcccckcctcagcagcgcaggggctgggggcccttcctggcacccttttgcctgacggaccctgttgcctgctcctgggcagtggttttgttgcctgacacagggcctttaacatttctgaggtttggagattaagcgggttctgtgcgatttttagcacatccatatcttttctacgttgaatgtctggatctttcctttgtatgtttgtgtctctgtgtgtgtatgtggccaagcgtctgcaggtgagggtggcacatggaacttcacgggtcactgggggcccactcttccagggtcatcgatgcatcctgggctgtgctgaggcagtgctgtctcgctcagtctttccagaccagcggggcagcacctgggaggcctgtctgaagcatgcagttctgtggtgctgctcggggatggactccatgcacagtccacttcttgacacattctcacactgtggctggagacccattttttccatcccatgtggaatgagaatcttgagttgcccacagacagacttgacctttgtgccagaactgtccagagctgtgagttttgttactgaattgcctgtccctgagcttggcctgctggagcatgatgctggaggctgtgtgcgggcaggcttgtgctccccttggagaagggctgctacttaacaaggaagtcctggccacaagagtcccctactggctgcagaggacgaagcaggaagcatgccgtggatcccacatgcactggggcagggcagccaggttccagagcagcaggcatgtgcattatgggtgccaggtggccagtgagggcccgaggaccacgcagcagagtcccccacgggcctgagcctgagagctcagaggattcctgccaggcctcagaactgtgtgtgcgggacagggtggctggcacgagatgtgtgggactgggacgcttcctttggggaccagaggaacattaggggccggtcagacacgtagggggcagtgaggaaacggggtaaagtggaccatgcaggctgcagagggtgggccttgggctggccggggttgctgggtggccccttccccatgggcctccacaagcactcaggccactggcacgttgggccaggcagaaggtccacatggcagggctgcctggaacaccgctgccactgtggctccaggaggcccttgggagcatgaggagagctggactcgctcatctgttcttgcaccaccatccagaatgccccctttgcaaggcctgctgcagtccccagtctgaccagcaagtcccggggtcacccttgctgaaccttgtgctccaggggtcctcctcctctaggaccagcttgccacggtttctcagagcccaggtgccctctgacctgccatgcggaggtgggatttgatactgtacattgtcttgatgcctgtttttttatgttttcattaagggtttttagtttttggttgggttgacactaacttttcttaagatgctgtgagaatcatttcatccaaatgccaaataaacttgtgttccggaaaaaaaaaaaaaaaaaaaaaaaaaaaaaaaaaaaaaaaac

SEQ ID NO: 282 - DNA, 1297 bp, Homo sapiens
aagctctaatacgactcactatagggaaagctggtacgcctgcaggtaccggtccggaattcccgggtcgacccacgcgtccgcactcagacaccgtgtcctccccacgcgtccgggggaagcagatctgaggacatctctgtgccaggccagaaaccgcccacctgcagttccttctccgggatggacgtggggcccagctccctgccccaccttgggctgaagctgctgctgctcctgctgctgctgcccctcaggggccaagccaacacaggctgctacgggatcccagggatgcccggcctgcctggggcaccagggaaggatgggtacgacggactgccggggcccaagggggagccaggaatcccagccattcccgggatccgaggacccaaagggcagaagggagaacccggcttacccggccatcctgggaaaaatggccccatgggaccccctgggatgccaggggtgcccggccccatgggcatccctggagagccaggtgaggagggcagatacaagcagaaattccagtcagtgttcacggtcactcggcagacccaccagccccctgcacccaacagcctgatcagattcaacgcggtcctcaccaacccgcaggagattatgacacgagcactggcaagttcacctgcaaagtccccggcctctactactttgtctaccacgcgtcgcatacagccaacctgtgcgtgctgctgtaccgcagcggcgtcaaagtggtcaccttctgtggccacacgtccaaaaccaatcaggtcaactcgggcggtgtgctgctgaggttgcaggtgggcgaggaggtgtggctggctgtcaatgactactacgacatggtgggcatccagggctctgacagcgtcttctccggcttcctgctcttccccgactagggcgggcagatgcgctcgagacccacgggccttccacctccctcagcttcctgcatggacccaccttactggccagtctgcatccttgcctagaccattctcccctccagggagcccaccctgacccacccccactgcaccccctccccatgggttctctccttcctctgaacttctttaggagtcactgcttgtgtggttcctgggacacttaaccaatgccttctggtactgccattctttttttttttttttcaagtattggaaggggtggggagatatataaataaatcatgaaatcaaaaaaaaaaaaaaaaaaaaaaaaaaaaaaaaaaaaaaaaaaaaaaaaaaaaaaaaaaaaaaaaaaaaaaaaaaaa

SEQ ID NO: 283 - DNA, 1597 bp, Homo sapiens
tcgacccacgcgtccgagctggagagcagcatggaggcgtcctgggggagcttcaacgctgagcggggctggtatgtctctgtccagcagcctgaagaagcggaggccgaagagttgagtccgttgctaagcaacgaacttcacagacagcgatccccaggtgtttcatttggtttatcagtgtttaatttgatgaatgccatcatgggaagtggcatccttggcttagcttatgttatggctaataccggtgtctttggatttagcttcttgctgctgacagttgctctcctggcttcttactcagtccatcttctgcttagtatgtgtattcagacagctgtaacatcttatgaagatcttggactctttgcatttggattacctggaaagttggtggtggcaggcaccataataattcagaatattggagctatgtcatcttatcttttaattattaaaacagagcttcctgctgctattgcagaatttttgactggagactatagtagatattggtatcttgatggacaaacactactaataatcatatgtgttggcattgtgttccctcttgcacttcttcccaaaataggctttcttggctacacaagtagtttatcatttttctttatgatgttctttgctcttgtggtaataattaaaaaatggtccatcccttgtcctctgacattaaattatgtagagaaaggcttccagagtgcttatgccttaccaaccatggctttttcatttctctgccatacctcaatattgcccatatactgtgaacttcaaagtccttcaaagaaaagaatgcagaatgttaccaatacagcaattgctttaagttttctcatttattttatatctgcactctttgggtacctcactttttatgacaaagtggagtcagaattactaaaaggttatagtaaatacttatcacatgatgttgttgtcatgactgtgaagttatgcatactatttgctgtgcttttgacagtccctctaatccacttccctgccagaaaagctgtaacaatgatgtttttctccaattttccattctcatggattcgccattttttgatcactctagcactcaatattatcatcgttttacttgcaatatatgttcctgacattagaaatgtatttggtgtagttggtgccagtacatcaacatgtttgatttttatattcccaggactattttatcttaaacttagcagagaggattttctgtcatggaaaaagcttggggttggcgtgcagtggtgtgatctcagctcattgcaacctctgcctcccggactcaagcaatcctcccacctcagcctccagagtagctgagactacaggaagagataccatggagatgtgcacccagaggaaaggccacgcaaggacacagcaagaaggcaactgtttacaagccaagggaagaggcctcaggagaaccaaacgtgtccacaccttgatcttgcacttcccaacctccagaactgtgagcaaataaatgatgttgtttaatcaaaaaaaaaaaaaaaaaaaaaaaaaaaaaaaaaaaaaaaaaaaaaaaaaaaaaaaaaaa

SEQ ID NO: 284 - DNA, 1645 bp, Homo sapiens
gcggtggtatccatttcagtcaccatcttctgctttcagaccaaggtggacttcacctcgtgcacaggcctcttctgtgtcctgggaattgtgctcctggtgactgggattgtcactagcattgtgctctacttccaatacgtttactggctccacatgctctatgctgctctgggggccatttgtttcaccctgttcctggcttacgacacacagctggtcctggggaaccggaagcacaccatcagccccgaggactacatcactggcgccctgcagatttacacagacatcatctacatcttcacctttgtgctgcagctgatgggggatcgcaattaaggagcaagcccccattttcacccgatcctgggctctcccttccaagctagagggctgggccctatgactgtggtctgggctttaggcccctttccttccccttgagtaacatgcccagtttcctttctgtcctggagacaggtggcctctctggctatggatgtgtgggtacttggtggggacggaggagctagggactaactgttgctcttggtgggcttggcagggactaggctgaagatgtgtcttctccccgccacctactgtatgacaccacattcttcctaacagctggggttgtgaggaatatgaaaagagcctattcgatagctagaagggaatatgaaaggtagaagtgacttcaaggtcacgaggttcccctcccacctctgtcacaggcttcttgactacgtagttggagctatttcttcccccagcaaagccagagagctttgtccccggcctcctggacacataggccattatcctgtattcctttggcttggcatcttttagctcaggaaggtagaagagatctgtgcccatgggtctccttgcttcaatcccttcttgtttcagtgacatatgtattgtttatctgggttagggatgggggacagataatagaacgagcaaagtaacctatacaggccagcatggaacagcatctcccctgggcttgctcctggcttgtgacgctataagacagagcaggccacatgtggccatctgctccccattcttgaaagctgctggggcctccttgcaggcttctggatctctggtcagagtgaactcttgcttcctgtattcaggcagctcagagcagaaagtaaggggcagagtcatacgtgtggccaggaagtagccagggtgaagagagactcggtgcgggcagggagaatgcctgggggtccctcacctggctagggagataccgaagcctactgtggtactgaagacttctgggttctttccttctgctaacccagggagggtcctaagaggaaggtgacttctctctgtttgtcttaagttgcactgggggatttctgacttgaggcccatctctccagccagccactgccttctttgtaatattaagtgccttgagctggaatggggaagggggacaagggtcagtctgtcgggtgggggcagaaatcaaatcagcccaaggatatagttaggattaattacttaatagagaaatcctaactatatcacacaaagggatacaactataaatgtaataaaatttatgtctagaagttaaaaaaaaaaaaaaaaaaaaaaaaaaaaa

SEQ ID NO: 285 - DNA, 2766 bp, Homo sapiens
  misc_feature (680)..(680): n equals a,t,g, or c
  misc_feature (2745)..(2745): n equals a,t,g, or c
  misc_feature (2750)..(2750): n equals a,t,g, or c
atatagagcaggcgccgcgggtcgcagcacagtgcggagaccgcagccccggagcccgggccagggtccacctgtccccgcagcgccggctcgcgccctcctgccgcagccaccgagccgccgtctagcgccccgacctcgccaccatgagagccctgctggcgcgcctgcttctctgcgtcctggtcgtgagcgactccaaaggcagcaatgaacttcatcaagttccatcgaactgtgactgtctaaatggaggaacatgtgtgtccaacaagtacttctccaacattcactggtgcaactgcccaaagaaattcggagggcagcactgtgaaatagataagtcaaaaacctgctatgaggggaatggtcacttttaccgaggaaaggccagcactgacaccatgggccggccctgcctgccctggaactctgccactgtccttcagcaaacgtaccatgcccacagatctgatgctcttcagctgggcctggggaaacataattactgcaggaacccagacaaccggaggcgaccctggtgctatgtgcaggtgggcctaaagccgcttgtccaagagtgcatggtgcatgactgcgcagatggaaaaaagccctcctctcctycagaagaattaaaaaaaaaaaaaaaatttcagtgtggccaaaagacttttgangccccgctttaarattattgggggagawttcaccaccatcgagaaccagccctggtttgcggccatctacaggaggcaccgggggggctctgtcacctacgtgtgtggaggcagcctcatcagcccttgctgggtgatcagcgccacacactgcttcattgattacccaaagaaggaggactacatcgtctacctgggtcgctcaaggcttaactccaacacgcaaggggagatgaagtttgaggtggaaaacctcatcctacacaaggactacagcgctgacacgcttgctcaccacaacgacattgccttgctgaagatccgttccaaggagggcaggtgtgcgcagccatcccggactatacagaccatctgcctgccctcgatgtataacgatccccagtttggcacaagctgtgagatcactggctttggaaaagagaattctagtaagtgacaattgcgactgacttagaaggtcctgaggagtgttttgacctgaaaatgagcccagtgtgatcaagggaagactgcagagttagaggtgggagcactgaggcggtggcagatgggtccagggatggatgaagagtgttgtttagggagcgatgggctgcaaaggtaaatagatggtaggggctataggtggagtaaaggctcagatttgcatggaagagaataagggccttccctggtagagatactttatggttcccctctctggcagactcccagtggacagataaatcttgatgcaaacgcctccctgttttctccacctagccgactatctctatccggagcagctgaaaatgactgttgtgaagctgatttcccaccgggagtgtcagcagccccactactacggctctgaagtcaccaccaaaatgctgtgtgctgctgacccacagtggaaaacagattcctgccagggagactcagggggacccctcgtctgttccctccaaggccgcatgactttgactggaattgtgagctggggccgtggatgtgccctgaaggacaagccaggcgtctacacgagagtctcacacttcttaccctggatccgcagtcacaccaaggaagagaatggcctggccctctgagggtccccagggaggaaacgggcaccacccgctttcttgctggttgtcatttttgcagtagagtcatctccatcagctgtaagaagagactgggaagataggctctgcacagatggatttgcctgtgccacccaccagggygaacgacaatagctttaccctcaggcataggcctgggtgctggctgcccagacccctctggccaggatggaggggtggtcctgactcaacatgttactgaccagcaacttgtctttttctggactgaagcctgcaggagttaaaaagggcagggcatctcctgtgcatgggtgaagggagagccagctcccccgacggtgggcatttgtgaggcccatggttgagaaatgaataatttcccaattaggaagtgtaacagctgaggtctcttgagggagcttagccaatgtgggagcagcggtttggggagcagagacactaacgacttcagggcagggctctgatattccatgaatgtatcaggaaatatatatgtgtgtgtatgtttgcacacttgtgtgtgggctgtgagtgtaagtgtgagtaagagctggtgtctgattgttaagtctaaatatttccttaaactgtgtggactgtgatgccacacagagtggtctttctggagaggttataggtcactcctggggcctcttgggtcccccacgtgacagtgcctgggaatgtattattctgcagcatgacctgtgaccagcactgtctcagtttcactttcacatagatgtccctttcttggccagttatcccttccttttagcctagttcatccaatcctcactgggtggggtgaggaccactccttacactgaatatttatatttcactatttttatttatatttttgtaattttaaataaaagtgatcaataaaatgtgatttttctgatgaaaaaaaaaaaaaaaaamaggggggnccggnaccaattcgccctaaa

SEQ ID NO: 286 - DNA, 1838 bp, Homo sapiens
cccacgcgtccgtaagtataaagccctagatctaagcttctctgtcttcctccctccctcccttcctcttactctcattcatttcatacacactggctcacacatctactctctctctctatctctctcagaatgacaattctaggtacaacttttggcatggttttttctttacttcaagtcgtttctggagaaagtggctatgctcaaaatggagacttggaagatgcagaactggatgactactcattctcatgctatagccagttggaagtgaatggatcgcagcactcactgacctgtgcttttgaggacccagatgtcaacaccaccaatctggaatttgaaatatgtggggccctcgtggaggtaaagtgcctgaatttcaggaaactacaagagatatatttcatcgagacaaagaaattcttactgattggaaagagcaatatatgtgtgaaggttggagaaaagagtctaacctgcaaaaaaatagacctaaccactatagttaaacctgaggctccttttgacctgagtgtcatctatcgggaaggagccaatgactttgtggtgacatttaatacatcacacttgcaaaagaagtatgtaaaagttttaatgcacgatgtagcttaccgccaggaaaaggatgaaaacaaatggacgcatgtgaatttatccagcacaaagctgacactcctgcagagaaagctccaaccggcagcaatgtatgagattaaagttcgatccatccctgatcactattttaaaggcttctggagtgaatggagtccaagttattacttcagaactccagagatcaataatagctcaggattaagcctatcgtatggcccagtctccccgatcataagaagactctggaacatctttgtaagaaaccaagaaaaaatttaaatgtgagtttcaatcctgaaagtttcctggactgccagattcatagggtggatgacattcaagctagagatgaagtggaaggttttctgcaagatacgtttcctcagcaactagaagaatctgagaagcagaggcttggaggggatgtgcagagccccaactgcccatctgaggatgtagtcatcactccagaaagctttggaagagattcatccctcacatgcctggctgggaatgtcagtgcatgtgacgcccctattctctcctcttccaggtccctagactgcagggagagtggcaagaatgggcctcatgtgtaccaggacctcctgcttagccttgggactacaaacagcacgctgccccctccattttctctccaatctggaatcctgacattgaacccagttgctcagggtcagcccattcttacttccctgggatcaaatcaagaagaagcatatgtcaccatgtccagcttctaccaaaaccagtgaagtgtaagaaacccagactgaacttaccgtgagcgacaaagatgatttaaaagggaagtctagagttcctagtctccctcacagcacagaaaagccaagtatgggctgttcagaggtgcacacctgcattttcttagctcttctagaggggctaagagacttggtacgggccaggaagaatatgtggcagagctcctggaaatgatgcagattaggtggcatttttgtcagctctgtggtttattgttgggactattctttaaaatatccattgttcactacagtgaagatctctgatttaaccgtgtactatccacatgcattacaaacatttcgcagagctgcttagtatataagcgtacaatgtatgtaataaccatctcatatttaattaaatggtatagaagaacaaaaaaaaaa

SEQ ID NO: 287 - DNA, 4188 bp, Homo sapiens
ccacgcgtccgcccacgcgtccggaacgttcgctcgctgcgtccccagccggggccgagccctccgcgacgccacccgggccatgggggccgcacgcagcccgccgtccgctgtcccggggcccctgctggggctgctcctgctgctcctgggcgtgctggccccgggtggcgcctccctgcgactcctggaccaccgggcgctggtctgctcccagccggggctaaactgcacggtcaagaatagtacctgcctggatgacagctggattcaccctcgaaacctgaccccctcctccccaaaggacctgcagatccagctgcactttgcccacacccaacaaggagacctgttccccgtggctcacatcgaatggacactgcagacagacgccagcatcctgtacctcgagggtgcagagttatctgtcctgcagctgaacaccaatgaacgtttgtgcgtcaggtttgagtttctgtccaaactgaggcatcaccacaggcggtggcgttttaccttcagccactttgtggttgaccctgaccaggaatatgaggtgaccgttcaccacctgcccaagcccatccctgatggggacccaaaccaccagtccaagaatttccttgtgcctgactgtgagcacgccaggatgaaggtaaccacgccatgcatgagctcaggcagcctgtgggaccccaacatcaccgtggagaccctggaggcccaccagctgcgtgtgagcttcaccctgtggaacgaatctacccattaccagatcctgctgaccagttttccgcacatggagaaccacagttgctttgagcacatgcaccacatacctgcgcccagaccagaagagttccaccagcgatccaacgtcacactcactctacgcaaccttaaagggtgctgtcgccaccaagtgcagatccagcccttcttcagcagctgcctcaatgactgcctcagacactccgcgactgtttcctgcccagaaatgccagacactccagaaccaattccggactacatgcccctgtgggtgtactggttcatcacgggcatctccatcctgctggtgggctccgtcatcctgctcatcgtctgcatgacctggaggctagctgggcctggaagtgaaaaatacagtgatgacaccaaatacaccgatggcctgcctgcggctgacctgatccccccaccgctgaagcccaggaaagtctggatcatctactcagccgaccaccccctctacgtggacgtggtcctgaaattcgcccagttcctgctcaccgcctgcggcacggaagtggccctggacctgctggaagagcaggccatctcggaggcaggagtcatgacctgggtgggccgtcagaagcaggagatggtggagagcaactctaagatcatcgtcctgtgctcccgcggcacgcgcgccaagtggcaggcgctcctgggccggggggcgcctgtgcggctgcgctgcgaccacggaaagcccgtgggggacctgttcactgcagccatgaacatgatcctcccggacttcaagaggccagcctgcttcggcacctacgtagtctgctacttcagcgaggtcagctgtgacggcgacgtccccgacctgttcggcgcggcgccgcggtacccgctcatggacaggttcgaggaggtgtacttccgcatccaggacctggagatgttccagccgggccgcatgcaccgcgtaggggagctgtcgggggacaactacctgcggagcccgggcggcaggcagctccgcgccgccctggacaggttccgggactggcaggtccgctgtcccgactggttcgaatgtgagaacctctactcagcagatgaccaggatgccccgtccctggacgaagaggtgtttgaggagccactgctgcctccgggaaccggcatcgtgaagcgggcgcccctggtgcgcgagcctggctcccaggcctgcctggcctttcctgtttatctttgaaaattaaatagggcataagagagaagaagatgtacttacaatgcagtgggtggttttaactctatagcctttgggctctgtggttggtgctccccttcctaaataaatgaggtgtatgcagggccctcttctgccttagcgccctgccagctgggactccagcaaggcccggggcacctgaggacagagtgagatggagggccgctgctccagcagctgggcctgcatcccacaagtcaactgtgtcggacagaggatccttacaaagaagaggcagcagggttgggggctggccagctgctcgtccgccctaggtagcttgctcatctgtaaagtgggtggggcaggaattcccacctcatggggtcctggcaagcctgcagtatccccgagtggcaccagcctgcttctggggcagagcagtttgtgccccctgaggtaccactgatcctctttccctgctattaggtattgctctctccctccggtgtttgccttttcagattataaaagtaatatgtgttcccatatttggcgtctctcaggagctcaggaagtacttggctgagtgaacatgtccattgtggaaaaatggcaacaatatggattccatgggtatattttatagaagaatatgaagaaaagcagctacccctaaacccatggcacaagctgttcatgttaattctgtacccgacgctttccccacggggcctcccctcactctgaaatggcatccaggtccatcttgccctccacctctgcatggctctccatgccccatcgcctctcccagatcctagcactgggtccacactctcgccctgtccatttaggttgatgaaagcaggcagtcacccgggtgggccagtcttgcctgtgggaggaacatgcagtctcctgtctcatggtttgaagtgtgccaggaagcctggcccagcccacctccccctggagtccttcccaggaggaataaccccttaggtcattgactataagatgagttcgctcactggatccttcctctctgatgagacaggaagaaggtacacagtgaccaggtaggaggaggagagggagtagaaaggagggatgcgggtggctggtccctgcatttgcctgcttccctgcacgggtgtcccactggccgcctctgctcaccagtgtcatgggattctctcagaagatgaaaacagcccctgctttttttgctagaatggctgagctttcatggaaaggaagctggacccaagcaacagccgactaccgaaggttgcctggagcagtgcagatgtgggaggaagaagggccttggtgcacactggcttttcttcctgactgcaatgtggcattgtgccagctacctcctctttctcggcctcaggaaaatggagagaaagcagccctgaaggtggctgtgacgagggaaggggcagagggcctgacagtcaaccacgcgctatattttcctgttcttccttagggcaagaactgcatggccagactcaggcaaggcctaggtgtgggctgggcattgcctacacgtgaagagatcactccgcgtccctactgcacctgtcacaaagtgccttctgatatgcctggcaaaccaaaatcggtgagcgccagcttgcttccctagaagacatttctaaatattcataacatgcttgctcaaatcaatcaccttattttacatccgctccagggagaaatgaagacatggtcctacgttgttctgtaattattttctatgtaaattttgttccttgtcacaattatatatgtcttaggggaaaggaccatttcacatgtgtcacctcatgtgattctcaccacagccctgtgattgctcctgttttataaataatgacatagttccagttgatggccaaagccacagctaacgagaggcagagagagctcaggctcccaggagcttccactctcagaccttgcctcccgggctgccctgagtgaaacccctgcttagcatttggcacagccagaagcagcaagctagggtcacaacacagagaggggctgtgtaatactggctgcctctgtgctaagaaaaaaaaaaaatcactgtgtgtttgtttattttggtgcaggcccagtgttcttgcttagacttaatactacccttcatgttaaaataaaaccaaacaaaaaaaaaaaaaaaa

SEQ ID NO: 288 - DNA, 1096 bp, Homo sapiens
  misc_feature (1057)..(1057): n equals a,t,g, or c
  misc_feature (1079)..(1079): n equals a,t,g, or c
  misc_feature (1085)..(1085): n equals a,t,g, or c
aattcggcamragggcgatgggactaatgtgcggacgccgggagcttctgcgcttgctacagtccgggcgtcgggtccacagcgtcgcagggccctcgcaatggcttgggaaaccgctgaccacacggctcctattcccagtagccccgtgctgctgtcgcccacactacctcttccttgcggcttccggcccccgcagcctcagtacctctgctatctcttttgcagaagtccaggttcaggcccctcctgttgttgctgcaactccctcacccacagcagtacctgaggtggcttctggagagactgcagatgtagtccaaactgctgcagagcagagcttcgctgaactggggctggggtcatacaccccagtgggactgatccagaatttactggaatttatgcatgttgatctgggcctaccttggtggggggccattgctgcatgtacagtctttgcccgctgcctgatttttcctctcatcgtgacgggccagcgagaggcagccaggatccacaatcacttgccagagatccagaagttttccagtcgaatcagagaggccaagttagcaggagaccatattgagtattacaaggcttcctcggagatggcactttaccagaaaaaacatggtattaaactctataaacctctcattctccctgtgactcaggccccaatcttcatctccttcttcattgctttgagagagatggccaaccttcctgtgcccagcctgcagacaggtggcctctggtggttccaggatctcacggtatccgatcccatctacatattaccactggcagtcactgctacaatgtgggctgttcttgagctaggtgctgagacaggtgtgcaaagttctgaccttcagtggatgagaaatgtcatcagaatgatgcccctgataaccttgcccataaccatgcatttccccacggcagtgtttatgtactggctctcctccaatttgkttttcctggtccaagtatcctgtctccggattccagcagtacgcactgkacttaaaatcccccagsgtggtgnacatgacctgggaccaaaaaantttttnaaacccccccc

SEQ ID NO: 289 - DNA, 2048 bp, Homo sapiens
  misc_feature (2012)..(2012): n equals a,t,g, or c
  misc_feature (2034)..(2034): n equals a,t,g, or c
ggaaacatccaaggtggtcttgaaggacactgggatcctgtaacacagccccggatatctgtgttaccagccttgtctcggccacctcaaggataatcactaaattctgccgaaaggactgaggaacggtgcctggaaaagggcaagaatatcacggcatgggcatgagtagcttgaaactgctgaagtatgtcctgtttttcttcaacttgctcttttggatctgtggctgctgcattttgggctttgggatctacctgctgatccacaacaacttcggagtgctcttccataacctcccctccctcacgctgggcaatgtgtttgtcatcgtgggctctattatcatggtagttgccttcctgggctgcatgggctctatcaaggaaaacaagtgtctgcttatgtcgttcttcatcctgctgctgattatcctccttgctgaggtgaccttggccatcctgctctttgtatatgaacagaagctgaatgagtatgtggctaagggtctgaccgacagcatccaccgttaccactcagacaatagcaccaaggcagcgtgggactccatccagtcatttctgcagtgttgtggtataaatggcacgagtgattggaccagtggcccaccagcatcttgcccctcagatcgaaaagtggagggttgctatgcgaaagcaagactgtggtttcattccaatttcctgtatatcggaatcatcaccatctgtgtatgtgtgattgaggtgttggggatgtcctttgcactgaccctgaactgccagattgacaaaaccagccagaccatagggctatgatctgcagtagttctgtggtgaagagacttgtttcatctccggaaatgcaaaaccatttatagcatgaagccctacatgatcactgcaggatgatcctcctcccatcctttccctttttaggtccctgtcttatacaaccagagaagtgggtgttggccaggcacatcccatctcaggcagcaagacaatctttcactcactgacggcagcagccatgtctctcaaagtggtgaaactaatatctgagcatcttttagacaagagaggcaaagacaaactggatttaatggcccaacatcaaagggtgaacccaggatatgaatttttgcatcttcccattgtcgaattagtctccagcctctaaataatgcccagtcttctccccaaagtcaagcaagagactagttgaagggagttctggggccaggctcactggaccattgtcacaaccctctgtttctctttgactaagtgccctggctacaggaattacacagttctctttctccaaagggcaagatctcatttcaatttctttattagagggccttattgatgtgttctaagtctttccagaaaaaaactatccagtgatttatatcctgatttcaaccagtcacttagctgataatcacagtaagaagacttctggtattatctctctatcagataagattttgttaatgtactattttactcttcaataaataaaacagtttattatctcaatcacaacattcctatatatcaaacactccttccatgacccagcctgattaccctgattaatgcaccaaaccaggtgtattaattgtctcctgctgcataaaatattactccaaaatttagtggctgaggacaacaaacatttattatctcatggtttttgtgggtcaggaatctaggagcagcttagctgggtgattctggttcacagtctctcatgtaactgcaatcaacatgtcagcctgggctgcagtaaccttaaggctcaactgaaagaggatctactttcaggctctctcacatcgctgttggcaagcctcagakctttgccacttgtgcctttccacggggcttccttatggacatggaagctggcttccccccatttaaagacatycaagaaagggcatgagattcggcacccaaaacagaagccacagtttgttgtttttgttgttgttgttttgnagatgggagaactggctttgtncacataggccggga

SEQ ID NO: 290 - DNA, 1248 bp, Homo sapiens
ccggaattcccgggtcgacccacgcgtccggaagcagatctgaggacatctctgtgccaggccagaaaccgcccacctgcaggtgaggcccggacccctgcccagttccttctccgggatggacgtggggcccagctccctgccccaccttgggctgaagctgctgctgctcctgctgctgctgcccctcaggggccaagccaacacaggctgctacgggatcccagggatgcccggcctgcccggggcaccagggaaggatgggtacgacggactgccggggcccaagggggagccaggaatcccagccattcccgggatccgaggacccaaagggcagaagggagaacccggcttacccggccatcctgggaaaaatggccccatgggaccccctgggatgccaggggtgcccggccccatgggcatccctggagagccaggtgaggagggcagatacaagcagaaattccagtcagtgttcacggtcactcggcagacccaccagccccctgcacccaacagcctgatcagattcaacgcggtcctcaccaacccgcagggagattatgacacgagcactggcaagttcacctgcaaagtccccggcctctactactttgtctaccacgcgtcgcatacagccaacctgtgcgtgctgctgtaccgcagcggcgtcaaagtggtcaccttctgtggccacacgtccaaaaccaatcaggtcaactcgggcggtgtgctgctgaggttgcaggtgggcgaggaggtgtggctggctgtcaatgactactacgacatggtgggcatccagggctctgacagcgtcttctccggcttcctgctcttccccgactagggcgggcagatgcgctcgagccccacgggccttccacctccctcagcttcctgcatggacccaccttactggccagtctgcatccttgcctagaccattctccccaccagatggacttctcctccagggagcccaccctgacccacccccactgcaccccctccccatgggttctctccttcctctgaacttctttaggagtcactgcttgtgtggttcctgggacacttaaccaatgccttctggtactgccattctttttttttttttttttcaagtattggaaggggtggggagatatataaataaatcatgaaatcaatacaaaaaaaaaaaaaaaaaaaaaaaaaaaaaaaaaaaaaaaaaaaaaaaaaaaaaaaaaaaaaaaaaaa

SEQ ID NO: 291 - DNA, 1297 bp, Homo sapiens; identical to SEQ ID NO: 282

SEQ ID NO: 292 - DNA, 2017 bp, Homo sapiens
ggtgacttaggacggggcgatggcggctgagaggagctgcgcgtgcgcgaacatgtaactggtgggatctgcggcggctcccagatgatggtcgtcctcctgggcgcgacgaccctagtgctcgtcgccgtggcgccatgggtgttgtccgcagccgcaggtggaaaaaatctaaaatctcctcaaaaagtagaggtcgacatcatagatgacaactttatcctgaggtggaacaggagcgatgagtctgtcgggaatgtgactttttcattcgattatcaaaaaactgggatggataattggataaaattgtctgggtgtcagaatattactagtaccaaatgcaacttttcttcactcaagctgaatgtttatgaagaaattaaattgcgtataagagcagaaaaagaaaacacttcttcatggtatgaggttgactcatttacaccatttcgcaaagctcagattggtcctccagaagtacatttagaagctgaagataaggcaatagtgatacacatctctcctggaacaaaagatagtgttatgtgggctttggatggtttaagctttacatatagcttagttatctggaaaaactcttcaggtgtagaagaaaggattgaaaatatttattccagacataaaatttataaactctcaccagagactacttattgtctaaaagttaaagcagcactacttacgtcatggaaaattggtgtctatagtccagtacattgtataaagaccacagttgaaaatgaactacctccaccagaaaatatagaagtcagtgtccaaaatcagaactatgttcttaaatgggattatacatatgcaaacatgacctttcaagttcagtggctccacgcctttttaaaaaggaatcctggaaaccatttgtataaatggaaacaaatacctgactgtgaaaatgtcaaaactacccagtgtgtctttcctcaaaacgttttccaaaaaggaatttaccttctccgcgtacaagcatctgatggaaataacacatctttttggtctgaagagataaagtttgatactgaaatacaagctttcctacttcctccagtctttaacattagatcccttagtgattcattccatatctatatcggtgctccaaaacagtctggaaacacgcctgtgatccaggattatccactgatttatgaaattattttttgggaaaacacttcaaatgctgagagaaaaattatcgagaaaaaaactgatgttacagttcctaatttgaaaccactgactgtatattgtgtgaaagccagagcacacaccatggatgaaaagctgaataaaagcagtgtttttagtgacgctgtatgtgagaaaacaaaaccaggaaatacctctaaaatttggcttatagttggaatttgtattgcattatttgctctcccgtttgtcatttatgctgcgaaagtcttcttgagatgcatcaattatgtcttctttccatcacttaaaccttcttccagtatagatgagtatttctctgaacagccattgaagaatcttctgctttcaacttctgaggaacaaatcgaaaaatgtttcataattgaaaatataagcacaattgctacagtagaagaaactaatcaaactgatgaagatcataaaaaatacagttcccaaactagccaagattcaggaaattattctaatgaagatgaaagcgaaagtaaaacaagtgaagaactacagcaggactttgtatgaccagaaatgaactgtgtcaagtataaggtttttcagcaggagttacactgggagcctgaggtcctcaccttcctctcagtaactacagagaggacgtttccctgtttagggaaagaaaaaacatcttcagatcataggtcctaaaaatacgggcaagctcttaactatttaaaatggaattacaggccgggcacgtggctcacactgtaatccagcactttggaggctgaggaggcagacatgaggtcagagatcgaga

SEQ ID NO: 293 - DNA, 1707 bp, Homo sapiens; identical to SEQ ID NO: 247
  misc_feature (1520)..(1520): n equals a,t,g, or c
  misc_feature (1529)..(1529): n equals a,t,g, or c
  misc_feature (1532)..(1532): n equals a,t,g, or c
  misc_feature (1568)..(1568): n equals a,t,g, or c

SEQ ID NO: 294 - DNA, 2971 bp, Homo sapiens
ccacgcgtccgctcgcccaccacgccgatgagcagccacggtcgagtcctgtccctgttggttgccatgctgctttcctgctgtggactggcggccgtctgctccatcaccggctacacccacggaatgcacaccttggctttcatggctgcagagtctcttcttgtgacagtgaggactgctcatgtgattttacgatacgtaattcacctctgggacctcaaccacgaagggacgtgggaaggaaaggggacgtatgtctattacacagactttgtcatggagctcactctcctgtccctggacctcatgcaccatattcacatgttgttatttggcaacatctggttatccatggccagcctggtcatctttatgcagctgcgttacctgtttcatgaggtgcaacgtcgaattcgtcggcacaagaactatctacgtgtggttggaaacatggaggccaggtttgcagttgcaactccagaggagctggctgtcaacaatgacgactgtgccatctgttgggactccatgcaggctgcgcggaaactgccctgtggacatcttttccacaactcctgtcttcgttcctggctagaacaagacacctcctgtccaacatgcagaatgtctcttaatattgccgacaataatcgtgtcagggaagaacatcaaggagagaacttggatgagaatttggttcctgtagcagcagccgaagggagacctcgcttaaaccaacacaatcacttcttacatttcgatgggtctcggattgcgagctggctgccgagtttttcggttgaagtgatgcacaccaccaacattcttggcattacgcaggccagcaactcccagctcaatgcaatggctcatcagattcaagagatgtttccccaggttccataccatctggtactgcaggacctccagctgacacgctcagttgaaataacaacagacaatattttagaaggacggattcaagtaccttttcctacacagcggtcagatagcatcagacctgcattgaacagtcctgtggaaaggccaagcagtgaccaggaagagggagaaacttctgctcagaccgagcgtgtgccactggacctcagtcctcgcctggaggagacgctggacttcggcgaggtggaagtggagcccagtgaggtggaagacttcgaggctcgtgggagccgcttctccaagtctgctgatgagagacagcgcatgctggtgcagcgtaaggacgaactcctccagcaagctcgcaaacgtttcttgaacaaaagttctgaagatgatgcggcctcagagagcttcctcccctcggaaggtgcgtcctctgaccccgtgaccctgcgtcgaaggatgctggctgccgccgcggaacggaggcttcagaagcagcagacctcctagcgctcccttgccttcctcagctgcctcctgcgccctgtgcccgactgactggaggaggcctgtcccaattctgcccgctccatggaaaagcgggcttgactgcattgccgctgtataaagcatgtggtcttatagtgtttggacagctgataaatttaatccttctttgtaatactttctatgtgacatttctcttccccttagaaacactgcaaattttaactgtaggtatgatctcttctggtgttgactggactgcttggggtgggggacgatcaggaggaagtgagcagtcgcctgcctgcagcaggcagcttctactcctgcctcatgcatacgtcccacaaatgcaggtgtcctgagcaccacacccagtgggaagagtgtgggggaggcgcacagtgtgagcccgcccccacgtcgtggggtaacatctgttatcaaactgctgtcgttgttgtggaagcatgtagactgtgccagaggccagacccacgggctcatgcacccctgagccagcagggcatcttggaaaaggaactcttggttcgatacctggagcagaggaggggaaagtccagggctatagggtgtgatgaagtcacccctttctgtcccactacatctgggactgactttccgagcctccagtccaaagccggcttgatttccgtgaactctggtgctcctgcatctcatgagtgtgccccatgggtcccctcccctctcagcatttccttgtcccgtctggacctggggagtggttaggcagcaagctttggtttatggttttcattcattggtgaagtaaattaggcagtgctaaagcctgtgggtttggtccttgaacaagatgtgggccttgcaagatgggagagtaaaccttgaagggctttattaaagaaataaaaaagaacttttgtatcttttatcctgggagcactgcgttttcctagctgtgttattcctggtttaattcagcagagaaggtaaggtgtgaacctacctgccttggagagggcccaggtcccaaatctcttcaaattcttcacatgtttaactttaaggatttgaaccatgaagtcataggttacagacctcagttttatgccccattggattactttttttttttttttttttttttactctttgaaagctttgttttgtggtagtccttttgggaagaatccagtattatctacaattattggcaaagtttaaatgtattttacataacggaaagtttttagaatgttgaaaagtaattgaaaaaggtgataggtaaatttttaggcaaagataatttatttcaataaatctttcaaaagccttaccttgaaatgctgttagtaaatttctgtgatttttttttttttaatttgttttgctgagagcatagctatttgtttttattgtaaaacaataataataataaaaagcaaactctaaaaaaaaaaaaaaaaaaaaaaaaaaaaaaaaaaaaaaaaaaaaaaaaaaaaaaaaaaaaaaaaaaaaaaaaaaaaaaaaaaaaaaaaaaaaaaaaaaa

SEQ ID NO: 295 - DNA, 1764 bp, Homo sapiens
tttgggaagcgctgcaaggacaaccggctggggtccttgcgcgccgcggctcagggaggagcaccgactgcgccgcaccctgagagatggttggtgccatgtggaaggtgattgtttcgctggtcctgttgatgcctggcccctgtgatgggctgtttcactccctatacagaagtgtttccatgccacctaagggagactcaggacagccattatttctcaccccttacattgaagctgggaagatccaaaaaggaagagaattgagtttggtcggtcctttcccaggactgaacatgaagagttatgccggcttcctcactgtgaataagacttacaacagcaacctcttcttctggttcttcccagctcagatacagccagaagatgccccagtagttctctggctacagggtgggccgggaggttcatccatgtttggactctttgtggaacatgggccttatgttgtcacaagtaacatgaccttgcgtgacagagacttcccctggaccacaacgctctccatgctttacattgacaatccagtgggcacaggcttcagttttactgatgatacccacggatatgcagtcaatgaggacgatgtagcacgggatttatacagtgcactaattcagtttttccagatatttcctgaatataaaaataatgacttttatgtcactggggagtcttatgcagggaaatatgtgccagccattgcacacctcatccattccctcaaccctgtgagagaggtgaagatcaacctgaacggaattgctattggagatggatattctgatcccgaatcaattatagggggctatgcagaattcctgtaccaaattggcttgttggatgagaagcaaaaaaagtacttccagaagcagtgccatgaatgcatagaacacatcaggaagcagaactggtttgaggcctttgaaatactggataaactactagatggcgacttaacaagtgatccttcttacttccagaatgttacaggatgtagtaattactataactttttgcggtgcacggaacctgaggatcagctttactatgtgaaatttttgtcactcccagaggtgagacaagccatccacgtggggaatcagacttttaatgatggaactatagttgaaaagtacttgcgagaagatacagtacagtcagttaagccatggttaactgaaatcatgaataattataaggttctgatctacaatggccaactggacatcatcgtggcagctgccctgacagagcactccttgatgggcatggactggaaaggatcccaggaatacaagaaggcagaaaaaaaagtttggaagatctttaaatctgacagtgaagtggctggttacatccggcaagcgggtgacttccatcaggtaattattcgaggtggaggacatattttaccctatgaccagcctctgagagcttttgacatgattaatcgattcatttatggaaaaggatgggatccttatgttggataaactaccttcccaaaagagaacatcagaggttttcattgctgaaaagaaaatcgtaaaaacagaaaatgtcataggaataaaaaaattatcttttcatatctgcaagatttttttcatcaataaaaattatccttgaaacaaaaaaaaaaaaaaaaaaaaaaaaaaaaaaaaaaaaaaaaaaaaaaaaaaaaaaaaaaaaaaaaaaaaaaaaaaaaaaaaaaaaaaaaaaaaaaaaaaaaaaaaaaaa

SEQ ID NO: 296 - DNA, 2799 bp, Homo sapiens
taaccatagctttgcaaaagctatttaggtgacactatagaaggtaccgcctgcaggtaccggtccggaattcccgggtcgacccacgcgtccgcttgtcatagccaagcacgctgcttcttggattgacctggcaggatggcgccaccaccagctagagtacatctaggtgcgttcctggcagtgactccgaatcccgggagcgcagcgagtgggacagaggcagccgcggccacacccagcaaagtgtggggctcttccgcggggaggattgaaccacgaggcgggggccgaggagcgctccctacctccatgggacagcacggacccagtgcccgggcccgggcagggcgcgccccaggacccaggccggcgcgggaagccagccctcggctccgggtccacaagaccttcaagtttgtcgtcgtcggggtcctgctgcaggtcgtacctagctcagctgcaaccatcaaacttcatgatcaatcaattggcacacagcaatgggaacatagccctttgggagagttgtgtccaccaggatctcatagatcagaacgtcctggagcctgtaaccggtgcacagagggtgtgggttacaccaatgcttccaacaatttgtttgcttgcctcccatgtacagcttgtaaatcagatgaagaagagagaagtccctgcaccacgaccaggaacacagcatgtcagtgcaaaccaggaactttccggaatgacaattctgctgagatgtgccggaagtgcagcacagggtgccccagagggatggtcaaggtcaaggattgtacgccctggagtgacatcgagtgtgtccacaaagaatcaggcaatggacataatatatgggtgattttggttgtgactttggttgttccgttgctgttggtggctgtgctgattgtctgttgttgcatcggctcaggttgtggaggggaccccaagtgcatggacagggtgtgtttctggcgcttgggtctcctacgagggcctggggctgaggacaatgctcacaacgagattctgagcaacgcagactcgctgtccactttcgtctctgagcagcaaatggaaagccaggagccggcagatttgacaggtgtcactgtacagtccccaggggaggcacagtgtctgctgggaccggcagaagctgaagggtctcagaggaggaggctgctggttccagcaaatggtgctgaccccactgagactctgatgctgttctttgacaagtttgcaaacatcgtgccctttgactcctgggaccagctcatgaggcagctggacctcacgaaaaatgagatcgatgtggtcagagctggtacagcaggcccaggggatgccttgtatgcaatgctgatgaaatgggtcaacaaaactggacggaacgcctcgatccacaccctgctggatgccttggagaggatggaagagagacatgcaaaagagaagattcaggacctcttggtggactctggaaagttcatctacttagaagatggcacaggctctgccgtgtccttggagtgaaagactctttttaccagaggtttcctcttaggtgttaggagttaatacatattaggtttttttttttttttaacatgtatacaaagtaaattcttagccaggtgtagtggctcatgcctgtaatcccagcactttgggaggctgaggcgggtggatcacttgaggtcagaagttcaagaccagcctgaccaacatcgtgaaatgccgtctttacaaaaaaatacaaaaattaactggatgtgatggtgtgtgcatatattctcggctactcgggaggctgaggcaggagaatcacttgaacccacgaggcagtgagctgagattgcaccactgcactccagcctgggacacagagcaagactctgtctcaagataaaataaaataaacttgaaagaattattgcccgactgaggctcacatgccaaaggaaaatctggttctcccctgagctggcctccgtgtgtttccttatcatggtggtcaattggaggtgttaatttgaatggattaaggaacacctagaacactggtaaggcattatttctgggacattatttctgggcatgtcttcgagggtgtttccagaggggattggcatgcgatcgggtggactgagtggaaaagacctacccttaatttgggggggcaccgtccgacagactggggagcaagatagaagaaaacaaaaaaaaaaaaaagcaaatccatctgatctcctggagctgggacactcttctgcctgtggacatcagagtctaggatttctagcccttggactccagggcatacaccagtggcctcccgaaggatctaaggattttggccttgaactaagaattacaccatcggcttccctgggtcttaggtttttgggctggattaagtcctgcttccagcatttcagggtctctgctgtgcagatggcctgttgtggaacttctcaacctccattatcagatgcattaattcctccaataagtcccatttcatatatagtcatttaccccacaacatttcagtcaagggaacagcatataagatggtggccgtccagtaagctaaggttaatttattaattatttaatttatttaccttgagttcaagtcacaattaaagtacatatacctttggaaatttggacttttgtatataaaagtacttttttttggcgggggcagtgggcagctctcatcctaaacaaatgtgttatttggtacctatgcaaagatttggttaaaaaaaaaaaaaaaaa

SEQ ID NO: 297 - DNA, 1382 bp, Homo sapiens
ggcacgaggcttttttccccggagataaatgttgcttctcccacacagtggtttaaattttttttcaatttcgttgcctttacatgaggcatacaccctctagatgaccccagtccttatcgttctctatcatctgacactggcttcgctcagtttctttgtctgcctggctcctgtgggcatttgaatttgcaaatcctgctttagacagtgtaattttatgtattaacttggctaggccacaatacccaggtatttggtcaaacaccagtctagatgttgctgtgaagggattttctagaagagattaacatttaaattggcagtcgttgaataaagcggattacccccctctatctcgggcctttttcaagttagaggcgatgaaacagaccttcaacctggaggaatacagcctctctcaggctaccttggagcaggtattcttagaactctgtaaagagcaggagctgggaaatgttgatgataaaattgatacaacagttgaatggaaacttctcccacaggaagacccttaaaatgaagaacctcctaacattcaattttaggtcctactgcattgttagtttccataattctacaagaatgtttccttttacttaagttaacaaaagaaaacatttaataaacattcaataatgattacagttttcatttttaaaaatttaggatgaaggaaacaaggaaatatagggaaaagtagtagacaaaattaacaaaatcagacatgttattcatccccaacatgggtctattttgtgcttaaaaataatttaaaaatcatacaatattaggttggttttcggttattatcaataaagctaacactgagaacattttacaaataaaaatatgagttttttagcctgaacttcaaatgtatcagctatttttaaacattatttactcggattctaatttaatgtgacattgactataagaaggtctgataaactgatgaaatggcacagcataacatttaattataatgacattctgattataaaataaatgcatgtgaattttagtacatattgaagttatatggaagaagatagccataatctgtaagaaagtaccgcagttaatattttctttagccaacttatattcaatgtattttttatggatcctttttcaaaggtagtatcagtaggcatagtcattttctgtatcttttcacctcacagttcatgaacatttcccatgtcattatagcacttttgtgttatataattgctgcattaatgttatagctgtattgatgtaataccagagttgttacgtttgggttatatgcaagtttatttcttagaaataaaactttgatggacttttaaaaaaaaaaaaaaaaaaaaaaa

SEQ ID NO: 298 - DNA, 1623 bp, Homo sapiens
ggcacgaggaagttagcactctacgtatatgaatatctgctccatgtaggagctcagaaatcagctcaaacatttttatcagagataagatgggaaaaaaacatcacattgggggaaccaccaggattcttacattcttggtggtgtgtattttgggatctctactgtgcagctccagagagacgtgaaacatgtgaacactcaagtgaagcaaaagccttccatgattacagtgctgcagcagctcccagtccagtgctaggaaacattcccccaggagatggcatgccagtaggtcctgtaccaccagggttctttcagccttttatgtcacctcggtaccctggaggtccaaggcccccattgaggatacctaatcaggcacttggaggtgtcccaggaagtcagccattactccccagtggaatggatccaactcgacaacaaggacatccaaatatgggtgggccaatgcagagaatgactcctccaagaggaatggtgcccttaggaccacagaactatggaggtgcaatgagacccccactgaatgctttaggtggccctggaatgcctggaatgaacatgggtccaggtggtggtagaccttggccaaacccaacaaatgccaattcaataccatactcctcagcatctcctgggaattatgtaggtcctccaggaggtggagggccaccaggaacacccatcatgcctagtccagcagattcaaccaactctggtgataacatgtatactttaatgaatgcagtacctcctggacctaacagacctaattttccaatgggccctgggtcagatggtcccatgggtggattaggaggaatggagtcacatcacatgaatggctctttaggctcaggagatatggacagtatttccaagaattctcccaataatatgagcctgagtaatcaaccgggcactccaagggatgatggcgataatggggggaaatttcttaaatccttttcagagtgagagttactcccctagcatgacaatgagcgtgtgatccattaccaagtctcctcatgaaaaccacagtgagtcagcccttcacagaactactacggaagaaaattattcatcacagtgtacagttaaacaaaggaatctcagtcacaccaaaccaacctttttatttcctgctctctcccctcttttgtgaagaaagcgggtccaaatgtgattcaaacaactgtacggagtggcatattagaattgccctaaactgaactgcaaataattatgtgtgtatgtatatgtgtgggaaagagaatgtactgtatatgtgtatgttatacagacatatacacatacatacattgacccacaggacattgtaaaatattatcacatgacatcttaagtagaaataagtagggacttttattccatcctttttttcacgtttacattttaattattacaagttgctcctgccccctccctgaactattttgtgctgtgtatatcactgctttatataagttattttttaaggtgaactcagatgttatggttttgtaaatgtctgcaatcatggataggaataaaatcgcttatttgagagctttcattaaaaaaaaaaaaaaaaaa

SEQ ID NO: 299 - DNA, 1984 bp, Homo sapiens
cctgagtgggtgcgccgagtcatggagggcgcagagctggccgggaagatcctttccacctggctgacgctggttctcggcttcatccttttaccttcggtcttcggagtgtctctgggcatctccgagatctacatgaagatcctagtgaaaactttagagtgggccacaatacgaattgaaaaaggaaccccaaaggagtcgattcttaaaaactctgcttctgttggtattatccaaagagatgagtcacccatggaaaaagggctctctggtctacgaggaagggactttgagctgtctgacgtgttttatttctccaagaagggattggaagccattgtagaagatgaagtgacccagaggttttcctcagaggagctagtgtcatggaatctcctcacaagaaccaatgtaaatttccagtacatcagtctgcggctcactatggtgtgggtgctgggcgtcatagtgcgctattgtgtcctactgcctctgaggtaagtcatatgcctggtaatttgatgatacgcttgactcagctttctttttgaatcatgtacataatggccacgtaagtgttctgtggtgcttattccacccattcccacgtaggaaatgccaccwwwywtgacctctaaaggaatgtattacgtatccattttcctttcacaatttttccccaaatgaagttgtatattcagaatccaatgtatatcttagaatctggatccactttgctattagagtctgagctaacttgaggatggagagaaaagggaagtgaagaagaagaagaggaagaggaagaagaagaagagagatcatcaacagtttcatattcactagagcatcagccaaactgtaagagctgaccagaacccactgcctttctttgccagtccatagcacttcataactgcataagagagaaaaaattcttgagtgtggttacacgtgggagagagccatttcgaagtgtgtttgttccatccaattcattgtgatcacggactgctcttattaaagtgtccccacctgggtccccttctgcttctgagcttgagtgccacctggtgaggaggcagtgtcaagcctagtttatggaaagcacgatgtggaacatgagtagaaggcactgcgtggtgggatgaagctgtaagtggctgagatctgattagcgtggtggtagcagtagtaggcacgtataccagccacaacattattgttgatcatcttgcttcatttccctggacatggccttggcatcctctcagcagagctttccaggcargaaawacmtgccaactaaacttggcacatgaattgaaatctttttaccacccccagggtggcctatgcttgcctcattcagatttattaccagggaaagtattgcttaactacagggaaatgcagatttctaagaaattatttctgggttgttgttgttgtttttttttgcccatattgstagttcagacattggggcatagtatgtcttttgggaatcatttcagctgtgataatgaagcgaaattcaaggtttcacatataattttgcttgaaccttaaactagtgcccccaaaacagggttcgtgtactctgggagtgtacaagactatccattggcatgcaggaaggaaatattagagctcttatttactaaaagcttctgttctggctgggtgcagtggctcacgcctgtaatcccagcactttgggaggccgaggtgggcggatcacaagatcaagagatcgagaccatcctggccaacatggtgaaacctcatctctactaaaaatacaaaaattaactgggcgtggtggagcacacctagtctcagctactcgggaggctgagacaggagaatcgcttgaacctgggaggcagaggttgcagtgagctgtgatcgtgccactgcactctagcctggcaacagagcgagactgcgtatccaaaaaaaaaaaaaaaaaaaaaag

SEQ ID NO: 300 - DNA, 1541 bp, Homo sapiens
gcggccgccgcgctcggtccagtcttcccggctggaaggatcgggcgcctgggatcagagcgtcctgtttagcaataacggctggagcacgtcctacaagttacgggagagtcggctgtgaaggagacgttcgcttatcccctgtgtccccgctcctggcccctccagacccccgccttgcctcgcgctgggaggggagatccagaatgaaaggcaagaaaggtattgttgcagcatctggcagtgagactgaggatgaggacagcatggacattcccttggacctttcttcatccgctggctcaggcaagagaaggagaaggggcaacctacccaaggagtctgtgcagattcttcgggattggctgtatgagcaccgttacaatgcctatccttcagagcaagaaaaagcgttgctgtcccagcaaacacacctgtctacgctacaggtctgtaactggttcatcaacgcccgccgcaggctcctccctgacatgctgagaaaggatggcaaagatccaaatcagttcacaatttcccgccgtggggccaagatttctgaaacgagctctgtggagtccgtgatgggcatcaaaaacttcatgccagctctagaggagaccccatttcattcctgtacagctgggccaaacccaaccctagggaggccactgtctcctaagccgtcatccccgggatcagttttggctcgtccatcagtgatctgccataccactgtgactgcattgaaagatgtccctttctctctctgccagtcggtcggtgtgggacaaaacacagatatacagcagatagcggccaaaaacttcacagacacctctctcatgtacccagaggacacttgtaaatctggaccaagtacgaatacacagagtggtcttttcaacactcctccccctactccaccggacctcaaccaggacttcagtggatttcagcttctagtggatgttgcactcaaacgggctgcagagatggagcttcaggcaaaacttacagcttaacccattttcaagcaaaacagttctcagaaatgtcatgattgccggggtgaaggcaagagatgaattgcattattttatatattttttattaatatttgcacatgggattgctaaaacagcttcctgttactgagatgtcttcaatggaatacagtcattccaagaactataaacttaaagctactgtagaaacaaagggttttcttttttaaatgtttcttggtagattattcataatgtgagatggttcccaatatcatgtgattttttttttcctccccttccctttttttgttattttttcagactgtgcaatacttagagaacctatagcatcttctcattcccatgtggaacaggatgcccacatactgtctaattaataaattttccattttttttcaaacaagtatgaatctagttggttgatgccttttttttcatgacataataaagtattttctttaaaaaaaaaaaaaaaaaaaaaaaaaaaaaaaaaaaaaaaaaaaactcgag

SEQ ID NO: 301 - DNA, 2774 bp, Homo sapiens
  misc_feature (48)..(48): n equals a,t,g, or c
  misc_feature (98)..(98): n equals a,t,g, or c
  misc_feature (106)..(106): n equals a,t,g, or c
  misc_feature (2762)..(2762): n equals a,t,g, or c
gatttttgaaaagcccttgttttgacgcctgtaaatgcgatcttgttncagctctgaaaatgttttaatctacaagtttcatttcaacacttatttcntctttcantgctgcttccatggtttttctgtcactccgaccagttcccagyttcaggacaagggccytggcgatcttttaaaaaagccgattgggtgtctttctaaaattacaaccagtacttcatcgtcaagtttctgggaagggagtcccctccagattctcatggagtgacaaatcttgactcttgctcctggaatttttcaggccaaactagcgtttctacaatgatttatttggcaaatttgtcttgattatgggtggctgatgaggaacgtgcttttgttaggaaccgaaactgggcggcggtgagggcgtgtacgcaatgagtccggaagagggtgaaatgctttcggtaggcactccacggctgtgaagatggcggcggctgcgtggcttcaggtgttgcctgtcattcttctgcttctgggagctcacccgtcaccactgtcgtttttcagtgcgggaccggcaaccgtagctgctgccgaccggtccaaatggcacattccgataccgtcggggaaaaattattttagttttggaaagatcctcttcagaaataccactatcttcctgaagtttgatggagaaccttgtgacctgtctttgaatataacctggtatctgaaaagcgctgattgttacaatgaaatctataacttcaaggcagaagaagtagagttgtatttggaaaaacttaaggaaaaaagaggcttgtctgggaaatatcaaacatcatcaaaattgttccagaactgcagtgaactctttaaaacacagaccttttctggagattttatgcatcgactgcctcttttaggagaaaaacaggaggctaaggagaatggaacaaaccttacctttattggagacaaaaccgcaatgcatgaaccattgcaaacttggcaagatgcaccatacatttttattgtacatattggcatttcatcctcaaaggaatcatcaaaagaaaattcactgagtaatctttttaccatgactgttgaagtgaagggtccctatgaatacctcacacttgaagactatcccttgatgatttttttcatggtgatgtgtattgtatatgtcctgtttggtgttctgtggctggcatggtctgcctgctactggagagatctcctgagaattcagttttggattggtgctgtcatcttcctgggaatgcttgagaaagctgtcttctatgcggaatttcagaatatccgatacaaaggagaatctgtccagggtgctttgatccttgcagagctgctttcagcagtgaaacgctcactggctcgaaccctggtcatcatagtcagtctgggatatggcatcgtcaagccacgccttggagtcactcttcataaggttgtagtagcaggagccctctatcttttgttctctggcatggaaggggtcctcagagttactggggcccagactgatcttgcttccttggcctttatccccttggctttcctagacactgccttgtgctggtggatatttattagcctgactcaaacaatgaagctattaaaacttcggaggaacattgtaaaactctctttgtatcggcatttcaccaacacgcttattttggcagtggcagcatccattgtgtttatcatctggacaaccatgaagttcagaatagtgacatgtcagtcggactggcgggagctgtgggtagacgatgccatctggcgcttgctgttctccatgatcctctttgtcatcatggttctctggcgaccatctgcaaacaaccagaggtttgccttttcaccattgtctgaggaagaggaggaggatgaacaaaaggagcctatgctgaaagaaagctttgaaggaatgaaaatgagaagtaccaaacaagaacccaatggaaatagtaaagttaacaaagcacaggaagatgatttgaagtgggtagaagagaatgttccttcttctgtgacagatgtagcacttccagcccttctggattcagatgaggaacgaatgatcacacactttgaaaggtccaaaatggagtaaggaatgggaagatttgcagttaaagatggctaccatcagggaagagatcagcatctgtgtcagtcttctgtacggctccatgggattaaaggaagcaatgacatcctgatctgttccttgatctttgggcattggagttggcgagaggtgtcagaacaaagagaacatcttactgaaaacaagttcataagatgagaaaaatctacgagcttcttatttacaacactgctgccccctttcctcccagactctgacatggatgttcatgcaacttaagtgtgttgttcctgaactttctgtaatgtttcattttttaaatctgacaaactaaaaagtttaacgtcttctaaaagattgtcatcaacaccataatatgtaatctccaggagcaactgcctgtaatttttatttatttagggagttacataggtgatgggggaaattgttaactacctttcattttcctgggaagtcaaggttacatcttgcagaggttgttttgagaaaaaagggcccttctgagttaaggagccatagttctatcaatgatcaaaagaaaaaaaaaaaaaaactcgaycggcacgagggggggcccggtacccaattcgccctatgggantcgaatgagacc

SEQ ID NO: 302 - DNA, 1617 bp, Homo sapiens
  misc_feature (1595)..(1595): n equals a,t,g, or c
  misc_feature (1607)..(1607): n equals a,t,g, or c
acagaatccaaattgagtgcaggtcgctttaagaaaggagtagctgtaatctgaagcctgctggacgctggattagaaggcagcaaaaaaagctctgtgctggctggagccccctcagtgtgcaggcttagagggactaggctgggtgtggagctgcagcgtatccacaggccccaggatgcaggccctggtgctactcctctgcattggagccctcctcgggcacagcagctgccagaaccctgccagccccccggaggagggctccccagaccccgacagcacaggggcgctggtggaggaggaggatcctttcttcaaagtccccgtgaacaagctggcagcggctgtctccaacttcggctatgacctgtaccgggtgcgatccagcatgagccccacgaccaacgtgctcctgtctcctctcagtgtggccacggccctctcggccctctcgctgggagcggagcagcgaacagaatccatcattcaccgggctctctactatgacttgatcagcagcccagacatccatggtacctataaggagctccttgacacggtcactgccccccagaagaacctcaagagtgcctcccggatcgtctttgagaagaagctgcgcataaaatccagctttgtggcacctctggaaaagtcatatgggaccaggcccagagtcctgacgggcaaccctcgcttggacctgcaagagatcaacaactgggtgcaggcgcagatgaaagggaagctcgccaggtccacaaaggaaattcccgatgagatcagcattctccttctcggtgtggcgcacttcaaggggcagtgggtaacaaagtttgactccagaaagacttccctcgaggatttctacttggatgaagagaggaccgtgagggtccccatgatgtcggaccctaaggctgttttacgctatggcttggattcagatctcagctgcaagattgcccagctgcccttgaccggaagcatgagtatcatcttcttcctgcccctgaaagtgacccagaatttgaccttgatagaggagagcctcacctccgagttcattcatgacatagaccgagaactgaagaccgtgcaggcggtcctcactgtccccaagctgaagctgagttacgaaggcgaagtcaccaagtccctgcaggagatgaagctgcaatccttgtttgattcaccagactttagcaagatcacaggcaaacccatcaagctgactcaggtggaacaccgggctggctttgagtggaacgaggatggggcgggaaccacccccagcccagggctgcagcctgcccacctcaccttcccgctggactatcaccttaaccagcctttcatcttcgtactgagggacacagacacaggggcccttctcttcattggcaagattctggaccccaggggcccctaatatcccagtttaatattccaataccctagaagaaaacccgagggacagcagattccacaggacacgaaggctgcccctgtaaggtttcaatgcatacaataaaagagctttatccctaaaaaaaaaaaaaaaaacttggggggggcccggacccaattgncctaaagggggngaatacaatt

SEQ ID NO: 303 - DNA, 1329 bp, Homo sapiens
  misc_feature (1295)..(1295): n equals a,t,g, or c
  misc_feature (1303)..(1303): n equals a,t,g, or c
  misc_feature (1327)..(1328): n equals a,t,g, or c
gcggccgcccttttttttttttttttttttttttttttttttttttttttttttttttttttttttaataaaaaacgcatttaatagcatgtcaatatacagtttaaatgtgtagtaagtcttctgttagtcagtgcattacagggataaagaggaggaatttcatttggaatgcacagtccaacgctaggtataggtgcagagaaatcttggtgctcttacactattaaaattccgttttatgaaacatcactccaggtgcagggcactgtgccagtgagggactcatctggtccagtgtgcaagctacagttttcaattaaattgtatacaagtattaacaaaagaataaaatttattattcacaaaactaaagtggttatcataaagcttacaagagagtacagcctagaactaatgagttgaaaaactagttttaaaaataataaaacttactggacagttttggaaaatgatattataaaacaacgaaaacaattggcacagtttaaccacctaatttctaagtgcactttgtaatgttccttgcaagctgccacttttcccaggataaagacaaaaagcttcagtcaggtgtcactggcttatggtgacggttttttttattgcattgccaagagtggattttaagaaaaaacactacaaaggtttcaaaaaccctatttattctctatcatcaaaaatagcaacagggggacttatacaacttttctgtgagtacccaccagtctatttttttttcttaaaaaaaatagaagttagttaaagaaaaatgatttggtttttaaaaaataatgtaaggaaacacttaatcagatagcccaaggagtcatcagaaatatgtgtagcaagaaagcttcattttcggccctctctggcctttgcacatcttttactaaactagaaagagawtgtacagtaccaatatgttccccaacctgcttggatcaaattgtttgtttttaaacccattattgctaaaccagagtgttgacactgagcgccgaggagtccactcatagaggataaaattgagaggctgcttccgaggactggatctccacctgggccattttgaactgagtgcactgcaaccactttcggagggctgccaggccagcactgctctggcccgagcccggcagcgtccttaggctgtggtggttcacgtggttmtgaatagcctggaggcgaagctggagtcccgcagataagtgcttgatatttgactgaatcattggcaaccacataggtatcagcttgacaaaaatggncgaattgncttaaatgcaatgagagcatttcnnt

SEQ ID NO: 304 - DNA, 1034 bp, Homo sapiens
ggcagagtattggttgggggaaacccacgaggggacgcggccgaggagggtcgctgtccacccgggggcgtgggagtgaggtaccagattcagcccatttggccccgacgcctctgttctcggaatccgggtgctgcggattgaggtcccggttcctaacgaatctctgctggattggccgtaaccctgtccccgagcgggctcacagggtctgaaggccacgcatgaggcaaaggtaaagttctgagccacccggtgcctccttcccaggactgcaagatggaggaaggcgggaacctaggaggcctgattaagatggtccatctactggtcttgtcaggtgcctggggcatgcaaatgtgggtgaccttcgtctcaggtagggaccctcagcttggatgtcatgggtacctggggtggggatggaaataagaggggaaccgggaagtkccctaacacccctgtggtccccataccctgcaggcttcctgcttttccgaagccttccccgacataccttcggactagtgcagagcaaactcttccccttctacttccacatctccatgggctgtgccttcatcaacctctgcatcttggcttcacagcatgcttgggctcagctcacattctgggaggccagccagctttacctgctgttcctgagccttacgctggccactgtcaacgcccgctggctggaaccccgcaccacagctgccatgtgggccctgcaaaccgtggagaaggagcgaggcctgggtggggaggtaccaggcagccaccagggtcccgatccctaccgccagctgcgagagaaggaccccaagtacagtgctctccgccagaatttcttccgctaccatgggctgtcctctctttgcaatctgggctgcgtcctgagcaatgggctctgtctcgctggccttgccctggaaataaggagcctctagcatgggccctgcatgctaataaatgcttcttcagaaatgaaaaaaaaaaaaaaaaaaaaaaaaaaaaaaaaaaaactcgta

SEQ ID NO: 305 - DNA, 713 bp, Homo sapiens; identical to SEQ ID NO: 261
  misc_feature (664)..(664): n equals a,t,g, or c
  misc_feature (697)..(697): n equals a,t,g, or c

SEQ ID NO: 306 - DNA, 2085 bp, Homo sapiens
  misc_feature (2062)..(2062): n equals a,t,g, or c
  misc_feature (2065)..(2065): n equals a,t,g, or c
  misc_feature (2084)..(2084): n equals a,t,g, or c
cgtccgcaacggctcattctgctcccccgggtcggagccccccggagctgcgcgcgggcttgcagcgcctcgcccgcgctgtcctcccggtgtcccgcttctccgcgccccagccgccggctgccagcttttcggggccccgagtcgcacccagcgaagagagcgggcccgggacaagctcgaactccggccgcctcgcccttccccggctccgctccctctgccccctcggggtcgcgcgcccacgatgctgcagggccctggctcgctgctgctgctcttcctcgcctcgcactgctgcctgggctcggcgcgcgggctcttcctctttggccagcccgacttctcctacaagcgcagcaattgcaagcccatcccggccaacctgcagctgtgccacggcatcgaataccagaacatgcggctgcccaacctgctgggccacgagaccatgaaggaggtgctggagcaggccggcgcttggatcccgctggtcatgaagcagtgccacccggacaccaagaagttcctgtgctcgctcttcgcccccgtctgcctcgatgacctagacgagaccatccagccatgccactcgctctgcgtgcaggtgaaggaccgctgcgccccggtcatgtccgccttcggcttcccctggcccgacatgcttgagtgcgaccgtttcccccaggacaacgacctttgcatccccctcgctagcagcgaccacctcctgccagccaccgaggaagctccaaaggtatgtgaagcctgcaaaaataaaaatgatgatgacaacgacataatggaaacgctttgtaaaaatgattttgcactgaaaataaaagtgaaggagataacctacatcaaccgagataccaaaatcatcctggagaccaagagcaagaccatttacaagctgaacggtgtgtccgaaagggacctgaagaaatcggtgctgtggctcaaagacagcttgcagtgcacctgtgaggagatgaacgacatcaacgcgccctatctggtcatgggacagaaacagggtggggagctggtgatcacctcggtgaagcggtggcagaaggggcagagagagttcaagcgcatctcccgcagcatccgcaagctgcagtgctagtcccggcatcctgatggctccgacaggcctgctccagagcacggctgaccatttctgctccgggatctcagctcccgttccccaagcacactcctagctgctccagtctcagcctgggcagcttccccctgccttttgcacgtttgcatccccagcatttcctgagttataaggccacaggagtggatagctgttttcacctaaaggaaaagcccacccgaatcttgtagaaatattcaaactaataaaatcatgaatatttttatgaagtttaaaaatagctcactttaaagctagttttgaataggtgcaactgtgacttgggtctggttggttgttgtttgttgttttgagtcagctgattttcacttcccactgaggttgtcataacatgcaaattgcttcaattttctctgtggcccaaacttgtgggtcacaaaccctgttgagataaagctggctgttatctcaacatcttcatcagctccagactgagactcagtgtctaagtcttacaacaattcatcattttataccttcaatgggaacttaaactgttacatgtatcacattccagctacaatacttccatttattagaagcacattaaccatttctatagcatgatttcttcaagtaaaaggcaaaagatataaattttataattgacttgagtactttaagccttgtttaaaacatttcttacttaacttttgcaaattaaacccattgtagcttacctgtaatatacatagtagtttacctttaaaagttgtaaaaatattgctttaaccaacactgtaaatatttcagataaacattatattcttgtatataaactttacatcctgttttacctaaaaaaaaaaaaaaaaaaaaaaaaaaaaaaaaaaaaaaaaaaaaaaaaaaaaaaaaaaaaaaaaaaanaanaaaaaaaaaaaaaaaaaana

SEQ ID NO: 307 - DNA, 580 bp, Homo sapiens
cccaactcgctataggggcaatttggcaagtgagcttcaatttccggccgcaatgcataagctttttttttttttttttgcaagtacaagggtaactttattgacccccagctgggcactgcttggcccctacatcattacccccctattttggctgttgcccccatggcactgcctgtcaacttctacaacctggtgatgtctggcatcaacccctcccaaagatggaggggattctcttgcgagtgatggtggcagctgtttcagggggcacagggctaaggctgagacgtgtcacctcaactgaagcagaagaggtggattatggcattggccacgaagaaaaggaaaatgcctccgctyatgytgctggatgctgaggggctgctggtttggctggtgtcgttttgtcctgagagtccagtttgtatctgtaccataaccaggaggctgatggtgagtaggaggaagaggaagcgcttcattttggtaggatcttcgtggctgtcttggtagcagctttttaggtgatctcgtgccgaattcctgcaacccgggggatccactagttctagagcgg

SEQ ID NO: 308 - DNA, 2223 bp, Homo sapiens
gaaattgtgtgactgttgaaaattaaaatgtagcgggacccattttctgtacgcagaaccctttacctgtattcctggacaaggcctagagaacgagctgctcatcatgtttctaatataatttctggggtgaaatgaatgatttccttactggcttagagaaaaccaaggtcaataaaatgcagattgacttaactattagaaaagatgggatgacttctgggaaccacttaactcttcaaatgactgttgaaagagaaaaaggcaaaactgaaatcccaccagaccattttgtgtgcctgtttctaatcgatacaaagttaagcatgagctaaaatcagacaaagcactttaaatttatcctttccagagcgctttgcacatgcaccctcctgagtttgggattctgccaaatgaccaacttgatcctggccctgaggagtcattggctgcaggaatagggcaagaatctatttcctaaactacacataacatgggagcctttttttcgttgttttcaggtatattaaagaatgaaatctttggttactaggtgctgactaataaataacaccttttatattctgaccatttgtcacatttcattgtgatactgtatactgatctaactccttatgaarggcaacaaacaaaaataagacattgaataaaaagcaaaatcaaagaagctaaagagaaaaatgaaggcagatatattgcaactttataacatattctattttattgaagactgcaattaatgcagcaagaatgctttctcaagcggtggcctttgtattctcattttaatcaggtgtacattctatggcctctcccccatgctgttagtttctattttaaaagatacaataatatatgtagggaaaggggcctgggctcttcatttaaaggtaagcagtaatattgagtaagtgacataattctttttctctttgttaagtcctatgcctctttttcttaactgtaaaacatagaatatgagcgtttttatcttacaaataggtacctaaggcatgtgattttatttttaaataacaaaaaataacccaagtttcttgcttctccaaagtattcttctcatagcttataaaagaaagtccacattgaatagcatggtctgggaacattccttctttattgtgtttatttgaacatgatatgagtttccaagatgaaatgatcaaaaaagataagtaccacaagaaagtttttttgtttggttggtttttttgtttgtttgtttttttcttgagactgagtctctccctgttgcccaagttggagtgcaatcttggctcactgcagcctccacctccccggttccagcgattctcctgcctcagcctcttgaatagctgggattacaggcgcccgccaccacacctggctaatttttgtgttgttagtagaggcggggtttcatcatgttggccaggctggtctcgaactcctgatctcatgatccgtctgcctcggcctcccagagtgctgggattacaggcatgagccactgcgcccggccaagaaagtatgtttttagaggtgtgtgtaagtgcatttgtattacctatgaacaaaattacctgactcttgtcccaggaaagctgtttcgcattttcgctttttgattggtattatccagttctatgtagttcatattattgttctgtctgactctcagaaattacttcttcacgccagtgtcttgttgcatgactttgatgtcacctataggaatacacctcactgcacgtaagtgggtatcttactgtataaaaggtctacatggctttaggttttaggacaaatgtgtagatttatagaccatttctgttggccaggacacagattttgagagctgtgtgtatatatatataatcatgtttgtatttttttcctgaaagttatcaattgcttttgtttaaaacagtttgttttagaggtggggtggggatgtatataacgaggaaaagttatatgtactttaaagtatgtcaagttcttactagtttcctgtactgaaggttcaattttttttatataagtttacttttcacctgctctattctttgtggggaaaaaatgcatctagaaaaacatagtttaaatactgtatataagataatgaaagttagtaacgtccattatttaataaagtttgtaaagtacaaggtaaaaaaaaaaaaaaaaaagggcggccgc

SEQ ID NO: 309 - DNA, 775 bp, Homo sapiens
  misc_feature (649)..(649): n equals a,t,g, or c
  misc_feature (685)..(685): n equals a,t,g, or c
  misc_feature (721)..(721): n equals a,t,g, or c
  misc_feature (744)..(744): n equals a,t,g, or c
  misc_feature (759)..(759): n equals a,t,g, or c
  misc_feature (770)..(770): n equals a,t,g, or c
gaaaaccatagtatttrggtgacacgtagtagaaggtacgcctgcaggtaccggtccggaattcccgggacccctggcatgasacaataaccctgataaatgcttcaataatattgaaaaaggaagagtatgagtattcaacatttccgtgtcgcccttattcccttttttgcggcattttgccttcctgtttttgctcacccagaaacgctggtgaaagtaaaagatgctgaagatcagttgggtgcacgagtgggttacatcgaactggatctcaacagcggtaagatccttgagagttttcgccccgaagaacgttttccaatgatgagcacttttaaagttctgctatgtggcgcggtattatcccgtattgacgccgggcaagagcaactcggtcgccgcatacactattctcagaatgacttggttgagtactcaccagtcacagaaaagcatcttacggatggcatgacagtaagagaattatgcagtgctgccataaccatgagtgataacactgcggccaacttacttctgacaacgatcggaggaccgaagagctaaccgcttttttgcacaacatgggggatcatgtaactcgccttgatcgttgggaacggagctgaatgaagccataccaaacgangaagcgtgacaccacgatgcctgtagcaatggcaanaacgttgcgcaaactattaactggcgaactacttantctagcttcccgggaacaattantaggctgggatgganggcggataaanttgca

SEQ ID NO: 310 - DNA, 3568 bp, Homo sapiens
  misc_feature (1363)..(1363): n equals a,t,g, or c
gccatttgtattgaagaaattggagtatggatgaaaatgtatagtgatgccttcctaaatgacagttacctaaaatatgttggctggactcttcatgacaggcaaggggaagtcaggctgaagtgtttgaaagctctgcagagtctatataccaatagagaattattccccaaattggaactattcactaaccgattcaaggatcgcattgtatcaatgacacttgataaagaatatgatgttgctgtggaagctattcgattggttactctgatacttcatggaagtgaagaagctctttccaatgaagactgtgaaaatgtttaccacttggtgtactcggcacatcgccctgttgctgtggcagctggagagttccttcacaaaaagctatttagcagacatgacccacaagcagaagaagcattagcaaagaggaggggaagaaacagcccgaatggaaacctcattaggatgctggttcttttctttcttgaaagtgagttacatgaacatgcagcctacttggtggacagtttatgggagagctctcaagaactgttgaaagactgggaatgtatgacagagttgctattagaagaacctgttcaaggagaggaagcaatgtctgatcgtcaagagagtgctcttatagagctaatggtttgttcaattcgtcaagctgctgaggcacatcctccagtgggaaggggtaccggcaagagagtgctaactgccaaagaaaggaaaactcaaattgatgatagaaacaaattgactgaacattttattattacacttcctatgttactgtcaaagtattctgcagatgcagacaaggtagcaaacttgctacaaatcccacagtattttgatttagaaatctacagcacaggtagaatggaaaagcatctggatgctttattaaaacagattaagtttgttgtggagaaacacgtacaatcagatgttctagaagcctgcagtaaaacctatagtatcttatgcagtgaagaatataccatccagaacagagttgacatagctcgaagccagctgattgatgagtttgtagatcgattcaatcattctgtggaagacctattgcaagagggagaagaagctgatgatgatgacatttacaatgttctttctacattaaagcggttaacttcttttcacaatgcacatgatctcacaaaatgggatctctttggtaattgctacagattattgaagactggaattgaacatggagccatgccagaacagatagtcgtgcaagcactgcagtgttcccattattcgattctttggcagttggtgaaaattactgatggctctccttccaaagaggatttgntggtattgaggaaaacggtgaaatcctttttggctgtttgccagcagtgcctgtctaatggtaatactccagtgaaagaacaggctttcatgttactctgtgatcttctgatgattttcagccaccaattaatgacaggtggcagagagggccttcagcctttggtgtttaatccagatactggactccaatctgaactcctcagttttgtgatggatcacgtttttattgaccaagacgaggagaaccagagcatggagggtgatgaagaagatgaagctaataaaattgaggccttacataaaagaaggaatctacttgctgctttcagcaaacttatcatttatgacattgttgacatgcatgcagctgcagacatcttcaaacactacatgaagtattacaatgactatggtgatattattaaggaaacactgagtaaaaccaggcagattgataaaattcagtgtgccaagactctcattctcagtttgcaacagttatttaatgaacttgttcaagagcaaggtcccaacctagataggacatctgcccatgtcagtggcattaaagaactggcacgtcgctttgcccttacatttggattggaccagattaagacacgagaagcagttgccacacttcacaaggatggcatagagtttgcatttaaataccaaaatcagaaaggacaagagtatccacctcctaatctggcttttcttgaagtactaagtgaattttcttctaaacttcttcgacaggacaaaaagacagttcattcatacctagagaaattccttaccgagcagatgatggaaaggagggaggatgtatggcttccactcatctcctatagaaattcattagtcactgggggtgaagatgatagaatgtctgtgaacagtggaagtagcagcagcaaaacctcatcagtaaggaataagaaaggacgacctccacttcataaaaaacgagtagaagatgagagtctggataacacatggctaaacaggactgacaccatgattcagactcctggccccctgccagcaccacaactcacatccactgtactgcgggagaacagtcggcccatgggagaccagattcaagaacctgagtctgaacatggttctgaaccagactttttacacaatcctcagatgcagatctcttggttaggccagccgaagttagaagacttaaatcggaaggacagaacaggaatgaactacatgaaagtgagaactggagtgaggcatgctgttcggggtctaatggaggaagatgctgagcccatctttgaagatgtgatgatgtcatcccgaagccagttagaagatatgaatgaagaatttgaggacaccatggttattgatctgcctccatcaagaaatcggcgagagagagctgagctaaggccagacttctttgactctgcagctatcatagaagatgattcaggatttggaatgcctatgttctgaagtctgaagaaaatttacaaatctggaactctattatttagagctagaggcctatatactgtgatagcttgtatggggaaaaacacttttgatgtgatctgatttgttttttaatcaaatgattaaggtcaatccctttttgcagtgacagaagaggagcatgtaaattacccaagggaatgttggtgaatgtcaactcagaaagactgacctgaaaatcatttgtgtcctactattggacttatcccaatacagatgtgtgtgtttttctggagggaggaagaaattttaaatttttaaaacagctgtcaagataaacactgttatacacctgttttatgaaaactcaacattgagtaaaaaaaaacatatttttaactttattttcctgttgtacaatttaaaaaccgttttaacattttgcctttttatgttttaaaagctaaccatttttattaaacctatgagtaagcagctcatcctaattgcgaagagtgttttggagttcactggatttggttgacctttgtggaacacaaataatgaaggagcagaacattgacaagctaagatgaaattctgacatagtacatctctgccaaaaaccacacaccctctgtggatatggatatgaattcccagattttatatactcttgaataaaaggtttatttttaaaaaaaaaaaaaaaaaaaaaaaaaaaaaaaaaaaaaaa

SEQ ID NO: 311 - DNA, 639 bp, Homo sapiens
  misc_feature (564)..(564): n equals a,t,g, or c
gcccacgcgtccgcccacgcgtccgcggacggtgggttcgacccacgcgtccgtcgacccacgcgtccgcccacgcgtccgcccacgcgtccgagcagagggacctgcacacagagactccctcctgggctcctggcaccatggccccactgaagatgctggccctggtcaccctcctcctgggggcttctctgcagcacatccacgcagctcgagggaccaatgtgggccgggagtgctgcctggagtacttcaagggagccattccccttagaaagctgaagacgtggtaccagacatctgaggactgctccagggatgccatcgtttttgtaactgtgcagggcagggccatctgttcggaccccaacaacaagagagtgaagaatgcagttaaatacctgcaaagccttgagaggtcttgaagcctcctcaccccagactcctgactgtctcccgggactacctgggacctccaccgttggtgttcaccgcccccaccctgagcgcctgggtccaggggaggccttccagggacgaagaagagccacagtgagggagatnccatccccttgtctgaactggagccatgggcacaaagggccagattaaagtctttatcctcaaaaaaaaaaaaaa

SEQ ID NO: 312 - DNA, 2033 bp, Homo sapiens
gggcatacaagtttggaatgaagtatttgtgattgacagacctaatggaactaaagttgctgtgctgcttatggatacccagggtgcctttgatagccagtcaactatcaaagactgtgcaacggtgtttgctctgagcactatgactagctctgtccaggtatataatctgtctcagaatattcaagaagatgatcttcaacatttgcaattatttacagagtatggaagacttgcgatggaagaaatctaccagaaaccatttcagacattaatgtttttgattcgagattggagctatccttatgaacattcatatggtttggaaggtggaaagcaatttcttgaaaagagattacaggtaaaacaaaatcaacatgaagagcttcagaatgtaaggaagcacatacacaattgtttctcaaatcttggttgcttccttttgccacatcctggtcttaaagttgcaactaatcctagttttgatgggagattgaaagatattgatgaagactttaaacgagagcttcgaaatctggttccattgctgcttgcccctgaaaatttggtagaaaaagagataagtggatctaaagtcacttgtagagatcttgtagaatattttaaggcttacatcaaaatctatcaaggagaagaacttccacatccaaagtccatgcttcaggcaacagctgaagctaataatcttgctgcagtagcaggagcaagagatacctattgtaaaagtatggaacaggtatgtggaggggacaagccttacattgcaccttcagatctggagcgaaaacacttggatctcaaggaagtggcgataaaacaatttcgttcagtaaaaaagatgggtggagatgagttctgccgtcgttatcaggaccagcttgaagctgaaattgaagaaacctatgcaaattttataaagcacaatgatggcaaaaatatcttctatgctgctcgtaccccagccacactgtttgcggtcatgtttgctatgtatataatctcaggactgactggcttcattggcctaaactctatagctgtcttgtgtaaccttgtcatggggttagcactgatatttctttgtacttgggcatatgttaaatactctggggagttcagagaaattggaacagtgattgatcagattgctgaaacactatgggaacaggtattgaagcccctgggtgataatttgatggaggaaaacataaggcagtctgtaacaaactctatcaaagcaggcctgactgaccaggtgtctcatcatgccagattaaagacagactgacagttcatctcctcacggactccactctctttttttttcatgcttgctgtacaatgagaactcaaataaaaataaaccaaagtttacaatcaactgtagaagtagtttagtgtaactggcttcacagatggctgccacagagtgtgaagattgtttgttagttttaagcattcttttaatggctcctaagacatgcagatggactgaggagcattggttaatcatgcacctttgtgccatgtttaactcttttatttctttttacttaatctaatgttagtgaatttgtcttatgtaaaaggatatttcagggaaatattttcagaaatctatttagagtctctttaacacagtgtcccattgaaattttaatttttagagaatttatgaatcactgtttcaagaaccagattggaaagacaatgaagcctttattgagccactacattaaaagtatatattgctttactgccttcaataccagtattacatcaatgcatgtatcagaaacttcacagaaattacatggcaactcttgtagctaagaaagtaattctgaggtgtacatttgtcttgcctttttaaatttataaacttgccctaaaaggagatgcatatctgggaaactgractggctttttgcagttarccttcatgkatataaaatatgccattaawtttattggggaagaaattccwtccaaaaggtgsctacagctatgag

SEQ ID NO: 313 - DNA, 1022 bp, Homo sapiens
  misc_feature (6)..(6): n equals a,t,g, or c
  misc_feature (18)..(18): n equals a,t,g, or c
  misc_feature (28)..(29): n equals a,t,g, or c
  misc_feature (42)..(42): n equals a,t,g, or c
  misc_feature (997)..(997): n equals a,t,g, or c
gtggangaccgctctganaactagtggnntcccccgggctgncaggaattcggcagaggtaatcgcataaaacttaaaactttacagtcagaggttcaattcctcttcttaacaacatacccatggccaacctcctactcctcattgtacccattctaatcgcaatggcattcctaatgcttaccgaacgaaaaattctaggctatatacaactacgcaaaggccccaacgttgtaggcccctacgggctactacaacccttcgctgacgccataaaactcttcaccaaagagcccctaaaacccgccacatctaccatcaccctctacatcaccgccccgaccttagctctcaccatcgctcttctactatgaacccccctccccatacccaaccccctggtcaacctcaacctaggcctcctatttattctagccacctctagcctagccgtttactcaatcctctgatcagggtgagcatcaaactcaaactacgccctgatcggcgcactgcgagcagtagcccaaacaatctcatatgaagtcaccctagccatcattctactatcaacattactaataagtggctcctttaacctctccacccttatcacaacacaagaacacctctgattactcctgccatcatgacccttggccataatatgatttatctccacactagcagagaccaaccgaacccccttcgaccttgccgaaggggagtccgaactagtctcaggcttcaacatcgaatacgccgcaggccccttcgccctattcttcatagccgaatacayaaacattattataataaacaccctcaccactrcaatcttcctaggaacaacatatgacgcactctcccctgaactctacacaacatattttgtcaccaagaccctacttctaacctccctgktcttatgaattcgaacagcatacccccgattcsgctaagaccaacttcatacaccttctatggaaaaaacttnctacacttaaccctagcattactta

SEQ ID NO: 314 - DNA, 454 bp, Homo sapiens
cccacgcgtccgctctttcttgtcctcccagctgagctttcttattccaccctttctggtgtctataggaatgcatgagagaccctggacgtttttctgctctcttctggccctccatggagccatgggcctcggcctcggcggctcctcaccctcacaatttatttcctcctcccgtgccagcccttcttttgtgtctgaaaccggttttaaaatgtgactctcccagagaagaagccgctggctgtatgaaacttgacggcgcttttgtaaggtgccacccccaaactttaaggtagctaaaccaatttttaaaagattcaatggcttgttcatcctccagatgtagctattgatgtacacttcgcaacggagtgtctgaaattgtggtggtcctgatttataggatttcataattaaaatgtctgctgaaaaaaaaaaaaaaaaaaaaaaa

SEQ ID NO: 315 - DNA, 2551 bp, Homo sapiens
ccgaggcgctgctgctggagcggccgatccgagacgtggctccctgggcggcagaaccatgttggacttcgcgatcttcgccgttaccttcttgctggcgttggtgggagccgtgctctacctctatccggcttccagacaagctgcaggaattccagggattactccaactgaagaaaaagatggtaatcttccagatattgtgaatagtggaagtttgcatgagttcctggttaatttgcatgagagatatgggcctgtggtctccttctggtttggcaggcgcctcgtggttagtttgggcactgttgatgtactgaagcagcatatcaatcccaataagacattggacccttttgaaaccatgctgaagtcattattaaggtatcaatctggtggtggcagtgtgagtgaaaaccacatgaggaaaaaattgtatgaaaatggtgtgactgattctctgaagagtaactttgccctcctcctaaagctttcagaagaattattagataaatggctctcctacccagagacccagcacgtgcccctcagccagcatatgcttggttttgctatgaagtctgttacacagatggtaatgggtagtacatttgaagatgatcaggaagtcattcgcttccagaagaatcatggcacagtttggtctgagattggaaaaggctttctagatgggtcacttgataaaaacatgactcggaaaaaacaatatgaagatgccctcatgcaactggagtctgttttaaggaacatcataaaagaacgaaaaggaaggaacttcagtcaacatattttcattgactccttagtacaagggaaccttaatgaccaacagatcctagaagacagtatgatattttctctggccagttgcataataactgcaaaattgtgtacctgggcaatctgttttttaaccacctctgaagaagttcaaaaaaaattatatgaagagataaaccaagtttttggaaatggtcctgttactccagagaaaattgagcagctcagatattgtcagcatgtgctttgtgaaactgttcgaactgccaaactgactccagtttctgcccagtttcaagatattgaaggaaaaattgaccgatttattattcctagagagaccctcgtcctttatgcccttggtgtggtacttcaggatcctaatacttggccatctccacacaagtttgatccagatcggtttgatgatgaattagtaatgaaaactttttcctcacttggattctcaggcacacaggagtgtccagagttgaggtttgcatatatggtgaccacagtacttcttagtgtattggtgaagagactgcacctactttctgtggagggacaggttattgaaacaaagtatgaactggtaacatcatcaagggaagaagcttggatcactgtctcaaagagatattaaaattttatacatttaaaatcattgttaaattgattgaggaaaacaaccatttaaaaaaaatctatgttgaatccttttataaaccagtatcactttgtaatataaacacctatttgtacttaattttgtaaatttggattggtatatatcatattttcttaattcattgtacacatttgacttactgcacagtatattgatcattttaatgggaaactttagctttctactttttatttttgttttttcactttctatgccattatttttgtattctttttcttagtgtgagctctaaaatcaatgttcttgaaaaagaaattattttgcagaagttggggaatcatgtttgttgaatatgtataaaatagaaacataggctgggcgcggtggctcacacctgtaatccctacactttgggaggctgaggcaggtggatcacctgaggtccagagtttgagaccagtctggccaacatgatgaaaccccatctctactaaaaatacaaaacattggccgggagtggtggctcatgcctgtaatcccagcactttgggatgctgaggcgggtggatcacctgaggtcaggagtttgcgaccagcctggccaacatgatgaaaccctgtctctactaaaaatacaaaaaaattggctgggtgtggtggcccacacctgtaatcccagcactttgggaggtcgaggcgggtggatcacctgaggtccgaagttcgaggccagcctggccaacaggatgaaaccctgtctctattaaaaatacagaaaattggccgggtgcggtggctcacccctgtaatcccagtactttgggaggctgaggcgggtggagcacctgaggtcaggaattcgagatcagcctggccaacatggtgaaaccccatctctactgaaaaacacacacaaaaaaattagctgggcatggtggcacatgcctgtaatcccagctactcaggaggctgaggcaggagaatcatttgaacctgggaggcggagcttgcagtgagccgagattgcacccctgcactccagcctgggccacagagcaagactctgtctcaagaaaaacaaaaaaaaaaaaaaagggc

SEQ ID NO: 316 - DNA, 712 bp, Homo sapiens
  misc_feature (27)..(27): n equals a,t,g, or c
  misc_feature (29)..(29): n equals a,t,g, or c
  misc_feature (306)..(306): n equals a,t,g, or c
  misc_feature (627)..(627): n equals a,t,g, or c
  misc_feature (655)..(655): n equals a,t,g, or c
  misc_feature (701)..(701): n equals a,t,g, or c
ggcaattagtacctaggttacactatnanaaaggtacgcctgcaggtaccggtccggaattcccgggtcgaggggcccaagcttacgcgtgcatgcgacgtcatagctctctccctatagtgagtcgtattataagctaggcactggccgtcgttttacaacgtcgtgactgggagatctgctagcttgggatctttgtgaaggaaccttacttctgtggtgtgacataattggacaaactacctacagagatttaaagctctaaggtaaatataaaatttttaagtgtataatgtgttaaactanctgcatatgcttgctgcttgagagttttgcttactgagtatgatttatgaaaatattatacacaggagctagtgattctaattgtttgtgtattttagattcacagtcccaaggctcatttcaggcccctcagtcctcacagtctgttcatgatcataatcagccataccacatttgtagargttttacttgctttaaaaaacctcccacacctccccctgaacctgaaacataaaatgaatgcaattgttgttgttaacttgtttattgcagcttataatggttacaaataaagcaatagcatcacaaatttcacaaatnaagcatttttttcactgcattctagttntggtttgtccaaactccatcaatgtttcttatcatgttctggatcnaatcctgcatt

SEQ ID NO: 317 - DNA, 4295 bp, Homo sapiens
  misc_feature (464)..(464): n equals a,t,g, or c
  misc_feature (1979)..(1979): n equals a,t,g, or c
  misc_feature (3226)..(3226): n equals a,t,g, or c
  misc_feature (4182)..(4182): n equals a,t,g, or c
  misc_feature (4197)..(4197): n equals a,t,g, or c
  misc_feature (4234)..(4234): n equals a,t,g, or c
  misc_feature (4237)..(4237): n equals a,t,g, or c
  misc_feature (4269)..(4269): n equals a,t,g, or c
  misc_feature (4274)..(4274): n equals a,t,g, or c
  misc_feature (4286)..(4286): n equals a,t,g, or c
tccatagaagacaccgggaccgatccagcctccggactctagcctaggccgcgggacggataacaatttcacacaggaaacagctatgaccactaggcttttgcaaaaagctatttaggtgacactwtagaaggtacgcctgcaggtaccggtccggaattcccgggctcagtcctcacagtctgttcatgatcataatcagccataccacatttgtagaggttttacttgctttaaaaaacctcccacacctccccctgaacctgaaacataaaatgaatgcaattgttgttgttaacttgtttattgcagcttataatggttacaaataaagcaatagcatcacaaatttcacaaataaagcatttttttcactgcattctagttgtggtttgtccaaactcatcaatgtatcttatcatgtctggatcgatcctgcattaatgaatcggccaacgcgcggngagaggcggtttgcgtattggctggcgtaatagcgaagaggcccgcaccgatcgcccttcccaacagttgcgcagcctgaatggcgaatgggacgcgccctgtagcggcgcattaagcgcggcgggtgtggtggttacgcgcagcgtgaccgctacacttgycagcgccctagcgcccgctcctttcgctttcttcccttcctttctcgccacgttcgccggctttccccgtcaagctctaaatcgggggctccctttagggttccgatttagtgctttacggcacctcgaccccaaaaaacttgattagggtgatggttcacgtagtgggccatcgccctgatagacggtttttcgccctttgacgttggagtccacgttcttaatagtggactcttgttccaaactggaacaacactcaaccctatctcggtctattcttttgatttataagggattttgccgatttcggcctattggttaaaaaatgagctgatttaacaaaaatttaacgcgaattttaacaaaatattaacgcttacaatytaggtggcacttttcggggaaatgtgcgcggaacccctatttgtttatttttctaaatacattcaaatatgtatccgctcatgccaggtcttggmctgktgagaacggcttgctcggcagcttcgatgtgtgctggagggagaataaaggtctaagatgtgcgatagagggaagtygcattgawttatgtgctgtgtagggatcgctggtatcaaatatgtgtgcccmcccctggcatgagacaataaccctgataaatgcttcaataatattgaaaawggaagagtatgagtattcaacatttccgtgtcgcccttattcccttttttgcggcattttgccttcctgtttttgctcacccagaaacgctggtgaaagtaaaagatgctgaagatcagttgggtgcacgagtgggttacatcgaactggatctcaacagcggtaagatccttgagagttttcgccccgaagaacgttttccaatgatgagcacttttaaagttctgctatgtggcgcggtattatcccgtattgacgccgggcaagagcaactcggtcgccgcatacactattctcagaatgacttggttgagtactcaccagtcacagaaaagcatcttacggatggcatgacagtaagagaattatgcagtgctgccataaccatgagtgataacactgcggccaacttacttctgacaacgatcggaggaccgaaggagctaaccgcttttttgcacaacatgggggatcatgtaactcgccttgatcgttgggaaccggagctgaatgaagccataccaaacgacgagcgtgacaccacgatgcctgtagcaatggcaacaacgttgcgcaaactattaactggcgaactacttactctagcttcccggcaacaattaatagactggatggaggcggataaagttgcaggaccacttctgcgctcggcccttccggctggctggnttattgctgataaatctggagccggtgagcgtgggtctcgcggtatcattgcagcactggggccagatggtaagccctcccgtatcgtagttatctacacgacggggagtcaggcaactatggatgaacgaaatagacagatcgctgagataggtgcctcactgattaagcattggtaactgtcagaccaagtttactcatatatactttagattgatttaaaacttcatttttaatttaaaaggatctaggtgaagatcctttttgataatctcatgccataacttcgtataatgtatgctatacgaagttatggcatgaccaaaatcccttaacgtgagttttcgttccactgagcgtcagaccccgtagaaaagatcaaaggatcttcttgagatcctttttttctgcgcgtaatctgctgcttgcaaacaaaaaaaccaccgctaccagcggtggtttgtttgccggatcaagagctaccaactctttttccgaaggtaactggcttcagcagagcgcagataccaaatactgttcttctagtgtagccgtagttaggccaccacttcaagaactctgtagcaccgcctacatacctcgctctgctaatcctgttaccagtggctgctgccagtggcgataagtcgtgtcttaccgggttggactcaagacgatagttaccggataaggcgcagcggtcgggctgaacggggggttcgtgcacacagcccagcttggagcgaacgacctacaccgaactgagatacctacagcgtgagctatgagaaagcgccacgcttcccgaagggagaaaggcggacaggtatccggtaagcggcagggtcggaacaggagagcgcacgarggagcttycagggggaaacgcctggtatctttatagtcctgtcgggtttcgccacctctgacttgagcgtcgatttttgtgatgctcgtcaggggggcggagcctatggaaaaacgccagcaacgcggcctttttacggttcctggccttttgctggccttttgctcacatgttctttcctgcgttatcccctgattctgkggataaccgtattaccgcctttgagtgagctgataccgctcgccgcagccgaacgaccgagcgcagcgagtcagtgagcgaggaagcggaagagcgcccaatacgcaaaccgcctctccccgcgcgttggccgattcattaatgcagagcttgcaattcgcgctttttcaatattatngaagcatttatcagggttattgtctcatgagcggatacatatttgaatgkatttagaaaaataaacaaataggggttccgcgcacatttccccgaaaagtgccacctgacgtctaagaaaccattattatcatgacattaacctataaaaataggcgtatcacgaggccctttcactcattaggcaccccaggctttacactttatgcttccggctcgkataatgkgtggaattgtgagcggataacaatttcacacaggaaacagcatcgtgcaggtcgttacataacttacgktaaatggcccgcctggctgaccgcccaacgacccccgcccattgacgtcaataatgacgtatgttcccatagtaacgccaatagggactttccattgacgtcaatgggtggagtatttacggtaaactgcccacttggcagtacatcaagtgtatcatatgccaagtacgccccctattgacgtcaatgacggtaaatggcccgcctggcattatgcccagtacatgaccttatgggactttcctacttggcagtacatctacgtattagtcatcgctattaccatggtgatgcggttttggcagtacatcaatgggcgtggatagcggtttgactcacggggatttccaagtctycaccccattgacgtcaatgggagttkgttttggcaccaaaatcaacgggactttycaaaatgtcgtaacaactccgccccattgacgcaaatgggcggtaggcgtgtacggtgggaggtctatataagcagagctcgtttagtgaaccgtcagatcgcctggagacgccatccacgctgttttgacctccatagaagacaccgggaccgatccagccttcggactctagcctaagcccgcgggacggataacaatttcacacaggaaacagctatgaccactaggcttttgcaaaaagctattangtgacactatagaangtacgcctgaggtaccggtccggaattccgggttagnctnacagctggtcatgacataatcagcatacccantttgnaaggttacttgnttaaaaacc

SEQ ID NO: 318 - DNA, 759 bp, Homo sapiens
ggcacgagtttccttttttccgatcctgcaacagcctctttaaactgtttaaatgagaatgtccttggctcagagagtactactcacctggcttttcacactactcttcttgatcatgttggtgttgaaactggatgagaaagcaccttggaactggttcctcatatttattccagtctggatatttgatactatccttcttgtcctgctgattgtgaaaatggctgggcggtgtaagtctggctttgaccctcgacatggatcacacaatattaaaaaaaaagcctggtacctcattgcaatgttacttaaattagccttctgcctcgcactctgtgctaaactggaacagtttactaccatgaatctatcctatgtcttcattcctttatgggccttgctggctggggctttaacagaactcggatataatgtcttttttgtgagagactgacttctaagtacatcatctcctttctattgctgttcaacaagttaccattaaagtgttctgaatctgtcaagcttcaagaataccagagaactgagggaaaataccaaatgtagttttatactacttccataaaacaagattggtgaatcacggacttctagtcaacctacagcttaattattcagcatttgagttattgagatccttattatctctatgtaaataaagtttgttttggacctcaaaaaaaaaaaaaaaaaaaaaaaaaaaaaaaaaaaaaaaaaaaaaaaaaaaaaaaaaaaaaa

SEQ ID NO: 319 - DNA, 1276 bp, Homo sapiens
  misc_feature (33)..(33): n equals a,t,g, or c
  misc_feature (1275)..(1275): n equals a,t,g, or c
atgttaaatatcttatatgggacttacgataanatgtattgatgttagtgattgtcaaaataggtttatcatttaaaaaactaggaaattactaagtataaagaagaaaaaccagtattaattaagtgatgagacctgttcattttgttttccctgacttatttccattaccaaacatagtaaaggccagaaaagattaaaaaaaaaattaacacagccattccattgttttttaccacatggagaaaggaccaggctggaagcatatgtccccccacccttatttatattcctttgagcattgccgttttctagacagacaatccgaaaataattgtgttgataggtctgtttaagcctgaactctgggtgtaaaatgttatccagaagctatagggagctgccttgctcaggtcattggaaatttcaaccctaagactcattggaatttctaagtccgttatgcaccattatgggcatatggagcatattcataccatgaggaggagtctttgtttatgatggactttttaatatgggcataattaaactcacactcaaaaaggatgagctattgtcaaaagccaaaagaaaaacagacaaaatgaacatgaagcaaggagtccataaaacaagagttctttaccacgtttaagcaaatgtctctcaaaaaaaattgtatttctgtgcacattagctgagattcacacattttgcacctcagtagtatttcagatgagactcaatgtgtggagaaaactgctaacttgtttggttctactcttaccccctcttctgtggcaatgtggggtcagggccgtatcctaaattatccacatggtcttaaatggaaatcatgggactctggaaagctggcatgagctggttggagcttttaaacagaagtgctttatgggtatcagatctcttctgaacatcaattgtttcaaatcattgttgggctctgtcgtgttctgcaatcttccccattcccctcatgatctctggcttatcttttatccaatctgtatggactttttaggattttttttttcttatagtacaaataattttcagatcccagctttggtaaatgtgttaattctactttgtgaataaataaatgagtgatctgctaaaaatggcaattgtagaattatgttgtatgtaatgtacatatggagaaagaatgtattttgttcattttcttaataaaatgttatatatggatgctaaaaaaaaaaaaaaaaaaaaaaaaaaaaaaaaaaaaaaatnt

SEQ ID NO: 320 - DNA, 1223 bp, Homo sapiens; identical to SEQ ID NO: 132
  misc_feature (11)..(11): n equals a,t,g, or c
  misc_feature (31)..(31): n equals a,t,g, or c
  misc_feature (1185)..(1185): n equals a,t,g, or c
  misc_feature (1210)..(1210): n equals a,t,g, or c

SEQ ID NO: 321 - DNA, 496 bp, Homo sapiens
ggcacgagggggccaaaagtgtgtttcatatgagaaatgtgaacagcctttcagccatcaatccggtgtctctccttctcatgcatagatctcgggctctgaaaagggcagtttttctcctaactttgccattctcctgccttcctggcttatgtctcagtcatagtcccattcaacgtcaagaagtggagaagggctgggcacggtggctcacgcctgtcatcccagcactttgggaggacgaggtgggtggatcacctgaggtcaggagttcgagaccaacctggccaacgtggtgaaaccccatctctgctaaaaatacaaaaaattagccgggagtgatggcatgcacctgtaagcccagctactcgggaggctgaggcaggagaatcgcttgaacccaggaggcagaggttgtggtgaacggagaccacaccattgcactccagcttgggtaacagagcaagacttggtctcaaaaaaaaaaaaaaaaaaa

SEQ ID NO: 322 - DNA, 1960 bp, Homo sapiens
ggcacgaggaccaagtcaagaatggcaccaatatgaagtccctgaatctggagatgcaagagttggcggtagctgcgtccctgtcacagactggggcgtccattggcagtgccctggctgcaatcatgcttctacttctggtgtttttggtggcttgttttatcaacaggaaatgccagaaacagaggaagaagaagcccgcagaggacattttggaagaatatcctctgaataccaaggtagaagtgcccaagaggcacccggaccgggtggagaagaacgtgaatagacactactgcactgtgcggaacgtcaacatcctgagtgagcctgaggcggcttacacgttcaaaggtgctaaagtcaaaagactgaatctagaagtcagagttcacaacaatttacaagatggaacagaagtttaatggaggagacctatgtgtatttttttctaaaaacatttttataaaatggggggaaacactggtatttttataatctcgcagataaaaaagggaaaacaattatcttctctacttggattatgagataaccttttcttggaggaaagaaacaccgctttacaaaggcatgactctggcggtggtcctaaggaagcatgaccagaaaattcataaaaatgtatcatcagcaggagatgagactatgaattggcatccagaacaggagatttagagcaaaatctaatttagcattctgagatgagtgtcaggttttcaggagagaatgagttggggtgagcccagagtctgaaactcctgactggtcaggtgctacttaagaccagcttgggcaattcagggcagaactcctgtatcagcctcatggacacccagaattggtatctcatggctggagagctgatcagccaggcacagaatctccagaacaacctagagagtgaatgctaatttgtagagcgaatttccatttggcccattatttgtaactgtgtaactgctccaagtgccagaatgcttacacgttaaagcagcacctttccatttgcccacatattcttcttgcacaccccttccattactgctgaataggacattgcatgggaagagtacagaggtggcagaatgaagctagagtgggaaggactaaagactgagccccagagtgctcccagcaaccgccacgtacaaggtctgaaatgacaagtgcaagagtgagataggaaactgtgtgtgaaaggaaagcccttgcagtatttctgcctccctttctttctgcctttcaccccactaaatgtacgttattgaatgccagtacttctctagtggatgcacacttgttaaatagtgttaagagatgtggagatgagatatacccctttgatgtagaattattcatttggtttgtttcatacttcattataggaatcaagtaatttgatgactaatgtggattatatttcagtcaaagctctgctttcaatttctctgatttgctcactaatgccttatgtgtgttttactaaccttttatatcttgccttcaagtgagaaggaacaaacaactctcagtggttactacttgcttttatatgctggctgtgaaggttaaaagaaagaatggtctgtaccattttttctgctttgctgcccttttattgtaccccaggcctcctagaggactcctgcagattctattgttgggtgggaaatagtgttggaatgtgtttgcacagtcttatgatattcagtctcagtctgctataggtatttgttattcttggatactacacacctgctcagactgagtaaacatttgtggtgctgtcaacctgatttcttgactctcaaatgatttttgtatttccaatatgaatttgtgtgttatgaatttctgatttctccaatagtatatgccactatataaatttgtattaataaatgacagtcttgttggtttaaaaaaaaaaaaaaaaaaa

SEQ ID NO: 323 - DNA, 1622 bp, Homo sapiens
ggcacgaggcgtgatggtgggcatgggtcagaaggattcctatgtgggcgacgaggcccagagcaagagaggcatcctcaccctgaagtaccccatcgagcacggcatcgtcaccaactgggacgacatggagaaaatctggcaccacaccttctacaatgagctgcgtgtggctcccgaggagcaccccgtgctgctgaccgaggcccccctgaaccccaaggccaaccgcgagaagatgacccagatcatgtttgagaccttcaacaccccagccatgtacgttgctatccaggctgtgctatccctgtacgcctctggccgtaccactggcatcgtgatggactccggtgacggggtcacccacactgtgcccatctacgaggggtatgccctcccccatgccatcctgcgtctggacctggctggccgggacctgactgactacctcatgaagatcctcaccgagcgcggctacagcttcaccaccacggccgagcgggaaatcgtgcgtgacattaaggagaagctgtgctacgtcgccctggacttcgagcaagagatggccacggctgcttccagctcctccctggagaagagctacgagctgcctgacggccaggtcatcaccattggcaatgagcggttccgctgccctgaggcactcttccagccttccttcctgggcatggagtcctgtggcatccacgaaactaccttcaactccatcatgaagtgtgacgtggacatccgcaaagacctgtacgccaacacagtgctgtctggcggcaccaccatgtaccctggcattgccgacaggatgcagaaggagatcactgccctggcacccagcacaatgaagatcaagatcattgctcctcctgagcgcaagtactccgtgtggatcggcggctccatcctggcctcgctgtccaccttccagcagatgtggatcagcaagcaggagtatgacgagtccggcccctccatcgtccaccgcaaatgcttctaggcggactatgacttagttgcgttacaccctttcttgacaaaacctaacttgcgcagaaaacaagatgagattggcatggctttatttgttttttttgttttgttttggttttttttttttttttggcttgactcaggatttaaaaactggaacggtgaaggtgacagcagtcggttggagcgagcatcccccaaagttcacaatgtggccgaggactttgattgcacattgttgtttttttaatagtcattccaaatatgagatgcgttgttacaggaagtcccttgccatcctaaaagccaccccacttctctctaaggagaatggcccagtcctctcccaagtccacacaggggaggtgatagcattgctttcgtgtaaattatgtaatgcaaaatttttttaatcttcgccttaatacttttttattttgttttattttgaatgatgaggcttcgtgcccccccttcccccttttttgtcccccaacttgagatgtatgaaggcttttggtctccctgggagtgggtggaggcagccagggcttacctgtacactgacttgagaccagttgaataaaagtgcacaccttaaaaaaaaaaaaaaaaaa

SEQ ID NO: 324 - DNA, 986 bp, Homo sapiens
ggcacgagccgggacggagagcgcccgccgctgcatttccggcgacacctcgcagtcattcctgcggcttgcgcgcccttgtcgacagccggggccttcgtgagaccgcttgttttctgcaggtgcaggcctggggtagtctcctgtctggacagagaagagaaaaatgcaggacactggctcagtagtgcctttgcattggtttggctttggctacgcagcactggttgcttctggtgggatcattggctatgtaaaagcaggcagcgtgccgtccctggctgcagggctgctctttggcagtctagccggcctgggtgcttaccagctgtctcaggatccaaggaacgtttgggttttcctagctacatctggtaccttggctggcattatgggaatgaggttctaccactctggaaaattcatgcctgcaggtttaattgcaggtgccagtttgctgatggtcgccaaagttggagttagtatgttcaacagaccccattagcagaagtcatgttccagcttagactgatgaagaattaaaaatctgcatcttccactattttcaatatattaagagaaataagtgcagcatttttgcatctgacattttacctaaaaaaaaagacaccaaacttggcagagaggtggaaaatcagtcatgattacaaacctacagaggtggcgagtatgtaacacaagagcttaataagaccctcatagagcttgattcttgtatattgatgttgtcttttctttctgtatctgtaggtaaatctcaagggtaaaatgttaggtgtcagctttcagggctctgaaaccctattccctgctctgaggaacagtgtgaaaaaaagtcttttaggagatttacaatatctgttcttttgctcatcttagaccacagactgactttgaaattatgttaagtgaaatatcaatgaaaataaagtttactataaataataaaaaaaaaaaaaaaaaaa

SEQ ID NO: 325 - DNA, 1031 bp, Homo sapiens
  misc_feature (13)..(13): n equals a,t,g, or c
  misc_feature (15)..(15): n equals a,t,g, or c
  misc_feature (1014)..(1014): n equals a,t,g, or c
gacagtacggtcngnattcccgggtcgacccacgcgtccgctttagagacatgctctttctcatgggacttgaagtggactcatctttgtgcagtgctggttttgccatactcatttcaagtattatagacatatgtaatggtgaaaatatatgaactgtggcctttttcattcttgttacttgtgatgcaattaagtgaagataagaaaaaaaaaaaaaaagcagagatttaccatgtatcagtgcctggctttttgttataaagctttgtttgtctagtgctcttttgctataaaatagactgtagtacaccctagtaggaaaaaaaaaaaactaaatttaaaaataaaaaatatatttggcttatttttcgcaggagcaatccttttataccatgaatattacaaaaaaattgtcagattctgaatattctyctttgtarattttkggaatcattatgagtaaaagttttgttactttattttactatttaaaaagatgttattttaccatgtgttaccaagatgaaactgtatgggtagcttttttgtttgtctagtgctcttttgctataaaatagactgtagtacaccctagtaggaaaaaaaaaaaactaaatttaaaaataaaaaatatatttggcttatttttcgcaggagcaatccttttataccatgaatattacaaaaaaattgtcagattctgaatatttcttctttgtagatttttggaatcattatgagtaaaagtttgttactttattttactatttaaaagatgttattttaccatgtgttaccaagatgaaactgtatgggtagcttttttgtttgttttttgttttgtttttgtttttgtttttgtttttagttgtaggtcgcagcggggaaattttttgcgactgtacacatagctgcagcattaaaaacttaaaaaaattgttaaaaaaaaaaaaaagggaaaacatttcaaaaaaaaaaaaaaacccgggggggggcccggaacccaattcnccccaaagggggccgaa

SEQ ID NO: 326 - DNA, 3872 bp, Homo sapiens
  misc_feature (3865)..(3865): n equals a,t,g, or c
  misc_feature (3868)..(3868): n equals a,t,g, or c
agtagccttcacccccctcaatgcctcccaccccaaaagatctgctgggcccacgttccagcgcaacgcggtggaagacggccctcatgtgccagtgcggaccctcgcgcccctccagcctgcagccagccggccgctcctccagcgcgcaggcgcaggacggaaaaaaaaaacacaaaaaaacaacaaaaaaaaaacccaaaaaaacacaaaccacagctcccagcagccctcgcgccgtccgcgcgcagccgcagagcagaggctgccgggaacgcgggcccagaggcggggcgagcgcgcgcggggcggaagtcggccrccttcctccgtcccggccgttagcccagccaagcccagccaagcccagccaagccccgccgatcgcgggcaccggagccagccccgcagcggagggaccacagagcaccagcctgcatggaacttccttcctcactcagcttcccacgttgccagctgggacaggggagatggagtaattttgctgtggaaagacttcacgtcttgccgaatgaaagtaagcaaagatactgctagagtcrggaatctagagtcgggaattcattaagccaagggagtaagaatggccacagagtagtgaaatactgtttcttctggaaaagtcagcctccagcgcctgcagcttccggaactaagatgtgactgggcttgcggaggcgctgactcctctcctccctccctggctgtgcaggtcccgcctgtctgtcacgctgatgcccgtgcagctgtctgagcacccggaatggaatgagtctatgcactccctccggatcagtgtggggggccttcctgtgctggcgtccatgaccaaggccgcggacccccgcttccgcccccgctggaaggtgatcctgacgttctttgtggstgcygccatcctctggctgctctgctcccaccgcccggcccccggcaggccccccacccacaatgcacacaactggaggctcggccaggcgcccgccaactggtacaatgacacctaccccctgtctcccccacaaaggacaccggctgggattcggtatcgaatcgcagttatcgcagacctggacacagagtcaagggcccaagaggaaaacacctggttcagttacctgaaaaagggctacctgaccctgtcagacagtggggacaaggtggccgtggaatgggacaaagaccatggggtcctggagtcccacctggcggagaaggggagaggcatggagctatccgacctgattgttttcaatgggaaactctactccgtggatgaccggacgggggtcgtctaccagatcgaaggcagcaaagccgtgccctgggtgattctgtccgacggcgacggcaccgtggagaaaggcttcaaggccgaatggctggcagtgaaggacgagcgtctgtacgtgggcggcctgggcaaggagtggacgaccactacgggtgatgtggtgaacgagaacccggagtgggtgaaggtggtgggctacaagggcagcgtggaccacgagaactgggtgtccaactacaacgccctgcgggctgctgccggcatccagccgccaggctacctcatccatgagtctgcctgctggagtgacacgctgcagcgctggttcttcctgccgcgccgcgccagccaggagcgctacagcgagaaggacgacgagcgcaagggcgccaacctgctgctgagcgcctcccctgacttcggcgacatcgctgtgagccacgtcggggcggtggtccccactcacggcttctcgtccttcaagttcatccccaacaccgacgaccagatcattgtggccctcaaatccgaggaggacagcggcagagtcgcctcctacatcatggccttcacgctggacgggcgcttcctgttgccggagaccaagatcggaagcgtgaaatacgaaggcatcgagttcatttaactcaaaacggaaacactgagcaaggccatcaggactcagcttttataaaaacaagaggagtgcacttttgttttgttttgttctttttggaactgtgcctgggttggaggtctggacagggagcccagtcccgggccccatagtggtgcgggcactggacccccgggccccacggaggccgcggtctgaactgctttccatgctgccatctggtggtgatttcggtcacttcaggcattgactcaaggcctgcctaactggctgggtcgtttcttccatccgacctcgtttcttttctttcctatgttcttttgttcagtgaatatccctagagctcctaccatatgtcaggccctatgcctcaccctgagaacgcagtgagcatgaggtggacctgtttgctgggaaccccaggtcacccccttttcttcctactctgtgcctggagcatcatgtccacccctgcagatccttggaaaagaaaatgtttatgttgcagggtattgcatggtcacgagtgagggcaggcccctggggacacatctgcccacagctgcacaggccagggcgcaggcacatctgttggttctcaggcctcagataaaaccatctccgcatcatatggccagtgaccgctttctcccttcaagaaaattctgtggctgtgcagtactttgaagttttaattattaacctgctttaattaaagcagtttcctttcttataaagtggaatcaccaaatcttatcacacagagcacagtcctgtagttacccagcccgctccagcagtgcgggagattgtaaggaagcggtggcggctggtgaagcaagtctcacatgtcggcgttcttggccaatggatacaaagataaagaaaatgttgcctttttctaggaactgtcagaaatcctcatgcctttcaagacttctgtgaatgacttgaattttttattccctgcctagggtctgtgaacgaggcctgtctcttccctggggtttctttccatggcctttatttctcctcttccagtgggagttttgcaggctcttctctgtggaaacttcacgagcgttggctgggcctcggcttcgctggagtgtactccagggtgaaggcagagtgggatttgagacccaggttaggcacgacccaggctgagaagggacgtttccatcattcacagtgccctccccacagcactacctcaccccgacccccaccctcactcctaccccaccccgcgatcgtcaggggtgccacggtgggccggagggtgccggctctggctgtccctgtgccggtccctcacaaacctctccccctttgaaactcaagcacagctgcgaggagggcagcgaggagggacccctctctcatggttgtctctttcccccgctatgtcataggtagtggaggaagcgaaggaagtgaacgctgaatgtgacgcatttctgaagagctcagctgtcaccgggcatagcctggaagccccaagtctgttctgactttgcctggctgtctccttgacccgcctcctagatcattgtccttgatgtccaggctgggtcatttaaaatagagatgcaatcaggaaggttgggggacttgggactgtggctgaattgagaccttgctgatgtattcatgtcagcacctgagtcacagcccaggtgcccggaagcagcctcttcgcataggcagtgatttgcgattactttaaagctcaccttttttcttcccctctctgttcgctgctgtcagcataatgattgtgttccttccctatgggatccatctgttttgtaaacaataaagcgtctgagggagtgtaaaaaaaaaaaaaaaaaaaaaaaaaaaaaaaaaaaaaaaaaaaaaaaaaaaaaaacaaaaaaaaaaaaaanagnagag

SEQ ID NO: 327 - DNA, 6224 bp, Homo sapiens
tgcgcgctgtgagcagggggtgccggcggggctgcagcggaggcactttggaagaatgactctggagtccatcatggcgtgctgcctgagcgaggaggccaaggaagcccggcggatcaacgacgagatcgagcggcagctccgcagggacaagcgggacgcccgccgggagctcaagctgctgctgctcgggacaggagagagtggcaagagtacgtttatcaagcagatgagaatcatccatgggtcaggatactctgatgaagataaaaggggcttcaccaagctggtgtatcagaacatcttcacggccatgcaggccatgatcagagccatggacacactcaagatcccatacaagtatgagcacaataaggctcatgcacaattagttcgagaagttgatgtggagaaggtgtctgcttttgagaatccatatgtagatgcaataaagagtttatggaatgatcctggaatccaggaatgctatgatagacgacgagaatatcaattatctgactctaccaaatactatcttaatgacttggaccgcgtagctgaccctgcctacctgcctacgcaacaagatgtgcttagagttcgagtccccaccacagggatcatcgaatacccctttgacttacaaagtgtcattttcagaatggtcgatgtagggggccaaaggtcagagagaagaaaatggatacactgctttgaaaatgtcacctctatcatgtttctagtagcgcttagtgaatatgatcaagttctcgtggagtcagacaatgagaaccgaatggaggaaagcaaggctctctttagaacaattatcacatacccctggttccagaactcctcggttattctgttcttaaacaagaaagatcttctagaggagaaaatcatgtattcccatctagtcgactacttcccagaatatgatggaccccagagagatgcccaggcagcccgagaattcattctgaagatgttcgtggacctgaacccagacagtgacaaaattatctactcccacttcacgtgcgccacagacaccgagaatatccgctttgtctttgctgccgtcaaggacaccatcctccagttgaacctgaaggagtacaatctggtctaattgtgcctcctagacacccgccctgcccttccctggtgggctattgaagatacacaagagggactgtatttctgtggaaaacaatttgcataatactaatttattgccgtcctggactctgtgtgagcgtgtccacagagtttgtagtaaatattatgattttatttaaactattcagaggaaaaacagaggatgctgaagtacagtcccagcacatttcctctctatcttttttttaggcaaaaccttgtgactcagtgtattttaaattctcagtcatgcactcacaaagataagacttgtttctttctgtctctctctctttttcttttctatggagcaaaacaaagctgatttcccttttttcttcccccgctaattcatacctccctcctgatgtttttcccaggttacaatggcctttatcctagttccattcttggtcaagtttttctctcaaatgatacagtcaggacacatcgttcgatttaagccatcatcagcttaatttaagtttgtagtttttgctgaaggattatatgtattaatacttacggttttaaatgtgttgctttggatacacacatagtttcttttttaatagaatatactgtcttgtctcactttggactgggacagtggatgcccatctaaaagttaagtgtcatttcttttagatgtttaccttcagccatagcttgattgctcagagaaatatgcagaaggcaggatcaaagacacacaggagtcctttcttttgaaatgccacgtgccattgtctttcctcccttctttgcttctttttcttaccctctctttcaattgcagatgccaaaaaagatgccaacagacactacattaccctaatggctgctacccagaacctttttataggttgttcttaatttttttgttgttgttgttcaagcttttcctttcttttttttcttagtgtttgggccacgattttaaaatgacttttattatgggtatgtgttgccaaagctggctttttgtcaaataaaatgaatacgaacttaaaaaataaaagctggtatcttaaaatgtaagagagtaagactgtgaagcctaaaatgactggctgagaatgaaccagaaatgccatttgccaaacagttgtaactagaaatttgattctcacagtccattcttttctttgtccttaagatgacattgttagtgttcacgtcccatgttcagtgtccaaaccggcaatgtaaaaagtatcctgtgtggcttaacaggaaatctgtttatgtctctttatttgaaaccagttttactctcagtggttctttaagttcaatgaagtctgccaggaacattggttggtagtattattccgacacctttaatttccaaaatctgaagttcctgctagtttaccaccttcatgatcttcttgaactggtaactgattaggttgaacttatggaagatttgtggacttaactcaaaagtaacctctcagtgttctatagaacatgtatttgtgtaactgaacctaccaggagaaatgtttggaattctatatgtgcaatttttcaacaaatgcaaaaaaaatacagcacatgtattgacaagcttctgtcaagcagcttgagttgaaatttgatttaagaaaataaatcatgattgttcaaagctgctgggacgttagaattaggccatgatactggtctcattttaactacagtggtatttggcactagtgtaaacttccatataaatcactcttttggaacaacaaagggggagggagaaaaatcacggcctgttaaatgagtaccaaagccgcccaacagtaatgagatgttctcatccttgattctcccagcctcaaacaacacagcttactttttttttcccttgctcagaaagtacctgtaatttaacaaacagactgcctgtaggtatagtgcaattacaaatgctctaatcattgtacatacatctctcttgatattgcagcatccatactggctttgtaatcattaattttttggcagattgaatgtgctgtattgatatgtatctatgtaattgtattgtatgtctatagctaattcacgttttgaataatgttattttatttacttttttaagagaggagaatgtaaatttgtcagtttatttctgactagggatattttctttccatttagaaaagaagaaaaaaaaaaaaccttactgtcatacagagcggtactagcgtcgtgctgtataaaatcatttgcacattcctgagtagaggtatactgattataagacccaaaggtaatttcatagcaaaatacataaaatcagtcggagcttttatacaaacatggaaaccaactttgtagaacttttgccatttgatctaggattggaatatgagcttttatacaattcatattcttatttggcaaatgcacagtttagtattacctctctgatggcctttactagaaaggcagttttagaagctattgtgatccactaaggaaatgttttaacagctagagaccactgcttgcctgaaagggcgttcttaaatttggtgcagcaaaaaaaaaaaaaaaaaaaaaaaaaaaattaaacaacaacatttgaaggcctacagtgtgtatagagaaaacctcatcacaagatcataagtgttacagttttagggaatcaagatattctatttaatagagctatagtaaatgtagtcaattaaacctgatctcaaagcttgaagaagctgagcaaaacagggaaagattgttatatttgtctttatgaaattgggatggaatttgctatgcagaattgaggtttgtggctttgctgttcctgtagggtgcatgacaagatcccttctcttgagaaaggaaaaaattgatcaccctagcagcagtgatgcatagaaacctaattttagccacaccagtcaatcgaagctaaaggattttcttttttgtttcttcggggttttattgaaggggctaggggcgggacgggattcttttcagttttgtataaaaacaaagtttactcatgctttatattatattgtgattgcaagcgttataagcgtgtgccactggcctcctattgttgatgcttaggtaatggaggcctgtggtgagttttatggtgacttgggcatgtcttattcaaaaacaaaaacataaaacacagaaacctttcttcagcataccaaggcaagcagccatttcatgactcacttaacacattgcagtgtaccagtttacagatgatttttccctttttgcgtgacatggcagttctaacccccagagaattccttatttgtaaattggaagtttctactatgccttacagagcttaaattcagaagtttgtgcctcatatctgaaacaaagggaaataacacacccattcaaaagtaaataaatctcctagaagtttttgtttttaacatttccatataaagagctctgttgaatgtcatgaatagactggaaaaaaaaattttaagaacctgcatatgttgtttactagcagatgacaactacaaaaggaatctgaagaacacgtaaaacttgtatttttttttttttggtagattaactagcaggcctattttaaaaaggtaattcagctaaagggcaatttacttttttgtacttcagactatcttgattgtcaaagtgtacgaactgtaattttaaaatttatactgccacatgattgtaaattttagttgtcttaagttaggaattggtgaaaagctatttatgctggatttgggtcaaaatgacttatttgcaaaaaaataaataatgggaagaaagggctgtataatgaaatactgcaagactcacatattggttggaaatttccctcaaatcacctaccgattacccttgatttccctttgttttcagtttctcaaaacgaatgaaatgaaatatagcagaatgttaacccatataaaaataaagtgtacccaaatattgtaatgtatattgctgctcttcttcaaattaaataagggtttaaaaccacttaattggtaatcaacatctcaattgatacaaataaggtgtgcttggtatacattaatattttcttccaaagatatatctttggttagaaacacaaaaaaataaaactagtaatattgtatgtttatctatctctacatatttccagcatatgtagcgttaatagatctgtcctggtaactgtgtctttgggatttcattttggttccatcaaattaggaaaagaaatggcttagttgtatatgattagctagagatttttggagccagacacctgctgtttagtagataacttagtacagaccctaaacttgtcatttgtttttctcacagaatagccatttcctgctgtcttcccaatgatcactgccctttcaataacactcttgcctctagaatcatatgttcaaagtatgaatacacacctagcacatagtaggtgctcaaatattaatttcctccttgccttccttatctaccctgtgtcctccatttccccgtatgattccaacccaatatagcaaatgacatttacatgttatgaaaacatctattgggtaaaatcagatcttggataaagaaattctgacttttatataagcttttggtagacagaaaaaacagaaaggtattcgttggtagaacatttttaagttcaggaaagaaagctggaataatactacgtaactttgtccaggttactttgactgaaacacgtttttggtggatttcttttcctcaaagaactctctaaatgcaactccttgctggattcctcacccatcatcctgttggaaacccttactagacctatgtatttagggagttttgtcagaaaacatttttaacttgcagtatttaaaagaatatttactgttcctaaaatgtcattcaaatgcatgtactgtctattgtttggggatgggaactagttttgcaaaaaacacctaatgttgtataataatgccccaatgatcttgctggttaaaaatacagtatttttggccataaaaaaaaaaaaaaaaaaaaaaaaggggaggccctttaaa

SEQ ID NO: 328 - DNA, 1795 bp, Homo sapiens
  misc_feature (51)..(51): n equals a,t,g, or c
tcatttctccgaagcgggcccccaagttgttgatgggaaatctgcaagaantcgggctttctgggttcggcccaccctctgaagggttccaagaatcgatagtgaattcgtgggtccttccaccatgcactygctgggcttcttctctgtggcgtgttctctgctcgccgctgcgctgctcccgggtcctcgcgaggcgcccgccgccgccgccgccttcgagtccggactcgacctctcggacgcggagcccgacgcgggcgaggccacggcttatgcaagcaaagatctggaggagcagttacggtctgtgtccagtgtagatgaactcatgactgtactctacccagaatattggaaaatgtacaagtgtcagctaaggaaaggaggctggcaacataacagagaacaggccaacctcaactcaaggacagaagagactataaaatttgctgcagcacattataatacagagatcttgaaaagtattgataatgagtggagaaagactcaatgcatgccacgggaggtgtgtatagatgtggggaaggagtttggagtcgcgacaaacaccttctttaaacctccatgtgtgtccgtctacagatgtgggggttgctgcaatagtgaggggctgcagtgcatgaacaccagcacgagctacctcagcaagacgttatttgaaattacagtgcctctctctcaaggccccaaaccagtaacaatcagttttgccaatcacacttcctgccgatgcatgtctaaactggatgtttacagacaagttcattccattattagacgttccctgccagcaacactaccacagtgtcaggcagcgaacaagacctgccccaccaattacatgtggaataatcacatctgcagatgcctggctcaggaagattttatgttttcctcggatgctggagatgactcaacagatggattccatgacatctgtggaccaaacaaggagctggatgaagagacctgtcagtgtgtctgcagagcggggcttcggcctgccagctgtggaccccacaaagaactagacagaaactcatgccagtgtgtctgtaaaaacaaactcttccccagccaatgtggggccaaccgagaatttgatgaaaacacatgccagtgtgtatgtaaaagaacctgccccagaaatcaacccctaaatcctggaaaatgtgcctgtgaatgtacagaaagtccacagaaatgcttgttaaaaggaaagaagttccaccaccaaacatgcagctgttacagacggccatgtacgaaccgccagaaggcttgtgagccaggattttcatatagtgaagaagtgtgtcgttgtgtcccttcatattggaaaagaccacaaatgagctaagattgtactgttttccagttcatcgattttctattatggaaaactgtgttgccacagtagaactgtctgtgaacagagagacccttgtgggtccatgctaacaaagacaaaagtctgtctttcctgaaccatgtggataactttacagaaatggactggagctcatctgcaaaaggcctcttgtaaagactggttttctgccaatgaccaaacagccaagattttcctcttgtgatttctttaaaagaatgactatataatttatttccactaaaaatattgtttctgcattcatttttatagcaacaacaattggtaaaactcactgtgatcaatatttttatatcatgcaaaatatgtttaaaataaaatgaaaattgtattataaaaaaaaaaaaaaaaaactcgcag

SEQ ID NO: 329 - DNA, 2300 bp, Homo sapiens
  misc_feature (621)..(621): n equals a,t,g, or c
  misc_feature (2293)..(2293): n equals a,t,g, or c
gaattcggcacgagccactgggacatgtcgctgccgctcatcgtgactctgagcactatctccatcatcctcctagcggccatgatcaccatcgccgtcaagtgcaagcgcgagaacaaggagatccgcacttacaactgccgcatcgccgagtacagccacccgcagctgggtgggggcaagggcaagaagaagaagatcaacaaaaatgatatcatgctggtgcagagcgaagtggaggagaggaacgccatgaacgtcatgaacgtggtgagcagcccctccctggccacctcccccatgtacttcgactaccagacccgcctgcccctcagctcgccccggtcggaggtgatgtatctcaaaccggcctccaacaacctgactgtccctcaggggcacgcgggctgccacaccagcttcaccggacaagggactaatgcaagcgagacccctgccactcggatgtccataattcagacagacaattttcccgcagagcccaattacatgggcagcaggcagcagtttgttcaaagtagctccacgtttaaggacccagaaagagccagcctgagagacagtgggcacggggacagtgatcaggctgacagtgaccangacactaacaaaggctcctgctgtgacatgtctgttagggaggcactcaagatgaaaactacttcaactaaaagccaaccacttgaacaagaaccagaagagtgtgttaattgcacagatgaatgccgagtgcttggtcattctgacaggtgctggatgccacagttccctgcagccaatcaggctgaaaatgcagattaccgcacaaatctctttgtacctacagttgaagctaatgttgagactgagacttacgaaactgtgaatcccactgggaaaaagactttttgtacatttggaaaagacaagcgagagcacactattctcattgccaacgttaaaccttatttaaaagccaaacgtgccctgagccctctcctccaagaggtcccctcagcatcaagcagcccaaccaaggcgtgcatcgagccttgcacctcaacaaaaggctccctggatggctgtgaagcaaaaccaggagccctggctgaagcaagcagtcagtacttgcccactgacagtcaatatctgtcacctagtaagcaaccaagagaccctcccttcatggcttccgatcagatggcaagggtctttgcagatgtgcattccagagccagccgggattccagtgagatgggtgctgttcttgagcagcttgaccaccccaacagggatctgggcagagagtctgtggatgcagaggaagttgtgagagaaattgataagcttttgcaagactgccggggaaacgaccctgtggctgtgagaaagtgaaaaaaraaaaaaaaaaaaggcattggcattttcttgtctcttctgttgatttaaaaatgatccctcctggtgataacccattttacagggatgaagaaagaccaatgctgctttaaggcttttagtgaacatctgaagtgcccacaagtatgttctttccactgctgatttctttttcagagataacaatggtttcgttttgaccaaacttgtattaggacagaattaatgatgcttaaagagaaaagaaaaaaaragagaagaaaaaggagagatgaaaaaggaggatgaggagaagaattaccttttgacaatctgttaggaaggtatgcagtgtgagaactgaagtatttctgatcactctcagactgtcctccgtgatttatgctgacttaactgtttacctataaaccccatacaaagcagggtcataatttgtgatctgtggtggatttctagcagtcatcacaggcttctactgaaagtcctgaaaagaccttgcagtagtccaagctacaccaaacattaacacatatttgtggtaaacatttctgtataaagttacctgacacacatataaacacaaggaacattccatatcattagtcgaaaacaaaaacaaaaaaaaaaccttyggtcatttgtaakacatctcatgtcatataaaagttaaatgtaaaaagatacagtccattttgtcctgcacacacgtagactaattcacgtcattaaagaagaagaaaacttaaagatttaaaatgcctatttagcattttagtgtccaacaaagatttaaacaatgatgaatatgttttaaatttgacatagaaaagttctaaaaaatagttaccattgagtggtaagattcagagaaaattaacttgattaatatgttttnaaaaaaa

SEQ ID NO: 330 - DNA, 1823 bp, Homo sapiens
ggcacgagattcagattttctatttcttcttgtgctagtattggtaatttgtgtcttggtaggaatttatctatttaagttatataatttgttggcatatacttgtttataggtttccttatgatactattaatttatataagtttgtttgtgttatcttctctttcagtcctaatgttactaatttatgtcttccttttttgttggtcattctagccaaaggcttgtcaatttgttgatcagatttaagaaataacttttggttttgttattttctatttagtttatttgaagtctaatgttcattttttctttccttctgtttgcttttggtttagtttgctcttcttttcctactttattaaggttaaaggttgggttactgatttgagaacttttttagcattttatagaaattattttccttccaaacacgcttaaggtgcatcacataagtttggtatgtttttttattttcattcatctcaacatcttttctaatttcccttttgatttattctaaaacccactggttgtttaggagcacattaatttccacatatttttgaatttacaaattttccttttactactgatttctaatctcactctactgtggttgaaggacatatgtatataatttcaataattctaagtttattgtgggttattttaaggccttgcttatatactctcctagagaatgtttcatacatgcacttaggaagagtgtatattcttctattgtgctgtaaattgatttacagatatgtgttaagtttagttggtttatattattattattcaagttttctatacctccgttcttttgcctatatattttattcattattcaatgtgtgatattggaattctcaactatttttttaaatcatatatttatttcttcaattatgtcatttcttttgcctcatgtattttgggattcttctgttatatgcatgcacatttataattgttatattttcccaatggattgatattttatcattataaaatatctctttttatcgctatcaacatttttgaccaaaaaactattttgtctgatattagcatagcccctccagatctcttatggctgttttcgcacaacatcggtttccgcctttttagtttcaacctatttgtatctttgaaagcaaagtatgtcttttgtagacaccataagtaggattggatcttgtttttctatcagacaatctctgccttttgattggatagtttaattgattcacatttaatattattattgatatgctttgatttatgtttacaattgtgcttttggtttctatatattttgtgtcttttgtgttcctctagtccttttttctgtcttatattaagtagttattttctagagtaactttttcatttctttaatggttttcactacattttttagcaattttcctggttgttgctttgacttatggattatatgtcaagttaaactacttcaaataattccaataagatagaaaatcttagttcctttatagcttctgtacctcccaccccctttgcgatattgtatatactacatctattcatattacaaaaaacaatatagtattacaattattgctttacataattgtgtgtcttttaaagaaggtaagagaataaaggagaaaaaaatatatttataccatttttatattaaccttatttaccatttctgtctttgtgtatttctcctgatgaagtcaggttattgtgtggtgatatctctttactccagcctgggcgcaacagagtgagtctctgtctcaccaaaaaaaaaaaaaaaaaaaaaa

SEQ ID NO: 331 - DNA, 1698 bp, Homo sapiens
gtcgctcaccacccaaatcgtcgctgggagagaccmacccggcgactgcgcgttcgcactcgagtctgcgttaggaagcctctgaccctttcccgggcccctgcgcgtggaagcctcggacacaactcggagaaccagcgaaccccggcagcacagaattcgaaccgccgcgggagccgttgggacgcgcctacccggtcactgccccgccccggcgcagactgcgtgaggcgcgccgraggcgcggggcttgccggggatcgtggtcggcgagcgcgcccgagcccactagcggagcccgcccgggactacatttcccacaattaccgccatgatgcccattggtgggggaagccatgggaaccggaggccgtcagggggagaggcgggcggcgctcacgcctggcctgagggggccgagactgaggcggttgcggaataggactgctagccccgcccagagtccctaccctttggagaactgcgcttctctttcggagggagtgttcgccgccgccgcggccgccacctggagtttcttcagactccagatttccctgtcaaccacgaggagtccagagaggaaacgcggagcggagacaacagtacctgacgcctctttcagcccgggatcgccccagcagggatgggcgacaagatctggctgcccttccccgtgctccttctggccgctctgcctccggtgctgctgcctggggcggccggcttcacaccttccctcgatagcgacttcacctttacccttcccgccggccagaaggagtgcttctaccagcccatgcccctgaaggcctcgctggagatcgagtaccaagttttagatggagcaggattagatattgatttccatcttgcctctccagaaggcaaaaccttagtttttgaacaaagaaaatcagatggagttcacactgtagagactgaagttggtgattacatgttctgctttgacaatacattcagcaccatttctgagaaggtgattttctttgaattaatcctggataatatgggagaacaggcacaagaacaagaagattggaagaaatatattactggcacagatatattggatatgaaactggaagacatcctggaatccatcaacagcatcaagtccagactaagcaaaagtgggcacatacaaaytctgcttagagcatttgaagctcgtgatcgaaacatacaagaaagcaactttgatagagtcaatttctggtctatggttaatttagtggtcatggtggtggtgtcagccattcaagtttatatgctgaagagtctgtttgaagataagaggaaaagtagaacttaaaactccaaactagagtacgtaacattgaaaaatgaggcataaaaatgcaataaactgttacagtcaagaccattaatggtcttctccaaaatattttgagatataaaagtaggaaacaggtataattttaatgtgaaaattaagtcttcactttctgtgcaagtaatcctgctgatccagttgtacttaagtgtgtaacaggaatattttgcagaatataggtttaactgaatgaagccatattaataactgcattttcctaactttgaaaaattttgcaaatgtcttaggtgatttaaataaatgagtattgggcctaattgcaaaaaaaaaaaaaaaaaaaaaaaaaaaaaaaaactcga

SEQ ID NO: 332 - DNA, 2079 bp, Homo sapiens
  misc_feature (1813)..(1813): n equals a,t,g, or c
  misc_feature (1862)..(1862): n equals a,t,g, or c
  misc_feature (1904)..(1904): n equals a,t,g, or c
  misc_feature (1927)..(1927): n equals a,t,g, or c
  misc_feature (1950)..(1950): n equals a,t,g, or c
  misc_feature (1957)..(1957): n equals a,t,g, or c
  misc_feature (1964)..(1964): n equals a,t,g, or c
  misc_feature (1975)..(1975): n equals a,t,g, or c
  misc_feature (1980)..(1980): n equals a,t,g, or c
  misc_feature (1990)..(1990): n equals a,t,g, or c
  misc_feature (1994)..(1994): n equals a,t,g, or c
  misc_feature (1999)..(1999): n equals a,t,g, or c
  misc_feature (2003)..(2003): n equals a,t,g, or c
  misc_feature (2005)..(2005): n equals a,t,g, or c
  misc_feature (2009)..(2009): n equals a,t,g, or c
  misc_feature (2016)..(2016): n equals a,t,g, or c
  misc_feature (2021)..(2021): n equals a,t,g, or c
  misc_feature (2046)..(2046): n equals a,t,g, or c
  misc_feature (2068)..(2068): n equals a,t,g, or c
  misc_feature (2074)..(2074): n equals a,t,g, or c
gaattcggcacgagcagcggtggggaaaagcggattccgcccgaaccacaccgaggggagctcgtggtcgagacttgccgccctaagcactctcccaagtccgacccgctcggcgaggacttccgtcttctgagcgaaccttgtcaagcaagctgggatctatgagtggaaaggtgaccaagcccaaagaggagaaagatgcttctaaggttctggatgacgccccccctggcacacaggaatacattatgttacgacaagattccatccaatctgcggaattaaagaaaaaagagtccccctttcgtgctaagtgtcacgaaatcttctgctgcccgctgaagcaagtacaccacaaagagaacacagagccggaagagcctcagcttaagggtatagttaccaagctatacagccgacaaggctaccacttgcagctgcaggcggatggaaccattgatggcaccaaagatgaggacagcacttacactctgtttaacctcatccctgtgggtctgcgagtggtggctatccaaggagttcaaaccaagctgtacttggcaatgaacagtgagggatacttgtacacctcggaacttttcacacctgagtgcaaattcaaagaatcagtgtttgaaaattattatgtgacatattcatcaatgatataccgtcagcagcagtcaggccgagggtggtatctgggtctgaacaaagaaggagagatcatgaaaggcaaccatgtgaagaagaacaagcctgcagctcattttctgcctaaaccactgaaagtggccatgtacaaggagccatcactgcacgatctcacggagttctcccgatctggaagcgggaccccaaccaagagcagaagtgtctctggcgtgctgaacggaggcaaatccatgagccacaatgaatcaacgtagccagtgagggcaaaagaagggctctgtaacagaaccttacctccaggtgctgttgaattcttctagcagtccttcaccaaaagttcaaatgtgtcagtgacatttaccaaacaaacaggcagagttcactattctatctgccattagaccttcttatcatccatactaaagccccattatttagattgagcttgtgcataagaatgccaagcattttagtgaactaaatctgagagaaggactgccaaattttctcatgatctcacctatacttggggatgataatccaaaagtatttcacagcactaatgctgatcaaaattgctctcccaccaagaaaatgtaaaagaccacaattgttcttcaaaaacaaacaaaacaaaacaaaacaaaattatctgcttaaatgttgtggtcggggcaaacaaaattatgtgaattgtgttgttttcttggcttgatgttttctttctacgcttggattcacatgtactcttcttctttttcttgccttggaagattatgatttctgaaattcaatggttctattgactttttgcgtcacttaatccaaatcaaccaaattcagggttgaatctgaattggcttctcaggctcaaggtaacagtgttcttgtggtttgaccaattgtttttctttctcttcctttcttgttgtggtatcctggtcaagttattgtgctgtactttggcgtagaaattgagttgtattgtcaaccccagtcagtaaagagaacttcaaaaaattatcctcaagtgtagatttctcttaattccatttgtgtatcatgttaaactattgttgtggcttcttgtgtaaagacaggaactcgtggaactgtgatgttgtctttttggcgttgnttaaaataagaaatgtctcatctcgcatattgtatgaagtctttccctngtcattggtattttggggaacatgaatatctggtggtacaanggaatttgctaagactgggcttntcccctccaaaaaacatattttnatccctngctactngaaaaagcccnctcanagattttagntagngtctncccnantganaaccttnccacntccctctctgggaattggaaagaanagttggggcttcccttggggantaggangctgg

SEQ ID NO: 333 - DNA, 1664 bp, Homo sapiens
gtcatggggatccagacgagccccgtcctgctggcctccctgggggtggggctggtcactctgctcggcctggctgtgggctcctacttggttcggaggtcccgccggcctcaggtcactctcctggaccccaatgaaaagtacctgctacgactgctagacaagacgactgtgagccacaacaccaagaggttccgctttgccctgcccaccgcccaccacactctggggctgcctgtgggcaaacatatctacctctccacccgaattgatggcagcctggtcatcaggccatacactcctgtcaccagtgatgaggatcaaggctatgtggatcttgtcatcaaggtctacctgaagggtgtgcaccccaaatttcctgagggagggaagatgtctcagtacctggatagcctgaaggttggggatgtggtggagtttcgggggccaagcgggttgctcacttacactggaaaagggcattttaacattcagcccaacaagaaatctccaccagaaccccgagtggcgaagaaactgggaatgattgccggcgggacaggaatcaccccaatgctacagctgatccgggccatcctgaaagtccctgaagatccaacccagtgctttctgctttttgccaaccagacagaaaaggatatcatcttgcgggaggacttagaggaactgcaggcccgctatcccaatcgctttaagctctggttcactctggatcatcccccaaaagattgggcctacagcaagggctttgtgactgccgacatgatccgggaacacctgcccgctccaggggatgatgtgctggtactgctttgtgggccacccccaatggtgcagctggcctgccatcccaacttggacaaactgggctactcacaaaagatgcgattcacctactgagcatcctccagcttccctggtgctgttcgctgcagttgttccccatcagtactcaagcactataagccttagattcctttcctcagagtttcaggttttttcagttacatctagagctgaaatctggatagtacctgcaggaacaatattcctgtagccatggaagagggccaaggctcagtcactccttggatggcctcctaaatctccccgtggcaacaggtccaggagaggcccatggagcagtctcttccatggagtaagaaggaagggagcatgtacgcttggtccaagattggctagttccttgatagcatcttactctcaccttctttgtgtctgtgatgaaaggaacagtctgtgcaatgggttttacttaaacttcactgttcaacctatgagcaaatctgtatgtgtgagtataagttgagcatagcatacttccagaggtggtcttatggagatggcaagaaaggaggaaatgatttcttcagatctcaaaggagtctgaaatatcatatttctgtgtgtgtctctctcagcccctgcccaggctagagggaaacagctactgataatcgaaaactgctgtttgtggcaggaacccctggctgtgcaaataaatggggctgaggcccctgtgtgatattgaaaaaaaaaaaaaaaaaaaaaaaaaaaaaaaaaaaaaactcgagggggggtcccggtacccaattcgtccctcatcgtgcagtgcgtattac

SEQ ID NO: 334 - DNA, 2954 bp, Homo sapiens
  misc_feature (8)..(8): n equals a,t,g, or c
agctattnaggtgacactatagaaggtacgcctgcaggtaccggtccggaattcccgggtcgacccacgcgtccgcattgctgtaatttatgggcgatatctacggaaactgaccaaagtcactcaggattccctggcacaagccactcagctagctgaggaacgtattggaaatgtaagaactgttcgagcttttgggaaagaaatgactgaaatcgagaaatatgccagcaaagtggaccatgtaatgcagttagcaaggaaagaggcattcgcccgggctggtttctttggagcaactgggctctccggaaacctgatcgtgctttctgtcctgtacaaaggagggctgctgatgggcagtgcccacatgaccgtgggtgaactctcttccttcctaatgtatgctttctgggttggaataagcattggaggtctgagctctttctactcggagctgatgaaaggactgggtgcaggggggcgcctctgggagctcctggagagagagcccaagctgccttttaacgagggggtcatcttaaatgagaaaagcttccagggtgctttggagtttaagaacgtgcattttgcctatccagctcgcccagaggtgcccatatttcaggatttcagcctttccattccgtcaggatctgtcacggcactggttggcccaagtggttctggcaaatcaacagtgctttcactcctgctgaggttgtacgaccctgcttctggaactattagtcttgatggccatgacatccgtcagctaaacccagtgtggctgagatccaaaattgggacagtgagtcaggaacccattttgttttcttgctctattgctgagaacattgcttatggtgctgatgacccttcctctgtgaccgctgaggaaatccagagagtggctgaagtggccaatgcagtggccttcatccggaatttcccccaagggttcaacactgtggttggagaaaagggtgttctcctctcaggtgggcagaaacagcggattgcgattgcccgtgctctgctaaagaatcccaaaattcttctcctagatgaagcaaccagtgcgctggatgccgaaaatgagtaccttgttcaagaagctctagatcgactgatggatggaagaacggtgttagttattgcccatcgtctgtccaccattaagaatgctaatatggttgctgttcttgaccaaggaaaaattactgaatatggaaaacatgaagagctgctttcaaaaccaaatgggatatacagaaaactaatgaacaaacaaagttttatttcagcataaggaagcaattactggtaaacaatatgagactttaatgcaaaacagtgttgcagaaaaaaaactcagagactatgaaatacataaaccatatatcaagttatttgaaaaatacctatttttttccaaagtgtgtaaaagattgttttgaaacgtacctgttctcaagatctttttattcagagttttaataattgtaactttttaaatgtctatagcactgaagttattttcaggttttgtattttcttttcttgtggaatattttaattaatatagcatggcacctcattttcttttgcctgctgttaaagattgaagctattgtcaaatgacaactttaaaaaggcaattataaataaaaagcctgattattttaggccagtttaccaatcactgtgtaattcttctggtagtattctacctacttttaagtctaattttacagatagaataatggaaattgaaaatttaaccctttattccgataatctcatgaagcaaacctaactatttaacatcagctggaaagaagggaacatttatattgcccatctcctgtgtcttcaaaggtgtgagagctgaggaatatgtgttcctatgggaactatgtttgaatatgtgcagttttcaacattttggcacatgaaagcctgacaagtttttaaaagggcagaagctttattttttgaacaggaaaacatgttttttaaattcacatgtttgtatgagtacttttgcgaagcaaggcatgaactgctaggtattattaagaatgaatgatttttgcatttaagttgtttgaaggcatgtattttgaaaaatatctgttacaaatttataatttcaagacaaattgaatcttattttataatacttttggaatttcattaataaggctaaaatttgaggaatataactaattttcagccttaagacatttaagtttggaagtccttgctattcaacagaataacaagaaaacttcagaatgtatcactctcctgaaaagaagatattaataagcccttttatttatggttatagttttatttatagtctcaaaattcctaaagcaatgctacaaccattgaatttgccatattttgtatcagtgctgttaatttgctgttgcctcaagaaaaagtgctttttctccatggatgaggctagaccctaagaagtaattaagtcaatgtaaatcaaatggaagttttcccatgaactaagcatttattagttccctgattagactggaagaagaaaccactatttcatgaaaagcatggaatattatattttattgttcataattaatgaataaaattgatatgaatgaatrtagtgttctttgaattagtaaacagtacatctgtgacaatcatttttaacaagctctacttgtgttctttataaagtgtgattttcagaaagcaaacaacacaattacaaggttgaatctgaggaaaataatccttgtgccatagaagtatttacgaaattgcatttcattgttatgttttattttctgatacatgatgttcaattttatctttaggtaatattttatatcatagattaaaatttatagtgaactttaaaaaaaaaaaaaaaaaaaaaaaaaaaaaaaaaaaaaaaaaaaaag

SEQ ID NO: 335 - DNA, 1245 bp, Homo sapiens
ggcacgaggacaacagtacctgacgcctctttcagcccgggatcgccccagcagggatgggcgacaagatctggctgcccttccccgtgctccttctggccgctctgcctccggtgctgctgcctggggcggccggcttcacaccttccctcgatagcgacttcacctttacccttcccgccggccagaaggagtgcttctaccagcccatgcccctgaaggcctcgctggagatcgagtaccaagttttagatggagcaggattagatattgatttccatcttgcctctccagaaggcaaaaccttagtttttgaacaaagaaaatcagatggagttcacactgtagagactgaagttggtgattacatgttctgctttgacaatacattcagcaccatttctgagaaggtgattttctttgaattaatcctggataatatgggagaacaggcacaagaacaagaagattggaagaaatatattactggcacagatatattggatatgaaactggaagacatcctggaatccatcaacagcatcaagtccagactaagcaaaagtgggcacatacaaactctgcttagagcatttgaagctcgtgatcgaaacatacaagaaagcaactttgatagagtcaatttctggtctatggttaatttagtggtcatggtggtggtgtcagccattcaagtttatatgctgaagagtctgtttgaagataagaggaaaagtagaacttaaaactccaaactagagtacgtaacattgaaaaatgaggcataaaaatgcaataaactgttacagtcaagaccattaatggtcttctccaaaatattttgagatataaaagtaggaaacaggtataattttaatgtgaaaattaagtcttcactttctgtgcaagtaatcctgctgatccagttgtacttaagtgtgtaacaggaatattttgcagaatataggtttaactgaatgaagccatattaataactgcattttcctaactttgaaaaattttgcaaatgtcttaggtgatttaaataaatgagtattgggcctaattgcaacaccagtctgtttttaacaggttctattacccagaacttttttgtaaatgcggcagttacaaattaactgtggaagttttcagttttaagttataaatcacctgagaattacctaatgatggattgaataaatctttagactacaaaaaaaaaaaaaaaaaaaaaaaaaaaaa

SEQ ID NO: 336 - DNA, 1204 bp, Homo sapiens
ttttttttttttttttttttttcccaaccctaaaattattttttattatacagataatatacaataatrgkggaaaactaraaaatgctaaacagggaaaaagaaaataaaaccmcccatatttgtaacatccagacacaacgagtgctcacatcctgataaatcactttccagattttmttctgtgcatagatgcatgtgggaaccatgctgtattctgccaaaatggttcaccgtgagatctggcagcgccccatgcagmatcgggagctttgtyttgtccccccgccaagwccatgtcattacccyttctgytttggctggractgaaattgtgygcctgtgttgtgaasacagggctwctgatacagaawaaggaactaagacccctcycctatcaccctgtgttccttacccctccacccccaactagattccaataggagagccccaggctyttctctcaaggtccccaaacctcccaccctcagaggctgtggccagagtacctaatgctcactgtgctcagcaggtcctgaccacgaccctgactcagagctgagggcctccttcctgccactagaggccccacacggccattaggccgtacccacaggaagaggctggagcggaaagtgggaagcgaacctcgaaggaagagcagccaggcccggggcactgtcacttgccgtcccctctgcagctccaggtgtgtggtttgtgtggctgtggtcagagcagcaccttggccagagtccagggcctgtggtttcacatgcccaacccagctcagcagcaggatgaggaccacagaggcaaagagcagccagaagagacccaagacatagaagcccagggggaggaggcagcaaaagtcggggtggagaaaagggtcatttctggagctctccaaatgcccttggagcaccccacggagctttggtggctgatcaagttcagggatggtttttttggtggattctaagagtgatacgggttttgtggtagttaaaaatgtgctttttggagtgatcaggcttgtggcagacaccaggatggtcgggcttgtggcgatggtcgggattggggtgggctccggggtagtcgggctgggggcgggctctgaggtgggctccggggtggtcgggctgggggcgggctctgaggtgggctctggggtggtcgggcttggagtgggctccac

SEQ ID NO: 337 - DNA, 1714 bp, Homo sapiens
ggcacgagcaaatcctctactcaccatgcttcctcctgccattcatttctatctccttccccttgcatgcatcctaatgaaaagctgtttggcttttaaaaatgatgccacagaaatcctttattcacatgtggttaaacctgttccagcacaccccagcagcaacagcacgttgaatcaagccagaaatggaggcaggcatttcagtaacactggactggatcggaacactcgggttcaagtgggttgccgggaactgcgttccaccaaatacatctctgatggccagtgcaccagcatcagccctctgaaggagctggtgtgtgctggcgagtgcttgcccctgccagtgctccctaactggattggaggaggctatggaacaaagtactggagcaggaggagctcccaggagtggcggtgtgtcaatgacaaaacccgtacccagagaatccagctgcagtgccaagatggcagcacacgcacctacaaaatcacagtagtcactgcctgcaagtgcaagaggtacacccggcagcacaacgagtccagtcacaactttgagagcatgtcacctgccaagccagtccagcatcacagagagcggaaaagagccagcaaatccagcaagcacagcatgagttagaactcagactcccataactagacttactagtaaccatctgctttacagatttgattgcttggaagactcaagcctgccactgctgttttctcacttgaaagtatatgctttctgctttgatcaaacccagcaagctgtcttaagtatcaggaccttctttgggaatagtttttccttttcaagtttttcaagatgtaggtatatccatgaatgcaatttgcatttaaattccacgtatcctgtagttttaattcctcattgttcttaaaagactgttgatactataaacatcagtgaatcattatattttaaaacagaaaagggcttctcagataccctccatctactggcccatcccctctcctaaacaaaactccttcaaaacaggttaaaaaaaatatgttgtcatgaatcttcacagtaacatttcagaaaggtgcttttttggtactcttcatgggaacagtttagcagccatgagtgatctttcctttgaaagagaatgaaagaccctgtgacatttcacttcaaaaataagccctgtagctctttacggtcgcatagtataaaattataccctgcatgctgaccctcgcttggaatggaatgccagaaatgcatggcagcagctaataagtaaagctgattaactatttatttgtcaatgttattatttaatgagctttcacatgtgatttgtttcaaaactttaattttttaatgttttgaaactttttcatggacctaaatattttcctatatgatttgtggttgattagaaatatgaaatacatgttgtagatatgtaaaatgaatattttagtctccttattacatatatgttcatggtgaactttatcaatagtatggatctttttaaatcaataagatgctttgtaaagttgaaataagtaatactttcttgtttaatctgtgcaatcagaaggtgtcttgaccttcaattcaattggtttcttttaacaaaaataaacactgctaaaagttaaaaaaaaaaaaaaaaaaaaaaaaaaaaaaaaaaaaaaaaaaaaaaaaaaaaaaaaaaaaaaa

SEQ ID NO: 338 - DNA, 682 bp, Homo sapiens
ggcacgagcttcgctggtgggaagaagccgagatggcggcagccagcgctggggcaacccggctgctcctgctcttgctgatggcggtagcagcgcccagtcgagcccggggcagcggctgccgggccgggactggtgcgcgaggggctggggcggaaggtcgagagggcgaggcctgtggcacggtggggctgctgctggagcactcatttgagatcgatgacagtgccaacttccggaagcggggctcactgctctggaaccagcaggatggtaccttgtccctgtcacagcggcagctcagcgaggaggagcggggccgactccgggatgtggcagcatcctacctggactgcggtgctacgagggcctgcgggcctttgctgtgtgccaccctccctgtaagtctatttaaaaacatcgacgatacattgaaatgtgtgaacgttttgaaaagctacagcttccagcagccaaaagcaactgttgttttggcaagacggtcctgatgtacaagcttgattgaaattcactgctcacttgatacgttattcagaaacccaaggaatggctgtccccatcctcatgtggctgtgtggagctcagctgtgttgtgtggcagtttattaaactgtcccccagataaaaaaaaaaaaaaaaaaactcgagggggggcccggta

SEQ ID NO: 339 - DNA, 903 bp, Homo sapiens
ggcacgaggggatgctcagtgcctacctgaggatgaagtatccccacctggtggcgggggcgctggcggccagcgcgcccgttctagctgtggcaggcctcggcgactccaaccagttcttccgggacgtcacggcggactttgagggccagagtcccaaatgcacccagggtgtgcgggaagcgttccgacagatcaaggacttgttcctacagggagcctacgacacggtccgctgggagttcggcacctgccagccgctgtcagacgagaaggacctgacccagctcttcatgttcgcccggaatgccttcaccgtgctggccatgatggactacccctaccccactgacttcctgggtcccctccctgccaaccccgtcaagggctggtctacaacgcctcgggctccgagcactgctacgacatctaccggctctaccacagctgtgctgaccccactggctgcggcaccggccccgacgccagggcctgggactaccagatctcagagccgccagcaacatcatcttctccaacgggaacctggacccctgggcagggggcgggattcggaggaacctgagtgcctcagtcatcgccgtcaccatccaggggggagcgcaccacctcgacctcagagcctcccacccagaagatcctgcttccgtggttgaggcgcggaagctggaggccaccatcatcggcgagtgggtaaaggcagccaggcgtgagcagcagccagctctgcgtggggggcccagactcagcctctgagcacaggactggaggggtctcaaggctcctcatggagtgggggcttcactcaagcagctggcggcagagggaaggggctgaataaacgcctggaggcctggcaaaaaaaaaaaaaaaaaaaaaaaa

SEQ ID NO: 340 - DNA, 1625 bp, Homo sapiens
ggcacgagcgactgcgccgcaccctgagaaatgttggtgccatgtggaaggtgattgtttcgctggtcctgttgatgcctggcccctgtgatgggctgtttcactccctatacagaagtgtttccatgccacctaagggagactcaggacagccattatttctcaccccttacattgaagctgggaagatccaaaaaggaagagaattgagtttggtcggtcctttcccaggactgaacatgaagagttatgccggcttcctcactgtgaataagacttacaacagcaacctcttcttctggttcttcccagctcagatacagccagaagatgccccagtagttctctggctacagggtgggccgggaggttcatccatgtttggactctttgtggaacatgggccttatgttgtcacaagtaacatgaccttgcgtgacagagacttcccctggaccacaacgctctccatgctttacattgacaatccagtgggcacaggcttcagttttactgatgatacccacggatatgcagtcaatgaggacgatgtagcacgggatttatacagtgcactaattcagtttttccagatatttcctgaatataaaaataatgacttttatgtcactggggagtcttatgcagggaaatatgtgccagccattgcacacctcatccattccctcaaccctgtgagagaggtgaagatcaacctgaacggaattgctattggagatggatattctgatcccgaatcaattatagggggctatgcagaattcctgtaccaaattggcttgttggatgagaagcaaaaaaagtacttccagaagcagtgccatgaatgcatagaacacatcaggaagcagaactggtttgaggcctttgaaatactggataaactactagatggcgacttaacaagtgatccttcttacttccagaatgttacaggatgtagtaattactataactttttgcggtgcacggaacctgaggatcagctttactatgtgaaatttttgtcactcccagaggtgagacaagccatccacgtggggaatcagacttttaatgatggaactatagttgaaaagtacttgcgagaagatacagtacagtcagttaagccatggttaactgaaatcatgaataattataaggttctgatctacaatggccaactggacatcatcgtggcagctgccctgacagagcgctccttgatgggcatggactggaaaggatcccaggaatacaagaaggcagaaaaaaaagtttggaagatctttaaatctgacagtgaagtggctggttacatccggcaagtgggtgacttccatcaggtaattattcgaggtggaggacatattttaccctatgaccagcctctgagagcttttgacatgattaatcgattcatttatggaaaaggatgggatccttatgttggataaactaccttcccaaaagagaacatcagaggttttcattgctgaaaagaaaatcgtaaaaacagaaaatgtcataggaataaaaaaattatcttttcatatctgcaagatttttttcatcaataaaaattatccttgaaaaaaaaaaaaaaaaaaaaaaaaaaaaaa

SEQ ID NO: 341 - DNA, 872 bp, Homo sapiens
ggcacgagatcctagccgccgactcacacaaggcagagttgccatggagaaaattccagtgtcagcattcttgctccttgtggccctctcctacactctggccagagataccacagtcaaacctggagccaaaaaggacacaaaggactctcgacccaaactgccccagaccctctccagaggttggggtgaccaactcatctggactcagacatatgaagaagctctatataaatccaagacaagcaacaaacccttgatgattattcatcacttggatgagtgcccacacagtcaagctttaaagaaagtgtttgctgaaaataaagaaatccagaaattggcagagcagtttgtcctcctcaatctggtttatgaaacaactgacaaacacctttctcctgatggccagtatgtccccaggattatgtttgttgacccatctctgacagttagagccgatatcactggaagatattcaaatcgtctctatgcttacgaacctgcagatacagctctgttgcttgacaacatgaagaaagctctcaagttgctgaagactgaattgtaaagaaaaaaaatctccaagcccttctgtctgtcaggccttgagacttgaaaccagaagaagtgtgagaagactggctagtgtggaagcatagtgaacacactgattaggttatggtttaatgttacaacaactattttttaagaaaaacaagttttagaaatttggtttcaagtgtacatgtgtgaaaacaatattgtatactaccatagtgagccatgattttctaaaaaaaaaaataaatgttttgggggtgttctgttttctccaaaaaaaaaaaaaaaaaaaaaaaaaaaaaaaaaaa

SEQ ID NO: 342 - DNA, 1875 bp, Homo sapiens
  misc_feature (4)..(4): n equals a,t,g, or c
  misc_feature (1872)..(1872): n equals a,t,g, or c
tatnatacgccagctctaatacgactcactatagggaaagctggtacgcctgcaggtaccggtccggaattcccgggtcgacccacgcgtccggaacagcgctcccgaggccgcgggagcctgcagagaggacagccggcctgcgccgggacatgcggccccaggagctccccaggctcgcgttcccgttgctgctgttgctgttgctgctgctgccgccgccgccgtgccctgcccacagcgccacgcgcttcgaccccacctgggagtccctggacgcccgccagctgcccgcgtggtttgaccaggccaagttcggcatcttcatccactggggagtgttttccgtgcccagcttcggtagcgagtggttctggtggtattggcaaaaggaaaagataccgaagtatgtggaatttatgaaagataattaccctcctagtttcaaatatgaagattttggaccactatttacagcaaaattttttaatgccaaccagtgggcagatatttttcaggcctctggtgccaaatacattgtcttaacttccaaacatcatgaaggctttaccttgtgggggtcagaatattcgtggaactggaatgccatagatgaggggcccaagagggacattgtcaaggaacttgaggtagccattaggaacagaactgacctgcgttttggactgtactattccctttttgaatggtttcatccgctcttccttgaggatgaatccagttcattccataagcggcaatttccagtttctaagacattgccagagctctatgagttagtgaacaactatcagcctgaggttctgtggtcggatggtgacggaggagcaccggatcaatactggaacagcacaggcttcttggcctggttatataatgaaagcccagttcggggcacagtagtcaccaatgatcgttggggagctggtagcatctgtaagcatggtggcttctatacctgcagtgatcgttataacccaggacatcttttgccacataaatgggaaaactgcatgacaatagacaaactgtcctggggctataggagggaagctggaatctctgactatcttacaattgaagaattggtgaagcaacttgtagagacagtttcatgtggaggaaatcttttgatgaatattgggcccacactagatggcaccatttctgtagtttttgaggagcgactgaggcaaatggggtcctggctaaaagtcaatggagaagctatttatgaaacccatacctggcgatcccagaatgacactgtcaccccagatgtgtggtacacatccaagcctaaagaaaaattagtctatgccatttttcttaaatggcccacatcaggacagctgttccttggccatcccaaagctattctgggggcaacagaggtgaaactactgggccatggacagccacttaactggatttctttggagcaaaatggcattatggtagaactgccacagctaaccattcatcagatgccgtgtaaatggggctgggctctagccctgactaatgtgatctaaagtgcagcagagtggctgatgctgcaagttatgtctaaggctaggaactatcaggtgtctataattgtagcacatggagaaagcaaatgtaaaactggataagaaaattattttggcagttcagccctttccctttttcccactaaattttttcttaaattacccatgtaaccattttaactctccagtgcactttgccattaaagtctcttcacattgaaaaaaaaaaaaaaaaagggcggccgctctagaggatccaagcttacgtacgcgtgcatgcgacgtcatagctcttctatagtgtcacctgaakcantca

SEQ ID NO: 343 - DNA, 444 bp, Homo sapiens
ggcacgagaggactccaaaatggcgtcagttgtaccagtgaaggacaagaaacttctggaggtcaaactgggggagctgccaagctggatcttgatgcgggacttcagtcctagtggcattttcggagcgtttcaaagaggttactaccggtactacaacaagtacatcaatgtgaagaaggggagcatctcggggattaccatggtgctggcatgctacgtgctctttagctactccttttcctacaagcatctcaagcacgagcggctccgcaaataccactgaagaggacacactctgcacccccccaccccacgaccttggcccgagcccctccgtgaggaacacaatctcaatcgttgctgaatcctttcatatcctaataggaattaacctccaaataaaacatgactggtacgtgaaaaaaaaaaaaaaaaaaaaaa

SEQ ID NO: 344 - DNA, 365 bp, Homo sapiens
attcggcacgaggtagctgctcagagctagggaggactcggtcagtggccccagccatggcccctccacagaacagttggacattctttcctcatgggggcttgctcataccgcccctcctggtggatgtgtgtgtttattatgtggagtccctgccacttactgccttatgacctaggactgatgctgtggggtgctggtggagcagctgatgtcgtgtttacagagcaaggcttccctgtctcccacggggaggggctcgggcctctagtcagacattcctgcagagggtcggtggaggggtcattcaactgcccctgcagcaagcaaaagttgtytgtggtgccattgattccctgacaatg

SEQ ID NO: 345 - DNA, 1827 bp, Homo sapiens
ctgcattctggtactttgtactccagcaccattggccgatcaatatttaatgcttggagattctgactctgcgggagtcatgtcaggggaccttgggagccaatctgcttgagcttctgagtgataattattcatgggctcctgcctcttgctctttctctagcacggtcccactctgcagactcagtgccttattcagtcttctctctcgctctctccgctgctgtagccggaccctttgccttcgccactgctcagcgtctgcacatccctacaatggctaaaacagcaatggcctacaaggaaaaaatgaaggagctgtccatgctgtcactgatctgctcttgcttttacccggaacctcgcaacatcaacatctatacttacgatgatatggaagtgaagcaaatcaacaaacgtgcctctggccaggcttttgagctgatcttgaagccaccatctcctatctcagaagccccacgaactttagcttctccaaagaagaaagacctgtccctggaggagatccagaagaaactggaggctgcagaggaaagaagaaagtctcaggaggcccaggtgctgaaacaattggcagagaagagggaacacgagcgagaagtccttcagaaggctttggaggagaacaacaacttcagcaagatggcggaggaaaagctgatcctgaaaatggaacaaattaaggaaaaccgtgaggctaatctagctgctattattgaacgtctgcaggaaaaggagaggcatgctgcggaggtgcgcaggaacaaggaactccaggttgaactgtctggctgaagcaagggagggtctggcacgccccaccaatagtaaatccccctgcctatattataatggatcatgcgatatcaggatggggaatgtatgacatggtttaaaaagaactcattataaaaaaaaaaaaacaaaaaaaatcaaaaattaaaaaaaatcaatgcggtctctttgcagaatgttttgcttgatgtttaaaaaataccttggatcttattttgtaaatacttacatttttgttaaaaaatacaagtattgcattatgcaagttatttcataatcttacatgtcctgtaacaggcttttgatgttgtgtctttccactcaaatgaatttgctaggtctgttctttttgaagctccccatgtctaactccattccaaaagaaaaatgaggtcagtagacagtctatggtgctagaaacccaccattgcctaatgacctagaaggctttgttgtctctgagcttgactaagaccatacctagatcacaggtattatgactccacatgaaccttcacatttgttcgctcataatctacttactgcctaaaaactacaaaaccaggctaagaaataccaccagtcatagcatttacttctgcttctcctggattatgtgctacaaatgtgctttggctttagaaagggatggatgagaagacagacctgagaccaatctgggtagaagcaaaaagttgaaccttttaaagtgctgaacacaaatccaaattcgaatggttcaagcagccgtgaaatcgctcttcataaagtgggcttaattctctagtttaagttcttttgatggaatgaattaattaatgtgtcaggtggcttatttgtggatgccatgattgatgatgttcattttaagctcttacctatagtacaagtacatgatgctactgaatatttttccacttggaaactgtgagctggttgttgcattaaaacacacatacaaacaaaatcaaaaacaaaaaaaaaaaaaaaaaaaaaaaaaaaaaattactg

SEQ ID NO: 346 - DNA, 1143 bp, Homo sapiens
ttttttttttttttttttaacatgttccatatggggcagggctaaatgttaggcagtgcgcccatagtcactgccaattacttttttttttttttttttgagacggagtctcgctctgttgcccaggctggagtgcagtggcgcaatctcagctcactgcaagctctgcctcccaggttcatgccattctcctgcaaagtgatccgtctgcacttcagtttgagaaggcctggcctagaggacagtgggtctggcatgctgggctgagaggcagtactgggagcgattcttggggcctccttgctgacaattgggtgaaaccagcggatacgatcgtagcgtctctgagcccccattgcctccttgtttctctgcccatagtagaagaatgtctctgaaattactggatgagtttcagtcatactttcacatgggcacaatttcacattcaagctccttatcctaggctaattttatattatgttaaatcacttgtttttgttctcacggcttcctgcctgctataggcataattacgaggaagcagaacttctccagaagcaagcgcacatgcgttccaaaataagagcaaattcgctctaaacacaggaaaagacctgaagctttaattaaggggttacatccaaccccagagcgcttttgtgggcactgattgctccagcttctgcgtcactgcgcgagggaagagggaagaggatccaggcgttagacatgtatagacacaaaaacagctggagattgggcttaaaatacccaccaagctccaaagaagagacccaagtccccaaaacattgatttcagggctgccaggaaggaagagcagcagcagggtgggagagaagctccagtcagcccacaagatgccattgtcccccggcctcctgctgctgctgctctccggggccacggccaccgctgccctgcccctggagggtggccccaccggccgagacagcgaggtgagtacagtcccgacgtggccacacgctagcccactctctgtctcttgttggctttttggcctgcatggtgtgtgtgtgtgcacgtgtgttgcacttcacagcttggacaggacacacggctcaactttgtagtgttcttggctggcccgagctcgtgcc

SEQ ID NO: 347 - DNA, 762 bp, Homo sapiens
ggcacgagctgcagtctgccctggtgtccaacctttatgtcatctcccaaatgctctcagctcgcttcagtggcaacttgctggtcagcctgctgggcacctggtcggacacgtcttctgggggcccagcacgtgcttatccagttggtggcctttgctattacctgtcccctccagaatcttttggctccgtgttagaagacccggtccatgcagttgtatacatagtgttcatgctgggctcctgtgcattcttctccaaaacgtggattgaggtctcaggttcctctgccaaagatgttgcaaagcagctgaaggagcagcagatggtgatgagaggccaccgagagacctccatggtccatgaactcaaccggtacatccccacagccgcggcctttggtgggctgtgcatcggggccctctcggtcctggctgacttcctaggcgccattgggtctggaaccgggatcctgctcgcagtcacaatcatctaccagtactttgagatcttcgttaaggagcaaagcgaggttggcagcatgggggccctgctcttctgagcccgtctcccggacaggttgaggaagctgctccagaagcgcctcggaaggggagctctcatcatggcgcgtgctgctgcggcatatggacttttaataatgtttttgaatttcgtattctttcattccactgtgtaaagtgctagacattttccaatttaaaattttgctttttatcctgaaaaaaaaaaaaaaaaaa

SEQ ID NO: 348 - DNA, 510 bp, Homo sapiens
ggcacgaggtgggattgcaggagtgaaccaccatgcctgggcggttttcttttacattggtgatgaatgagcttcactatccgagcatgggaatgttagaaataccacctgtcctttgtatagtgtatttctttttttttttgagatggagcttctctttgtcacccaggctggagtgcagtggcgcgatcttggctcactgcaacctccacctccctggttcaagcgattctcctgcctcagcctcccgagtagctgggattacaggcacctgccaccacgcccggctaatttttgtattaaaaaatttatacaattttcgccacattggccaggctgatcttgaacgccggacctcaccttcgacctcccaaagtgctgggattacaggcatgagccaccatgcccagcctgcctgatatatttctatattttatatatacgtttttctgagatgtagtttcactccagcctgggtgacagcgagactcgtctcagaaaaaaaaaaga

SEQ ID NO: 349 - DNA, 2060 bp, Homo sapiens
ggcacgagcccgcgcggcagggccctggacccgcgcggctcccggggatggtgagcaaggcgctgctgcgcctcgtgtctgccgtcaaccgcaggaggatgaagctgctgctgggcatcgccttgctggcctacgtcgcctctgtttggggcaacttcgttaatatgaggtctatccaggaaaatggtgaactaaaaattgaaagcaagattgaagagatggttgaaccactaagagagaaaatcagagatttagaaaaaagctttacccagaaatacccaccagtaaagtttttatcagaaaaggatcggaaaagaattttgataacaggaggcgcagggttcgtgggctcccatctaactgacaaactcatgatggacggccacgaggtgaccgtggtggacaatttcttcacgggcaggaagagaaacgtggagcactggatcggacatgagaacttcgagttgattaaccacgacgtggtggagcccctctacatcgaggttgaccagatataccatctggcatctccagcctcccctccaaactacatgtataatcctatcaagacattaaagaccaatacgattgggacattaaacatgttggggctggcaaaacgagtcggtgcccgtctgctcctggcctccacatcggaggtgtatggagatcctgaagtccaccctcaaagtgaggattactggggccacgtgaatccaataggacctcgggcctgctacgatgaaggcaaacgtgttgcagagaccatgtgctatgcctacatgaagcaggaaggcgtggaagtgcgagtggccagaatcttcaacacctttgggccacgcatgcacatgaacgatgggcgagtagtcagcaacttcatcctgcaggcgctccagggggagccactcacggtatacggatccgggtctcagacaagggcgttccagtacgtcagcgatctagtgaatggcctcgtggctctcatgaacagcaacgtcagcagcccggtcaacctggggaacccagaagaacacacaatcctagaatttgctcagttaattaaaaaccttgttggtagcggaagtgaaattcagtttctctccgaagcccaggatgacccacagaaaagaaaaccagacatcaaaaaagcaaagctgatgctggggtgggagcccgtggtcccgctggaggaaggtttaaacaaagcaattcactacttccgtaaagaactcgagtaccaggcaaataatcagtacatccccaaaccaaagcctgccagaataaagaaaggacggactcgccacagctgaactcctcacttttaggacacaagactaccattgtacacttgatgggatgtatttttggcttttttttgttgtcgtttaaagaaagactttaacaggtgtcatgaagaacaaactggaatttcattctgaagcttgctttaatgaaatggatgtgcctaaaagctcccctcaaaaaactgcagattttgccttgcactttttgaatctctctttttatgtaaaatagcgtagatgcatctctgcgtattttcaagtttttttatcttgctgtgagagcatatgttgtgactgtcgttgacagttttatttactggtttctttgtgaagctgaaaaggaacattaagcgggacaaaaaatgccgattttatttataaaagtgggtacttaataaatgagtcgttatactatgcataaagaaaaatcctagcagtattgtcaggtggtggtgcgccggcattgattttagggcagataaaagaattctgtgtgagagctttatgtttctcttttaattcagagtttttccaaggtctacttttgagttgcaaacttgactttgaaatattcctgttggtcatgatcaaggatatttgaaatcactactgtgttttgctgcgtatctggggcgggggcaggttggggggcacaaagttaacatattcttggttaaccatggttaaatatgctattttaataaaatattgaaactcaccagtcatggaaaaaaaaaaaaaaaaaaaaaaaaaaaa

SEQ ID NO: 350 - DNA, 1874 bp, Homo sapiens
  misc_feature (166)..(166): n equals a,t,g, or c
  misc_feature (334)..(334): n equals a,t,g, or c
gctcccatctccttcagcaaagtgaagctgaccaacaagctcaatggaggcgggcagataatgttgaattctctgcataaatatgaaccccaggttcacatagtgcgtgttggaagtgcccatcgaatggtaacaaactgctccttccctgaaacccagttcatanccgtgactgcctatcagaatgaggagataacggctctcaaaatcaagtacaatccttttgccaaagccttcttggatgccaaggaaagaaatcacctaagagacgtaccggaggctatctctgagagccagcatgtgacctattctcacttgggaagctggatctttnccgatcccagatggagtgtgcacagcaggaaactccaattaccagtatgccgctcctctgcctctgcctgctccccacacccaccatggctgtgagcactattcgggtctccgaggacaccggcaggctccctacccttctgcgtacatgcacagaaaccattctccctcagtgaatttgatagaaagctcaagcaataatctgcaagttttctcgggacctgacagctggacttccttatcctccacaccccatgccagcatcctgtctgtaccccacaccaacggaccaatcaatccagggcccagcccctacccgtgcctgtggaccatcagcaatggtgccggaggccccagtgggccaggcccggaggtgcacgccagcaccccaggagcatttctcctcggaaacccagctgtgacttcaccccttctgtgctctccacccaagcacccacttcggctggtgtggaggttctgggggagccctcgctaaccagcattgctgtgtccacctggacagcagtggcctcgcatcccttcgcgggctggggtggcccaggagcgggtgggcaccattctccttcctcactggatggttaagcaggatcctaggagcctctatgcacagcgatccttccatgtgtagagtgcttagaaaccccatcaactgatctagtgagtcagactgtggaatctcccttcccactagctggaggtggaggtgggttattacagaagtcatactgggagagggttcagtttggatgatgctagttagatcatttgcatctctccaccattttcttctgcactcccattttctctgcagcttattcttgccatgcttaggtgacagaagtttgttaagtaccatccttgtgccctgcctcttattctcaaatcgttctggaaagcctcacttccttttctgtggagaaggtgcaaagctgttaaatgagctcagagtttacctagctaaggccactgcttcctgctttgtgaagcctggaaagtatgtgtggccacagggctcaggttcacacttctgctttgagaccaggatggggtgtaagccatagagtaaggttaacaaaaagaataaagctaatcatgtattacaaacagcagtgtgcccagacttgtggaaatgaagtcatgtcactcctctgctcagaaaccttcaatggttcaccattaccagtggaatgaagtcaattctcctcactataactgggtgtggtagtttaagcctataatctcagcccttttggaggccaaggtaagaggatcgcttgaggtcaggagttcgagaccagcttgtgcaacaaagtgagagcctgtctctacaaaaaatagtcatgcacacaaaattagctgggcatggtggcctgtgcctatagtcccaactactyagaggaggatcgcttgatctcaggaggttgaggctgcagtgaattatgattgtggcattgcactccagcctgggtggtagatcaaggctttgtttcatttgaaaaaaaaaaaaaaaaaactcgtag

SEQ ID NO: 351 - DNA, 911 bp, Homo sapiens
cttatttggactgacgtcccgccctctggctgtttcctggccgaggtgggtcggtagtagcgatggcgggtctgactgacttgcagcggctacaggcccgagtggaagagctggagcgctgggtgtacgggccgggcggggcgcgcggctcacggaaggtggctgacggcctggtcaaggtgcaggtggctttggggaacatttccagcaagagggagagggtgaagattctctacaaaaagattgaagatctgatcaagtacctggatcctgagtacatcgaccgcattgccatacctgatgcctctaagctgcaattcatcctagcagaggagcagtttatcctttcccaggttgcactcctggagcaggtgaatgccttggtgcccatgctggacagtgctcacatcaaagccgttcctgagcatgctgcccgcctgcagcgcttggcccagatccacattcagcagcaggaccagtgtgtggaaatcactgaggagtccaaggctctcctggaggaatacaacaagactacaatgcttctctccaagcaattcgtgcagtgggatgagctactttgccagctagaggccgccacgcaagtgaagccagcagaggagtgatagctgctccccatcccaaagtgggcctgggcagtcaggctccagggccctatgccaacctgcctttgttacaaggcagaggaagctttgtatttattggcttcaaggcccacctctctgtactctgggctctaaagttggaggtcaggttacctgaggtttgcaatttgcaacacccaccctccccccaatcagtgttcttatttcagtgacaataaaccatagagatgaaaaaaaaaaaaaaaaaaaactcgagggggggcccggtacccaattcgccctgggttc

SEQ ID NO: 352 - DNA, 384 bp, Homo sapiens
  misc_feature (382)..(382): n equals a,t,g, or c
cccacgcgtccgcggcagcccaagggccccggcgccgggggcggcggggaaccccaaacgcaaccgggtctggagggatccccgcgccgagccagccgccgtcaccgcctccgcgccgcccctgcgggcttggyaggcgcccggcgcgcccgcactgcgccckkycgccggctcccgcggtcccaccgtgagctcgccggcccgtcgcccgctcgccatgcaaccgccgccggcctcgcgcgcgtaggcgcccgccgcaggccatgctgcccctgctcgccgcgctcctggccgccgcctgcccgctgccgcccgtccgcggcggggccgcggacgcgcccggcctcctcggggtgccctccaatgcttcagtcaacgcgtnct

SEQ ID NO: 353 - DNA, 1032 bp, Homo sapiens
ggcacgaggccagatgggctggttcttcctcatggctgtgatgtacatcactggagctggcctttatgctgctcgaattcctgagcgcttctttcctggaaaatttgacatatggttccagtctcatcagattttccatgtcctggtggtggcagcagcctttgtccacttctatggagtctccaaccttcaggaattccgttacggcctagaaggcggctgtactgatgacacccttctctgagccttcccacctgcggggtggaggaggaacttcccaagtgcttttaaaaataacttctttgctgaagtgagaggaagagtctgagttgtctgtttctagaagaaacctcttagagaattcagtaccaaccaagcttcagcccactttcacacccactgggcaataaactttccatttccattctcctagctggggatggggcatggtcaaacttagccatcccctcctcagcaaggcatctaccggcccctcacagagacagtactttgaaactcatgttgagattttaccctctcctccaaccattttgggaaaattatggactgggactcttcagaaattctgtcttttcttctggaagaaaatgtccctcccttacccccatccttaactttgtatcctggcttataacaggccatccatttttgtagcacacttttcaaaaacaattatataccctggtcccatctttctagggcctggatctgcttatagagcaggaagaataaagccaccaacttttacctagcccggctaatcatggaagtgtgtccaggcttcaagtaacttgagttttaattttttttttttcttggcagagtaatgtaaaatttaaatggggaaagatatttaatatttaatactaagcttttaaaagaaacctgctatcattgctatgtatcttgatgcaaagactatgatgttaataaaagaaagtacagaagaaaaaaaaaaaaaaaaaaaaaaaaaaaaaaaaaaaaaaaaaaaaaaaaaaaaaaaaaaaaaaa

SEQ ID NO: 354 - DNA, 1155 bp, Homo sapiens
ggcacgaggtgcctcccacaacacatggggattatgggacctacaattcaaggtgagatttgggtggggacacagcaaaaccatatcaaggggaaacctgctatcattgacttttctctcatatatgctagggaccagagctttctctctgtgggcagtcagcttgctgcccgcttcacctgggtttgccccagaccctgctgtccccaaagttagaggcaactcagaaggtcacacagaacaagtgacactgagcatcagttcactgccatcaggccagggcctgccttcaaatcccaaatctgtcttttacttactgcgtgaattttcttacctcactgccattgattcctcatgtgaaagtggggataccattctgcagtggaaccatgctgtgagcatggagtggggtgaatattgaaggcctaccacatggtgagcaccaaaaaatagtagccactaataagactaacatgggggtgtgcatattcagacagttctcccaagactttgtccatgaaatgtttctggagcaagaaaggtagggtttttattcttctcaccaagagattccactgacaactctcctgtgttggtgagggattgggaatgggtagagttagtttactgagcctgctataacaaagttctacagactgggtgatttaaccaaaagaagtttattttctcacaattccaggagctagaagactgagatcaaggtgtcggcaggattggtttcttctgaggccttgcttcttggcttgtagatgtcagacttctctccatgtcttcttatggtctttcctctgaatgtctgtgttttcatttcctcttcttataaagatgtgagtcgctgggcacggtggctcacgcctgtaatcccagcactttgggaggctgaggcgggtggatcacgaggtcagaagatcgaggccatcctggccaacatggtgaaacccatctctactaaaaatacgaaaattagctgggtgtggtggtgtgcacctgtaaccccagctactcgggagaccgaggcaggagaatcacttgaacccaggtggcagagattgcagtgagctgagattgcgccactgcactccagcctggcgacagagtggagactccgtcttaataaaaaaaaaaaaaaaaaaa

SEQ ID NO: 355 - DNA, 1057 bp, Homo sapiens
gaattcggcacgagtatggacagagcctccactgagctgctgcctgcccgccacatacccagctgacatgggcaccgcaggagccatgcagctgtgctgggtgatcctgggcttcctcctgttccgaggccacaactcccagcccacaatgacccagacctctagctctcagggaggccttggcggtctaagtctgaccacagagccagtttcttccaacccaggatacatcccttcctcagaggctaacaggccaagccatctgtccagcactggtaccccaggcgcaggtgtccccagcagtggaagagacggaggcacaagcagagacacatttcaaactgttccccccaattcaaccaccatgagcctgagcatgagggaagatgcgaccatcctgcccagccccacgtcagagactgtgctcactgtggctgcatttggtgttatcagcttcattgtcatcctggtggttgtggtgatcatcctagttggtgtggtcagcctgaggttcaagtgtcggaagagcaaggagtctgaagatccccagaaacctgggagttcagggctgtctgaaagctgctccacagccaatggagagaaagacagcatcacccttatctccatgaagaacatcaacatgaataatggcaaacaaagtctctcagcagagaaggttctttaaaagcaactttgggtccccatgagtccaaggatgatgcagctgccctgtgactacaaggaggaagagatggaattagtagaggcaatgaaccacatgtaaattattttattgtttcatgtctgcttctagatctaaaggacactagcattgccccagatctgggagcaagctaccaacaggggagactctttcctgtatggacagctgctgtggaaatactgcctgcttctcccacctcctcagagccacaggaaagaggaggtgacagagagagagcaaggaaagtgatgaggtggattgatactttctactttgcattaaaattattttctagcctgcaaaaaaaaaaaaaaaaaaaaaaaaaaaactcga

SEQ ID NO: 356 - DNA, 1276 bp, Homo sapiens
ggcacgagattttttgtatttttagtagagacaggctttttccatgttgcccaggctggtctcgaactcctgggctcaagtgacccgcccgcctcagcctcccagtgttgggattacaagcatgaactattgcgcctggctcctcgtttctcttaattccactcttcattccactctaatctggtttttgtccttactactctgcaaaaacttctgtggacaaagtttcagtaacttccatattgctgtttcagtggttatcttacctgatctgtcaggagaaattcttaaaattgattattctgtctttctgacacactttatttactttttgtccagaataccatactcttggttttcttgccacctgtgctctggttgctctctttgtctcctttgctagttcttactcctctctccgcctcttaatgttggatatctaaaacctcaggcttgggtctccatctttatgtatcacttctctcacagtgatctcatccaataacaggttttaaaacccatctgtattctgatgacttcaagtttttattttctgataggccttttaaattctagatttccatattggactgcctattcaacattttcatatgaatgtataatagatatgttaaatgtaatacatctaaaaccagtctcacaagctttccttaataagcctgtcaaattttcttttattctagttgatggtagtgccacacttactggacaaaagccttaaagtcatgctttactcccattttctcatatctcagatgcttactgttaggaagtcctgttagtaccaccttttgggcatctaaaattgaaccacttctcatacctcctacctccattgctatcacctcagtccaagtcaccatcagtgcttcctaatcctacacccagttttaacccttgccccttataatatattctcaacatagtaatgagggagattttaaaatgtaaataagattatgacacttcaggccaggtgcggtggatcacacctgtaatcacagcactttgggaggccgaagcgggcggatcacaaggtcacgagttagagaccagcctggccgacatggtgaaaccccgtctctactaaaatacaaaaattagctgagcgtggtggtgcacacctgtaatcccagctagggcaggagaattgcttgaacccaggaggcagaggttgcagtgagccgagatcgccccattgtactccagcctgggcagtagagtaagactccatctcaaaaaaaaaaaaaaaaaa

SEQ ID NO: 357 - DNA, 1702 bp, Homo sapiens
ccacgcgtccgcgcaggcggaccggggcaaaggaggtggcatgtcggtcaggcacagcagggtcctgtgtccgcgctgagccgcgctctccctgctccagcaaggaccatgagggcgctggaggggccaggcctgtcgctgctgtgcctggtgttggcgctgcctgccctgctgccggtgccggctgtacgcggagtggcagaaacacccacctacccctggcgggacgcagagacaggggagcggctggtgtgcgcccagtgccccccaggcacctttgtgcagcggccgtgccgccgagacagccccacgacgtgtggcccgtgtccaccgcgccactacacgcagttctggaactacctggagcgctgccgctactgcaacgtcctctgcggggagcgtgaggaggaggcacgggcttgccacgccacccacaaccgtgcctgccgctgccgcaccggcttcttcgcgcacgctggtttctgcttggagcacgcatcgtgtccacctggtgccggcgtgattgccccgggcagagctgggcgaggggaggggcccccaggagtggtggccggaggtgtggcaggggtcaggttgctggtcccagccttgcaccctgagctaggacaccagttcccctgaccctgttcttccctcctggctgcaggcacccccagccagaacacgcagtgcagccgtgccccccaggcaccttctcagccagcagctccagctcagagcagtgccagccccaccgcaactgcacggccctgggcctggccctcaatgtgccaggctcttcctcccatgacaccctgtgcaccagctgcactggcttccccctcagcaccagggtaccaggtgagccagaggcctgagggggcagcacactgcaggccaggcccacttgtgccctcactcctgcccctgcacgtgcatctagcctgaggcatgccagctggctctgggaaggggccacagtggatttgaggggtcaggggtccctccactagatccccaccaagtctgccctctcaggggtggctgagaatttggatctgagccagggcacagcctcccctggagagctctgggaaagtgggcagcaatctcctaactgcccgaggggaaggtggctggctcctctgacacggggaaaccgaggcctgatggtaactctcctaactgcctgagaggaaggtggctgcctcctctgacatggggaaaccgaggcccaatgttaaccactgttgagaagtcacagggggaagtgacccccttaacatcaagtcaggtccggtccatctgcaggtcccaactcgccccttccgatggcccaggagccccaagcccttgcctgggcccccttgcctcttgcagccaaggtccgagtggccgctcctgccccctaggcctttgctccagctctctgaccgaaggctcctgccccttctccagtccccatcgttgcactgccctctccagcacggctcactgcacagggatttctctctcctgcaaaccccccgagtggggcccagaaagcagggtacctggcagcccccgccagtgtgtgtgggtgaaatgatcggaccgctgcctccccaccccactgcaggagctgaggagtgtgagcgtgccgtcatcgactttgtggctttccaggacatctccatcaagatgtgagcggctgctgcaggcc

SEQ ID NO: 358 - DNA, 1939 bp, Homo sapiens
  misc_feature (11)..(11): n equals a,t,g, or c
  misc_feature (1878)..(1878): n equals a,t,g, or c
  misc_feature (1889)..(1891): n equals a,t,g, or c
  misc_feature (1934)..(1934): n equals a,t,g, or c
ctttatctttnagtttatttgaaagaggtctggtttaaaatttgtagcctacatttgttttatttattgtatttgtgtgtttgtgtttgtttttttttaagggtgagccaggtctagcccaacagtctaaactatccagtcaataccgagtgaagtggcagccagcactgttcactctgtgtcttttgaagtgccttgaaggccagatgaaattttaaagggagggggtccatgtccttccctcccccaccccgcctcattctttaatcaaaggatgtcttctcccttgtttgagaatgaagaaactcgccacctctgacctacctttgcctttttctgtcatggagaatactcacccttcagaaacagaccaaaggccaaaacctgctgatttttctattgaaaatatgtccccttgcaaagaccctaaacaaaaagttaagtttctttctttcacctatttgtacaactccaagttacagctgaatctgtcgtgactttcctgagatctacccggggcttggctgtctgttctgggcactggctccgagttcccctcctgggatttgcaggagggcagtactgaacctgcattcttctccttgtaaatgtaggccgggtgcccctgttctccgggtttggaacaatacgaggttggtgctgatgggatttacttgcgtacgtgctcttcacaaaaacaccgtggatgctgaagttagagcacgtcgccacagagcttgacatcaatgttagagtgtctcttactccccgcccagctgtgatgtttcatctgctttggttgttttggtggtcttttttaaaaatagagatttcacatctgcccagaccccactcaaaacgatttggtcaggttctggttggacaagtttaaaatcaaagtagtgcccggaattccctcaaaccacccaacttcatccaggaatacagtctgcagtgcagcaacagaaccgcttaccaagaactgtgcttacatacctttgtcatctctcttccccccttggaagttgtcctcagggggatttgttcctgtcctggggatttacctgggatggtggctgcctgtgcttttgctcatggccttgacagtgctctagttgctggatctaatggcctgtcttggtttctatcacatgagaaggggttgtttttttggggtgactcggactgaattccccatactgtttccacgccgggacaccatgttctccatcaagctaaagaaatcacgtgcctgaaactgtgcttaagttttgggggaaagatggagttcctatccagagcccccagatttccagaatcgagtgagcttcctggaaggagactgcgtcttctctcaattccagtcatctcagtcgttgtcgttaggtgacatgtgcactttaaatgctctcatcggttggcttcattttcaagacaatcaaatgtattgactgtgttttcttcttagaaaatggagagggttmaaaacatgcaaactgccactttcaacctttgccagtattccctctacccccgtgagagctatctggggggaagaatccttaccaaggtttttttggaaaggtacgaatcttaacttttttccccttctgtgtctcagggtaatactattcagagtcgcccctttgctcattttctcccgtatttgttaccttcctgaggcctcagtattagtcgtgagcacaaagttttgagacctttggcgttgtttcttgatgtgggaggggaggtgttagtgcatgcaagggttgaactagatagaccctgccttagtagagggtgggactataaycttagaggccagaacttgatccagaagttgctgtccacagaagtgctttctatttcatcattttngtttcyagggnnntttttcttgtagccaggtctttcccaaggatttttagtatttngcatt

SEQ ID NO: 359 - DNA, 1324 bp, Homo sapiens
  misc_feature (18)..(18): n equals a,t,g, or c
  misc_feature (72)..(72): n equals a,t,g, or c
  misc_feature (510)..(510): n equals a,t,g, or c
accaccgacggtggcggnccgctctcagaactagtgggatcccccgggctgcagcgctttggagggacctgnaagctgtttttcttcgttttcctttgggttcagtttgaacgggaggtttttgatcccttttttttcagaatggattatttgctcatgattttctctctgctgtttgtggcttgccaaggagctccagaaacagcagtcttaggcgctgagctcagcgcggtgggtgagaacggcggggagaaacccactcccagtccaccctggcggctccgccggtccaagcgctgctcctgctcgtccctgatggataaagagtgtgtctacttctgccacctggacatcatttgggtcaacactcccgagcacgttgttccgtatggacttggaagctctaggtccaagagagccttggagaatttacttcccacaaaggcaacagaccgtgagaatagatgccaatgtgctagccaaaaagacaagaagtgctggaatttttgncaagcaggaaaagaactcagggctgaagacattatggagaaagactggaataatcataagaaaggaaaagactgttccaagcttgggaaaaagtgtatttatcagcagttagtgagaggaagaaaaatcagaagaagttcagaggaacacctaagacaaaccaggtcggagaccatgagaaacagcgtcaaatcatcttttcatgatcccaagctgaaaggcaagccctccagagagcgttatgtgacccacaaccgagcacattggtgacagaccttcggggcctgtytgaagccatagcctccacggagagccctgtggccgactctgcactctccaccctggctgggatcagagcaggagcatcctctgctggttcctgactggcaaaggaccagcgtcctcgttcaaaacattccaagaaaggttaaggagttcccccaaccatcttcactggcttccatcagtggtaactgctttggtctcttctttcatctggggatgacaatggacctctcagcagaaacacacagtcacattcgaattcgggtggcatctccggagagagagagaggaaggagattccacacaggggtggagtttctgacgaaggtcctaagggagtgtttgtgtctgactcaggcgcctggcacatttcagggagaaactccaaagtccacacaaagattttctaaggaatgcacaaattgaaaacacactcaaaagacaaacatgcaagtaaagaaaaaaaaaaaagaaagacttttgtttaaatttgtaaaatgcaaaactgaatgaaactgttactaccata

SEQ ID NO: 360 - DNA, 1715 bp, Homo sapiens
gcgtccgggagttggcagcggggttgggtggagctgccatctgcttaagacagccccttgaccgtgctgcccgaagatggatatggctctgactcccacctctcttccaggtcgtccgggggcccaccatgctggtgactgcctaccttgcttttgtaggcctcctggcctcctgcctggggctggaactgtcaagatgccgggctaaaccccctggaaggcctgcagcaatccctccttccttcggtttcaactggacttctatcagtctacttcctggccctggcagctgattggcttcaggccccctacctctataaactctaccagcattactacttcctggaaggtcaaattgccatcctctatgtctgtggccttgcctctacagtcctctttggcctagtggcctcctcccttgtggattggctgggtcgcaagaattcttgtgtcctcttctccctgacttactcactatgctgcttaaccaaactctctcaagactactttgtgctgctagtggggcgagcacttggtgggctgtccacagccctgctcttctcagccttcgaggcctggtatatccatgagcacgtggaacggcatgacttccctgctgagtggatcccagctacctttgctcgagctgccttctggaaccatgtgctggctgtagtggcaggtgtggcagctgaggctgtagccagctggatagggctggggcctgtaacgccctttgtggctgccatccctctcctggctctggcaggggccttggcccttcgaaactggggggagaactatgaccggcagcgtgccttctcaaggacctgtgctggaggcctgcgctgcctcctgtcggaccgccgcgtgctgctgctgggcaccatacaagctctatttgagagtgtcatcttcatctttgtcttcctctggacacctgtgctggacccacacggggcccctctgggcattatcttctccagcttcatggcagccagcctgcttggctcttccctgtaccgtatcgccacctccaagaggtaccaccttcagcccatgcacctgctgtcccttgctgtgctcatcgtcgtcttctctctcttcatgttgactttctctaccagcccaggccaggagagtccggtggagtccttcatagcctttctacttattgagttggcttgtggattatactttcccagcatgagcttcctacggagaaaggtgatccctgagacagagcaggctggtgtactcaactggttccgggtacctctgcactcactggcttgcctagggctccttgtcctccatgacagtgatcgaaaaacaggcactcggaatatgttcagcatttgctctgctgtcatggtgatggctctgctggcagtggtgggactcttcaccgtggtaaggcatgatgctgagctgcgggtaccttcacctactgaggagccctatgcccctgagctgtaaccccactccaggacaagatagctgggacagactcttgaattccagctatccgggattgtacagatctctctgtgactgactttgtgactgtcctgtggtttctcctgccattgctttgtgtttgggaggacatgatgggggtgatggactggaaagaaggtgccaaaagttccctctgtgttactcccatttagaaaataaacacttttaaatgatcaaaaaaaaaaaaaaaaaaa

SEQ ID NO: 361 - DNA, 635 bp, Homo sapiens
atgggatacgctctctccgaaactggccccagcggaagatgttcgtggggcgctggcgctggtcgaacgtaacgaagcgcctctgggcattgtctacggttctgacgcattgccagcaaaggggtaaaagtggttgccaccttcccggaagattcacataaaaaagtggaatatccggttgctgttgtggaagggcataacaatgcgacagtgaaagcattttatgattatctgaagggaccgcaggcagcggaaatctttaaacgttacggatttacaatcaagtaatgatactgaccgatccagaatggcaggcagttttattaagcctgaaagtttcttccctggctgtgctgtttagcctgccgtttgggatcttttttgcctggttactggtgcgttgcacgtttccgggcaaagctctgctcgacagcgtactgcatctaccgctggtgttaccgcccgtggtcgtcggttacttattattagtttcgatgggacggcgcggatttatcggtgaacgtctgtatgactggtttggtattaccttcgcctttagctggcgcggcgcggttctcgctgccgccgtcatgtcgtttccgctgatggtgcgggcaattcgtctggcgctggaa

SEQ ID NO: 362 - DNA, 649 bp, Homo sapiens
attaccactgttgacggttattttcgtcgccgtggggatctggggcggatctctggtcggcgtcagttggaaaggcattgatagcgggttcttctggtcggcaatgcaaaatgccgtcgactggcgtatggatctggtcaactgtctgattaagagcgtggtgttcgccatcacggtgacgtgggatttcgttgtttaacggctacgacgccatcccgacgtctgccgggattagccgggcaaccactcgcaccgttgtccactcgtctctgggctgttctgggggctggaatttgtgctgaccgcattgatgtttgggaattgagttcatgcaaacgaaaaaaaatgaaatttgggtgggtatctttttattagcagcactgctggcggcgctgtttgtttgcctgaaggcggcgaacgtgacgtccatacgtactgaaccgacctacacgctttatgcgacgttcgataacattggcggcctgaaagcgcgctctccggtcagtattggtggcgttgttgtgggtcgggtggcggatattacgctggacccgaaaacctatctgccgcgcgtaacgctggaaattgaacaacgttataaccacattccagataccagttcgctgagcattcgtacttccggcctgct

SEQ ID NO: 363 - DNA, 2249 bp, Homo sapiens
tccctcactaaagggcacacaagctggagctccaccgtggtggcggccgctctacaactagtggatcccccgggctgcaggaattcggcacgagccaacatccagtcctgctgactatttgacccccacaacaatgggtatccttaatagaggagctgcttgttgtttgttgacagcttggaaagggaagatcttatgcctttacttttctgttttcttctcagtcttttcagtttcatcatttgcacaaacttgtgagcatcagagggctgatggattccaaaccaggacactaccctgagatctgcacagtcagaaggacggcaggagtgtcctggctgtgaatgccaaagccattctccccctctttgggcagtgccatggatttccactgcttcttatggtggttggttgggttttttggttttgtttttttttttaagtttcactcacatagccaactctcccaaagggcacacccctggggctgagtctccatggccccccaactgtggtagctccagcgatggtgctgcccaggcctctcggtgctccatctccgcctccacactgaccaagtgctggcccacccagtccatgctccagggtcaggcggagctgctgagtgacagctttcctcaaaaagcagaaggagagtgagtgcctttccctcctaaagctgaatcccggcggaaagcctctgtccgcctttacaagggagaagacaacagaaagagggacaagagggttcacacagcccagttcccgtgacgaggctcaaaaacttgatcacatgcttgaatggagctggtgagatcaacaacactacttccctgccggaatgaactgtccgtgaatggtctctgtcaagcgggccatctcccttggcccagagacggagtgtgggagtgattcccaactcctttctgcagacgtctgccttggcatcctcttgaataggaagatcgttccaccttctacgcaattgacaaacccggaagatcagatgcaattgctcccatcagggaagaaccctatacttggtttgctacccttagtatttattactaacctcccttaagcagcaacagcctacaaagagatgcttggagcaatcagaacttcaggtgtgactctagcaaggctcatctttctgcccggctacatcagccttcaagaatcagaagaaaggccaaggtgctggactgttactgacttggatcccaaagcaaggagatcatttggagctcttgggtcagagaaaatgagaaaggacagagccagcggctccaactcctttcagccacatgccccaggctctcgctgccctgtggacaggatgaggacagagggcacatgaacagcttgccagggatgggcagcccaacagcacttttcctcttctagatgcaccccagcatttaagtgcccttctgatcttggaaaaacagcgtcttccttctttatctatagcaactcattggtggtagccatcaagcacttcccaggatctgctccaacagaatattgctaggttttgctacatcacgggttgtgagacttctgtttcatccctgtgacaccaacccccatctccctagcccaccccccctcccaactccctctctgtgcattttctaagtgggacattcaaaaaactctctcccaggacctcggatgaccatactcagacgtgtgacctccatactgggctaaggaagtatcagcactagaaattgggcagtcttaatgttgaatgctgctttctgcttagtatttttttgattcaaggctcagaaggaatggtgcgtggcttccctgtcccagttgtggcaactaaaccaatcggtgtgttcttgatgcgggtcaacatttccaaaagtggctagtcctcacttctagatctcagccattctaactcatatgttcccaattaccaaggggtggccgggcacagtggctcacgcctgtaatcccagcactttgagaggctgaggtggtaggatcacctgaggtcaggagttcaagaccagcctgtccaacatggtgaaacccccatctctactaaaaataccaaaaattagccgagcgtagtgacgggtgcccgtaatcccagctactcaggaggctgagacaggagaatcacctgaaccccagaggcagaggttgcagtgagctgagatcacgccattgtactccagcctgggcaacaagagcaaaactccgtctaaaaaaaaaaaaaaaaaaaa

SEQ ID NO: 364 - DNA, 856 bp, Homo sapiens
  misc_feature (7)..(7): n equals a,t,g, or c
  misc_feature (23)..(23): n equals a,t,g, or c
  misc_feature (34)..(34): n equals a,t,g, or c
  misc_feature (41)..(41): n equals a,t,g, or c
  misc_feature (43)..(43): n equals a,t,g, or c
  misc_feature (121)..(121): n equals a,t,g, or c
ttttttngacccgggattaaccnattttttaacnccagggnanaccaggtttttgacccattgatttacgcaaagcttcgaaatttacccttaattaaagggaacaaaagctggaagttcnaccgcggtggccggccgctctagaactagtggatcccccgggctgcaggaattcggcacgagctggcggcggtggtagctgctacggcgctgaagggccggggggcgagaaatgcccgcgtcctccgggggattctcgcaggagccacagctaacaaggcttctcataacaggacccgggccctgcaaagccacagctccccagagggcaaggaggaacctgaacccctatccccggagctggaatacattcccagaaagaggggcaagaaccccatgaaagctgtgggactggcctgggccatcggcttcccttgtggtatcctcctcttcatcctcaccaagcgggaagtggacaaggaccgtgtgaagcagatgaaggctcggcagaacatgcggttgtccaacacgggcgagtatgagagccagaggttcagggcttcctcccagagtgccccgtcccctgatgttgggtctggggtgcagacctgaggagcgctgcgaccctcctaggctattgactgttaagtcctcaggtttggcccagattccagttcgtgcctctgaggtccaccagagggcgcatgaagcccaggctgttgccaaaccctaccctgccccacaccaaggagccagccaaaggcaaataaagttattgagtgtttagtagaaaggaaaaaaaaaaaaactcgagggggggcccgtacccaattsgccctatagtgagtcgtattcg

SEQ ID NO: 365 - DNA, 1033 bp, Homo sapiens
ggcacgagggacagagcctccactgagctgctgcctgcccgccacatacccagctgacatgggcaccgcaggagccatgcagctgtgctgggtgatcctgggcttcctcctgttccgaggccacaactcccagcccacaatgacccagacctctagctctcagggaggccttggcggtctaagtctgaccacagagccagtttcttccaacccaggatacatcccttcctcagaggctaacaggccaagccatctgtccagcactggtaccccaggcgcaggtgtccccagcagtggaagagacggaggcacaagcagagacacatttcaaactgttccccccaattcaaccaccatgagcctgagcatgagggaagatgcgaccatcctgcccagccccacgtcagagactgtgctcactgtggctgcatttggtgttatcagcttcattgtcatcctggtggttgtggtgatcatcctagttggtgtggtcagcctgaggttcaagtgtcggaagagcaaggagtctgaagatccccagaaacctgggagttcagggctgtctgaaagctgctccacagccaatggagagaaagacagcatcacccttatctccatgaagaacatcaacatgaataatggcaaacaaagtctctcagcagagaaggttctttaaaagcaactttgggtccccatgagtccaaggatgatgcagctgccctgtgactacaaggaggaagagatggaattagtagaggcaatgaaccacatgtaaattattttattgtttcatgtctgcttctagatctaaaggacactagcattgccccagatctgggagcaagctaccaacaggggagactctttcctgtatggacagctgctgtggaaatactgcctgcttctcccacctcctcagagccacaggaaagaggaggtgacagagagagagcaaggaaagtgatgaggtggattgatactttctactttgcattaaaattattttctagcctgcaaaaaaaaaaaaaaaaaa

SEQ ID NO: 366 - DNA, 2020 bp, Homo sapiens
ggcagagagggaaaagggaaggaggagactgagtgattaagtcacccactgtgaagagctggtcttctatttaatgggggctctctctgcccaggagtcagaggtgcctccaggagcagcaggagcatggccgaggatctgggactgagctttggggaaacagccagtgtggaaatgctgccagagcacggcagctgcaggcccaaggccaggagcagcagcgcacgctgggctctcacctgctgcctggtgttgctccccttccttgcaggactcaccacatacctgcttgtcagccagctccgggcccagggagaggcctgtgtgcagttccaggctctaaaaggacaggagtttgcaccttcacatcagcaagtttatgcacctcttagagcagacggagataagccaagggcacacctgacagttgtgagacaaactcccacacagcactttaaaaatcagttcccagctctgcactgggaacatgaactaggcctggccttcaccaagaaccgaatgaactataccaacaaattcctgctgatcccagagtcgggagactacttcatttactcccaggtcacattccgtgggatgacctctgagtgcagtgaaatcagacaagcaggccgaccaaacaagccagactccatcactgtggtcatcaccaaggtaacagacagctaccctgagccaacccagctcctcatggggaccaagtctgtatgcgaagtaggtagcaactggttccagcccatctacctcggagccatgttctccttgcaagaaggggacaagctaatggtgaacgtcagtgacatctctttggtggattacacaaaagaagataaaaccttctttggagccttcttactataggaggagagcaaatatcattatatgaaagtcctctgccaccgagttcctaattttctttgttcaaatgtaattataaccaggggttttcttggggccgggagtagggggcattccacagggacaacggtttagctatgaaatttggggcccaaaatttcacacttcatgtgccttactgatgagagtactaactggaaaaggctgaagagagcaaatatattattaagatgggttggaggattggcgagtttctaaatattaagacactgatcactaaatgaatggatgatctactcgggtcaggattgaaagagaaatatttcaacacctccctgctatacaatggtcaccagtggtccagttattgttcaatttgatcataaatttgcttcaattcaggagctttgaaggaagtccaaggaaagctctagaaaacagtataaactttcagaggcaaaatccttcaccaatttttccacatactttcatgccttgcctaaaaaaaatgaaaagagagttggtatgtctcatgaatgttcacacagaaggagttggttttcatgtcatctacagcatatgagaaaagctacctttcttttgattatgtacacagatatctaaataaggaagtatgagtttcacatgtatatcaaaaatacaacagttgcttgtattcagtagagttttcttgcccacctattttgtgctgggttctaccttaacccagaagacactatgaaaaacaagacagactccactcaaaatttatatgaacaccactagatacttcctgatcaaacatcagtcaacatactctaaagaataactccaagtcttggccaggcgcagtggctcacacctgtaatcccaacactttgggaggccaaggtgggtggatcatctaaggccgggagttcaagaccagcctgaccaacgtggagaaaccccatctctactaaaaatacaaaattagccgggcgtggtagcgcatggctgtaatcctggctactcaggaggccgaggcagaagaattgcttgaactggggaggcagaggttgcggtgagcccagatcgcgccattgcactccagcctgggtaacaagagcaaaactctgtccaaaaaaaaaaaaaaaaaaaa

SEQ ID NO: 367 - DNA, 3097 bp, Homo sapiens
ccagcttgctcgcactcggctgtgcggcggggcaggcatgggagccgcgcgctctctcccggcgcccacacctgtctgagcggcgcagcgagccgcggcccgggcgggctgctcggcgcggaacagtgctcggcatggcagggattccagggctcctcttccttctcttctttctgctctgtgctgttgggcaagtgagcccttacagtgccccctggaaacccacttggcctgcataccgcctccctgtcgtcttgccccagtctaccctcaatttagccaagccagactttggagccgaagccaaattagaagtatcttcttcatgtggaccccagtgtcataagggaactccactgcccacttacgaagaggccaagcaatatctgtcttatgaaacttgctctaccagcaatgcgatgcccagccaggggccagcgggtctggggtctatgtgaggatgtggaagagacagcagcagaagtgggagcgaaaaattattggcattttttcagggcaccagtgggtggacatgaatggttccccacaggatttcaacgtggctgtcagaatcactcctctcaaatatgcccagatttgctattggattaaaggaaactacctggattgtagggaggggtgacacagtgttccctcctggcagcaattaagggtcttcatgttcttattttaggagaggccaaattgttttttgtcattggcgtgcacacgtgtgtgtgtgtgtgtgtgtgtgtgtaaggtgtcttataatcttttacctatttcttacaattgcaagatgactggctttactatttgaaaactggtttgtgtatcatatcatatatcatttaagcagtttgaaggcatacttttgcatagaaataaaaaaaatactgatttggggcaatgaggaatatttgacaattaagttaatcttcacgtttttgcaaactttgatttttatttcatctgaacttgtttcaaagatttatattaaatatttggcatacaagagatatgaattcttatatgtgtgcatgtgtgttttcttctgagattcatcttggtggtgggtttttttgtttttttaattcagtgcctgatctttaatgcttccataaggcagtgttcccatttaggaactttgacagcatttgttaggcagaatattttggatttggaggcatttgcatggtagtctttgaacagtaaaatgatgtgttgactatactgatacacatataaaactataccttatagtaaaccagtatcccaagctgcttttagttccaaaaatagtttcttttccaaaggttgttgctctactttgtaggaagtctttgcatatggccctcccaactttaaagtcataccagagtggccaagagtgtttatcccaacccttccatttaacaggatttcactcacatttctggaactagctatttttcagaagacaataatcagggcttaattagaacaggctgtatttcctcccagcaaacagttgtggccacactaaaaacaatcatagcattttacccctggattatagcacatctcatgttttatcatttggatggagtaatttaaaatgaattaaattccagagaacaatggaagcattgcctgtcagatgtcacaacagaataaccacttgtttggagcctggcacagtcctccagcctgatcaaaaattattctgcatagttttcagtgtgctttctgggagctatgtacttcttcaatttggaaacttttctctctcatttatagtgaaaatacttggaagttactttaagaaaaccagtgtggcctttttccctctagctttaaaagggccgcttttgctggaatgctctaggttatagataaacaattaggtataatagcaaaaatgaaaattggaagaatgcaaaatggatcagaatcatgccttccaataaaggcctttacacatgttttatcaatatgattatcaaatcacagcatatacagaaaatacttggacttattgtatgtttttattttatggctctcggcctaagcacttttttctaaatgtatcggagaaaaaatcaaatggactacaagcacgtgtttgctgtgcttgcaccccaggtaaacctgcattgtagcaatttgtaaggatattcagatggagcactgtcacttagacattctctgggggattttctgcttgtctttcttgagctttttggaaggataattctgataaggcactcaagaaacgtacaaccacagtgctttcttcaaatcatatgagaaatactatgcatagcaaggagatgcagagccgccaggaaaattctgagttccagcacaattttctttggaatctaacaggaatctagcctgaggaagaagggaggtctccatttctatgtctggtatttgggggttttgtttgtttttgctttagcttggtgaaaaaaagttcactgaacaccaagaccagaatggatttttttaaaaaaatagatgttccttttgtgaagcaccttgattccttgattttgattttttgcaaagttagacaatggcacaaagtcaaaatgaaatcaatgtttagttcacaagtagatgtaatttactaaagaatgatacacccatatgctatatacagcttaactcacagaactgtaaaagaaaattataaaataattcaacatgtccatctttttagtgataataaaagaaagcatggtattaaactatcatagaagtagacagaaaaagaaaaaaggactcatggcattattaatataattagtgctttacatgtgttagttatacatattagaagcatatttgcctagtaaggctagtagaaccacatttcccaaagtgtgctccttaaacactcatgccttatgattttctaccaaaagtaaaaagggttgtattaagtcagaggaagatgcctctccattttccctctctttatcagaggttcacatgcctgtctgcacattaaaagctctgggaagacctgttgtaaagggacaagttgaggttgtaaaatctgcatttaaataaacatctttgatcacaaaaaaaaaaaaaaaaaaaa

SEQ ID NO: 368 - DNA, 2624 bp, Homo sapiens
  misc_feature (2508)..(2508): n equals a,t,g, or c
  misc_feature (2518)..(2518): n equals a,t,g, or c
  misc_feature (2596)..(2596): n equals a,t,g, or c
  misc_feature (2619)..(2619): n equals a,t,g, or c
gaattcccgggtcgasccacgcgtssgcacctcctcccgccaggcgctttctcggacgccttgcccagcgggccgcccgaccccctgcaccatggaccccgctcgccccctggggctgtcgattctgctgcttttcctgacggaggctgcactgggcgatgctgctcaggagccaacaggaaataacgcggagatctgtctcctgcccctagactacggaccctgccgggccctacttctccgttactactacgacaggtacacgcagagctgccgccagttcctgtacgggggctgcgagggcaacgccaacaatttctacacctgggaggcttgcgacgatgcttgctggaggatagaaaaagttcccaaagtttgccggctgcaagtgagtgtggacgaccagtgtgaggggtccacagaaaagtatttctttaatctaagttccatgacatgtgaaaaattcttttccggtgggtgtcaccggaaccggattgagaacaggtttccagatgaagctacttgtatgggcttctgcgcaccaaagaaaattccatcattttgctacagtccaaaagatgagggactgtgctctgccaatgtgactcgctattattttaatccaagatacagaacctgtgatgctttcacctatactggctgtggagggaatgacaataactttgttagcagggaggattgcaaacgtgcatgtgcaaaagctttgaaaaagaaaaagaagatgccaaagcttcgctttgccagtagaatccggaaaattcggaagaagcaattttaaacattcttaatatgtcatcttgtttgtctttatggcttatttgcctttatggttgtatctgaagaataatatgacagcatgaggaaacaaatcattggtgatttattcaccagtttttattaatacaagtcactttttaaaaaatttggatttttttatatataactagctgctattcaaatgtgagtctaccatttttaatttatggttcaactgtttgtgagactgaattcttgcaatgcataagatataaaagcaaatatgactcactcatttcttggggtcgtattcctgatttcagaagaggatcataactgaaacaacataagacaatataatcatgtgcttttaacatatttgagaataaaaaggactagcaaataaaactcattttgcatttaaaagttggattatattttagtcccaagaagacaaagtcgcagattaacaacactttaaaaatattactcccattttattgtgttagattgcagtacaatgaatgaataaggggatttatttaaaagatcttaactttcttgactgatttaaaaagctaatcaatttattaaagccagaaatgttctcctctgggaaagcaatttctatctatttatctaccaatccccactcacatgtatatgtttgtgtttacatagagatagatggttttaagggttttcctattgttaaattatttcctaagacattgtgggttggagaccactaaacttataaaaaaccaaggaaagtaaagtttttcaaatgtttatactgtttaaggtgtttatttatataaaccatgcatgagaaaccatgcataaatttaataatttaaatttcaccagtaaattatcattgattaaatatggtcataccaatgaaataggttttttctttctctgtaataaaacaatttttctaaattcttatgttttcatagcaagattaacatatttaattacaaattaaatatgcaaaatgacaaatgcgtttaccttttgcttgaacaatctttcatttaaaaatttatcccagttattttgacaaataggtatatgcctgagaactttgaatgatgctgaaagctagaagcaaaccaggtactcttcagtcagggactggttgaagattttatggatgaggagttagcaaaatatctatatatgcatatcttctgactcccaggatacataagaaacacagggcctagaacagtatgaataaacacacatatacacaaacatcacagaagatactaaagatattaaaaatgtttacctatagaggtttggagagaacagaggggtggacagttgtggagataatatttgtgtaaatataactgtgatatagtttttatcttggaccatgtaaatatttgacataattaataatcaaaattaaataaaaaagaaaaagcatttctttaagcattcaaacccaactgaataccaaatagtggcaaaactacacaaaagatatatacttattttcaatgacttcacaaattaatatgagaatgtcttttggggaatataaaggtgaaaaaattctgaagaaatctcaaaatgcatttttaaatttgktattactttttatttgaatagttttggagttacaagtgggtttttattacakggrtgaattatattgcagtgaattctgagrttttagtgcactgtgaaaatgcatttaagtagtctcantggtaatggnaatactgggggtattttgaacctattggatctagaatctatgttgtaagaaaccagtagttcatttctttagaagcangattttagtgttagagaaatganatcaa

SEQ ID NO: 369 - DNA, 1387 bp, Homo sapiens
ggcacgagcccggtcggtagtcgtcgccccagcccgccgggggcgcagcgcccgagccgcggccctcgagacgggaccgagagcatcatgggcagcactgtcccgcgctccgcctccgtgctgcttctgctgctgctcctgcgccgggccgagcagccctgcggggccgagctcaccttcgagctgccggacaacgccaagcagtgcttccacgaggaggtggagcagggcgtgaagttctccctggattaccaggtcatcactggaggccactacgatgttgactgctatgtagaggacccccagggaacaccatctacagagaaacgaagaagcagtacgacagcttcacgtaccgggctgaagtcaagggcgtttatcagtttgcttcagtaatgagttttccaccttctctcacaagaccgtctactttgactttcaagtgggcgatgagcctccattctcccagacatggggaacagggtcacaactctcacccagatggagtccgctgctgaccatcatgaggctctgaaaacggtgattgactcccagacgcattaccggctgcgggaggtccaggaccgggcccgagcggaagaccttaatagccgagtctcttactggtctgttggcgagacgattgccctgttcgtggtcagcttcagtcaggtgctactgttgaaaagcttcttcacagaaaacgacccatcagcaggcagtccactcctagccccggcatcctgctctagggcccctcatgcccccaggctggagcagctctcctaggtcacagcctgctgggctgggtcgcgtagcccagggtggaggcagaacgatgctgctgtggtagccctttgcctttcatgcccatgcttgattcttgcacctcagcagctgaaggtctcagagaccagtaatcagaaggcatccgactgcattaagtgtgcagcgctgaaaagacatttacaactaggccagggattagccactgtgggagggtggacaggcaatggttcagtggcctggctgttggcaggaactccaagtgcccaggcctcttgggcagcttagggccctgcctctgtttcatgatgcatgggtcatttgtcttgggtgtcctatcccatatggagaagaaaggggctctaagttctggctcttctttctttggggttctctgtacctgaggaaaccaggccctgggtgactttgcagatctgctcaccctcggtgagcaacagtgtcagccatgcaagcaggacagaatggtgactgggtgcccttggtgagctgtgtatttcctaggaggtagaaaactgtgggaaactgtggctaataaaaactaagtgtgagcgtcctggaaaaaaaaaaaaaaaaaaaaaaa

SEQ ID NO: 370 - DNA, 2022 bp, Homo sapiens
gagcaaaaaactacactcagcccagcacattgatcaagtatctatctctgagcagttggccttgccagggagagcagagatgtggcaggctccttcagctggagacagggagcttctcagagaagtgagcagagactccacagacaccctaaaaaggcttctactcaagaagtaaagccactactcctgcctttttgcttagtggacaggaaggcacaggagtttgtctgggacatcatagaaattcttaggtttaacttaattctggtcattgtcttctttatttcctgtttttcttccctttgtcagtcttcgcatccaagatttcttccctccctcttgtgggccagcctgtcctgttccagagctagcctgttcctgggtagccttccttagcctccattcagcctcaggtcttttgccttcttccgtgtttatttagagagcagaatctaataacgggttccactgtagccactatccatggacttctgggtcctcttcaggtttgagtgcttgaaaatgttcattctctgggcttgtggcctgtctcctccactctcctcctcaccctctcgctccttcctgtgtgagggccgctctgcagtaatgttctcaggcaagccttcctaggcacctcagaaactactttgccagagccagtaagaatatataatattggagcagttgccaggatagaaattaaatatagattccagtttaggatagagtttttaccgagagctctttagacagtatacctgtgtcttctctggcaattgctttcattttagtcctatataaaagctttccttttctgtttttttttaaaactatgcttttgcttgcctaaatcttttgatcttatatttctctcatctcagagcctgtcctgagttgtaaggtatttcatactgccttacttaaaagttttttaaactactagagtcatttgatacacacagaagttacctaataatccaaagatgtccatcaagggaggaagggtgggtcatcagactttgcctttgatgttgtagactaggctcctgagttaagcagcagagggacagcagtgccatgtgccttcactgtgtcccaggaaatctgggttggttccagtgggaaataccagtatttcttggttctggaaagtagcaaaagagtaggagatggggaaatagggatggggagagcaagccccgcatgtccatggcgagtcaggtggggagcacgggtggaagggccggctgttgacagacagactaagctgtgtggtgctcttgccgccccttcctgggtacagagcttgagaaaaatgcagccgaccactccctgtgtttgtacagagcaaagcccaaaagccaacctcagatctcctgatttggcagctgaagaaatcagcagagtcctgattgcctgattcagtcccaaaaatgaatgtcaggccccgccccctccccaccaacattgcctctcctacattctccttctgcccctaaatcagacaggaggccagagaggagtattgctcaatgcgtgctatgtgcaactcctcaggccttgtgccacctccatgctgagccctgaagcagggtgtcctgggtgcctgtgtgtcagctccctcctctctacctacctctgaccttcttgtgggtgagggtggccatgcttatggccatcttaaaactggagaggcagagaactacttatgagtctgtagaccacgtgttgtcttccatggcctgtttctcctgctgtctgggtgagtgagcctgcaacgcaatgcccatgagagtaaatgcctcctgacctaccctgctcagcactgttctagtgtcttggccttgaaagaaaagcctgacttcctgctgacacatgtggtaggggcatggcagctatgaggcacctcctacgtctgttttctggctgtggtgacttgggatttttaaccttatatatctttttcctttactcaaaacaaaacaatttttagcacactgaaaaaaaaaaaaaaaaact

SEQ ID NO: 371 - DNA, 1026 bp, Homo sapiens
ggcacgagcctgaatgtcgaagactctacttttgtctataaaacactatataaatgaattttaataaatttttgcttcagcacttggccccattgtagattgccctgtgcagtaaactttcaaggtgtcagctgccccagattgcttcatttgctgggtgtggaaagagttgctatggccaggcatatgggatttggaagctcagcagaagtgacttctgctctgtggttgctgctccccggctttcacagacatggtatggcagccattcttttatctatttaaccaagaggatgctggggaattgtgctgcttgtcctgttggctggtggctgcattatgtcctggggtgtgcatgtgggtctatttagagcttctgtcccttccttcccattgcaagttgcacccagatgagacagctgtagtactaggtctctttcacctctcattgcctgtccctgcttcgagctggttgtcttgtgcgtgggacatgggccttcctatctgtgttttctcaaagtcaggagctgaccaggagcacactaaggtgtggtcatgcatcataaccaacattcactcatctgggacattcttaagatacatttataaatcatttcagcagtagtactttgtatgtgttgagagtttacagagctctttgacatacgcgatcttagtctttacaaataaggaaaacagctcagtttgggaagtatcagagatgggattcaaacccagatcctctggtccaagttgtatgtgcactgaactaatcaggcaggaaaaaagcccagccactgtctcacagattgttttttgtatattgtagcaaaatcctgaaacaatggggtccttccagtctcatcatacaaaatggcaatcttggctgggtgcggtggttcatgcctataatcccagtgctttacaaggctgaggcaggaggctctcttgagaataggagttcaagaccagcctgggcaacatagcaagatcctgtctctccaaaaaaaaaaaaaaaaaaaaaaa

SEQ ID NO: 372 - DNA, 1076 bp, Homo sapiens
tgccacggcatggagaatggctccgcttctgttgcagctggcggtgctcggcgcggcgctggcggccgcagccctcgtactgatttccatcgttgcatttacaactgctacaaaaatgccagcactccatcgacatgaagaagagaaattcttcttaaatgccaaaggccagaaagaaactttacccagcatatgggactcacctaccaaacaactttctgtcgttgtgccttcatacaatgaagaaaaacggtaaacgagatcctgcgttcacttatgaagtgatagtagttgatgatggcagtaaagatcagacctcaaaggtagcttttaaatattgccagaaatatggaagtgacaaagtacgtgtgataaccctggtgaagaatcgtggaaaaggtggagcgattagaatgggtatattcagttctcgaggagaaaagatccttatggcagatgctgatggagccacaaagtttccagatgttgagaaattagaaaaggggctaaatgatctacagccttggcctaatcaaatggctatagcatgtggatctcgagctcatttagaaaaagaatcaattgctcagcgttcttacttccgtactcttctcatgtatgggttccactttctggtgtggttcctttgtgtcaaaggaatcagggacacacagtgtgggttcaaattatttactcgagaagcagcttcacggacgttttcatctctacacgttgaacgatgggcatttgatgtagaactactgtacatagcacagttctttaaaattccaatagcagaaattgctgtcaactggacagaaattgaaggttctaaattagttccattctggagctggctacaaatgggtaaagacctactttttatacgacttcgatatttgactggtgcctggaggcttgagcaaactcggaaaatgaattaggttgtttgcagtcttcagttgtgttcttatgcttcagtgtcacatttcatttcatttgaaactaaaattttaagtaaagctgaaataaacttcttgtcattgtcaaaaaaaaaaaaaaaaaaaaaaaaaaaa

SEQ ID NO: 373 - DNA, 622 bp, Homo sapiens
gcccacgcgtccgcccacgcgtccgagcctgcagcccagccccacccagacccatggctggacctgccacccagagccccatgaagctgatggccctgcagctgctgctgtggcacagtgcactctggacagtgcaggaagccacccccctgggccctgccagctccctgccccagagcttcctgctcaagtgcttagagcaagtgaggaagatccagggcgatggcgcagcgctccaggagaagctgtgtgccacctacaagctgtgccaccccgaggagctggtgctgctcggacactctctgggcatcccctgggctcccctgagcagctgccccagccaggccctgcagctggcaggctgcttgagccaactccatagcggccttttcctctaccaggggctcctgcaggccctggaaggatctcccccgagttgggtcccamcttggacacactgcagctggacgtcgccgactttgccaccaccatctggcagcagatggaagaactgggaatggcccctgccctgcagcccamccagggtgccatgcsggcttcgsctctgctttccagcgccgggcaggaggggtcctagttgcctcccatctgcagagcttcc

SEQ ID NO: 374 - DNA, 1574 bp, Homo sapiens
cccacgcgtccgggactgcagctgtggggagatttcagtgcattgcctcccctgggtgctcttcatcttggatttgaaagttgagagcagcatgttttgcccactgaaactcatcctgctgccagtgttactggattattccttgggcctgaatgacttgaatgtttccccgcctgagctaacagtccatgtgggtgattcagctctgatgggatgtgttttccagagcacagaagacaaatgtatattcaagatagactggactctgtcaccaggagagcacgccaaggacgaatatgtgctatactattactccaatctcagtgtgcctattgggcgcttccagaaccgcgtacacttgatgggggacatcttatgcaatgatggctctctcctgctccaagatgtgcaagaggctgaccaggggaacctataatctgtggaaatccgcctcaaaaggggagagccaggtgttcaagaaggcggtggtactgcatgtgcttccagaggagcccaaaggaggagattgtatttcgttactaccacaaactcaggatgtctgcggagtactcccagagctggggccacttccagaatcgtgtgaactggtgggggacattttccgcaatgacggttccatcatgcttcaaggagtgagggagtcagatggaggaaactacacctgcagtatccacctagggaacctggtgttcaagaaaaccattgtgctgcatgtcagcccggaagacctcgaacactggtgaccccggcagccctgaggcctctggtcttgggtggtaatcagttggtgatcattgtgggaattgtctgtgccacaatcctgctgctccctgttctgatattgatcgtgaagaagacctgtggaaataagagttcagtgaattctacagtcttggtgaagaacacgaagaagactaatccagagatgaaagaaaaaccctgccattttgaaagatgtgaaggggaggtgaacacacgcttcagcctaaaacactaaaaacacatttactccccaataattgtacgggagttgatcgaggaagaagaaccaagtgaaaaatcagaggccacctacatgaccatgcacccagtttggccttctctgaggtcagatcggaacaactcacttgaaaaaaagtcaggtgggggaatgccaaaaacacagcaagccttttgagaagaatggagagtcccttcatctcagcagcggtggagactctctcctgtgtgtgtcctgggccactctaccagtgatttcagactcccgctctcccagctgtcctcctgtctcattgtttggtcaatacactgaagatggagaatttggagcctggcagagagactggacagctctggaggaacaggcctgctgaggggaggggagcatggacttggcctctggagtgggacactggccctgggaaccaggctgagctgagtggcctcaaaccccccgttggatcagaccctcctgtgggcagggttcttagtggatgagttactgggaagaatcagagataaaaaccaacccaaatcaaaaaaaaaaaaaaaaa

SEQ ID NO: 375 - DNA, 1184 bp, Homo sapiens
ggcacgagcctgaggtcctactgcacagcgaaggggctgccagcagcagcgtctgcaagctggacggactcatccaccgcttcatcacgctccttgcggacaccagcgactcccgggcgttggagaaccgaggggcggatgccagcatggcctgccggaagctggcggtggcgcacccgctgctgctgctcaggcacctgcccatgatcgcggcgctcctgcacggccgcacccacctcaacttccaggagttccggcagcagaaccacctgagctgcttcctgcacgtgctgggcctgctggagctgctgcagccgcacgtgttccgcagcgagcaccagggggcgctgtgggactgccttctgtccttcatccgcctgctgctgaattacaggaagtcctcccgccatctggctgccttcatcaacaagtttgtgcagttcatccataagtacattacctacaatgccccagcagccatctccttcctgcagaagcacgccgacccgctccacgacctgtccttcgacaacagtgacctggtgatgctgaaatccctccttgcagggctcagcctgcccagcagggacgacaggaccgaccgaggcctggacgaagagggcgaggaggagagctcagccggctccttgcccctggtcagcgtctccctgttcacccctctgaccgcggccgagatggccccctacatgaaacggctttcccggggccaaacggtggaggatctgctggaggttctgagtgacatagacgagatgtcccggcggagacccgagatcctgagcttcttctcgaccaacctgcagcggctgatgagctcggccgaggagtgttgccgcaacctcgccttcagcctggccctgcgctccatgcagaacagccccagcattgcagccgctttcctgcccacgttcatgtactgcctgggcagccaggactttgaggtggtgcagacggccctccggaacctgcctgagtacgctctcctgtgccaagagcacgcggctgtgctgctccaccgggccttcctggtgggcatgtacggccagatggaccccagcgcgcagatctccgaggccctgaggatcctgcatatggaggccgtgatgtgagcctgtggcagccgacccccctccaagccccggcccgtcccgtccccggggatc

SEQ ID NO: 376 - DNA, 2911 bp, Homo sapiens
ccacgcgtccgctgaggaacagacgttccctggcggccctggcgccttcaaacccagacatgctgctgctgctgctgctgctgcccctgctctgggggacaaaggggatggagggagacagacaatatggggatggttacttgctgcaagtgcaggagctggtgacggtgcaggagggcctgtgtgtccatgtgccctgctccttctcctacccccaggatggctggactgactctgacccagttcatggctactggttccgggcaggagacagaccataccaagacgctccagtggccacaaacaacccagacagagaagtgcaggcagagacccagggccgattccaactccttggggacatttggagcaacgactgctccctgagcatcagagacgccaggaagagggataaggggtcatatttctttcggctagagagaggaagcatgaaatggagttacaaatcacagttgaattacaaaactaagcagctgtctgtgtttgtgacagccctgacccataggcctgacatcctcatcctagggaccctagagtctggccactccaggaacctgacctgctctgtgccctgggcctgtaagcaggggacaccccccatgatctcctggattggggcctccgtgtcctccccgggccccactactgcccgctcctcagtgctcacccttaccccaaagccccaggaccacggcaccagcctcacctgtcaggtgaccttgcctgggacaggtgtgaccacgaccagtaccgtccgcctcgatgtgtcctaccctccttggaacttgaccatgactgtcttccaaggagatgccacagcatccacagccctgggaaatggctcatctctttcagtccttgagggccagtctctgcgcctggtctgtgctgtcaacagcaatccccctgccaggctgagctggacccgggggagcctgaccctgtgcccctcacggtcctcaaaccctgggctgctggagctgcctcgagtgcacgtgagggatgaaggggaattcacctgccgagctcagaacgctcagggctcccagcacatttccctgagcctctccctgcagaatgagggcacaggcacctcaagacctgtatcacaagtgacactggcagcagtcgcggagctggagccacagccctggccttcctgtccttctgcatcatcttcatcatagtgaggtcctgcaggaagaaatcggcaaggccagcagcgggcgtgggggatacaggcatggaagatgcaaaggccatcaggggctcggcctctcaggtgagtgatgtgggcttctccacaccgagcatccagcctggacacctctgacaggatggcccccaggatcgctctctttggtatggccaaagtcacttcctcgtctcctcctccttcccacaggccggcttctacaggactcccccatcttgctgacagcatggcagtccctacccccaatttttcccaggccaggcactgagtaggagttatctcctctctgtcctccttttcttctctatagccccgattcaccatctctcctccatttttcctccccaagaatagctggcatctcttctccctggccccagccatcctgacccctctcattatttttcctattggcgggacctgatttctttgaccggcttgtcatccttacgccactaacctgtgagcttccccaggtcaggtatcatgtctcaattaaggccctgtaattctctctcatttactctcgttttgcccgttgtatcataatttacatgtagatactcatttcttatttttatttttttctcgaggcagaatcttgctctgtcacctaggctggagtgcagtggggcaatctcggctcactgcaacctctgcctcccaggttcaagcaattctcctgcctcagcctcccaagtagccgggattgcaggcgcgcgccaccaggccaggctaatttttgtatttttagtagagacggggtttcaccgtgtcggccagctggtctcgaactcctgacctcgtgatccgcccgcctcagcctcccaaagtgttaggattaggggcatgagccaccgcacccagcttgcattgaatattttcaaggagctaaaagaagattttaaatggtctcacaaaaacagataaatatttgcacagatgggtgtgctaatcattgtgccttgatggttccacgatgtatccgggtgtggaaatctcactgggtctctctcaaggccactcggctactcaggacagggctggaatttaaagcctgtccgattctgaggtctcttctctcatctagcactgagtcaagcaatcagcaggctgggcaccccttagccataagttttcaggaaataaattccttgagggcattgacttttacaaaagagggagcagcaatggcctagagtctcaggaacaagacaggtgcactgaggagatgaaggccgggaccccctgcccaacctgtatggcgggtctgtacttattttgtttacccccaatttaaaacgtttttttttattgcaggttgtttgtttgatatggtttggctgtgtccccacccaaatcttatctagaattgtaatcagaattataatccccatgtgttgggggagggacctggtgggaggtgataggatcatgggggtggttcccccatgctgttctgatagtgagtgagttatcacgagatctgatggttttgtaagtggtggtttcccctgctcttctctcttgcctgccaccatgtaagatgtgcctggttccccttccgccatgattgtaagtttcctgaggcctcccccgccatgtggaactgtgagtcaattacacctctttcatttataaaaaaaaaaaaaaaaaaaaaaaaaaaaaaaaaaa

SEQ ID NO: 377 - DNA, 1638 bp, Homo sapiens
gcggacgcgtgggaggggtttcgccatgttggccaggctggtcttgaactcctgacctcaggtgatacgcccaccttggcctctgaaagtgctaggattacaggcgtgagccattgtgcctggccaccttttacattcttataggagactgttatggaaagttttagactcaggagaggcacacaaataaggattatattacccaccaggtgttttgttgaaaaggcaggaagtgaggtgggcagatcatttgaggtcaagagtttgagaccagctgattaatatggtaaaaccccgtctctactaaaaatataaaaaattagctagatgtggtggtgctggtacgtgcctgtaatctcagctatttgggaggctgaggcaggagaatcacttgaacccgagaggccgagattgcaccactgcactacagcctgggtgacagaacgagattccgtctcaaaaaagaaaaaaaaaaaaaagatggataagttactgctcatccggggaaggccagtattatgggaaacaggatggcatccggagggtgacaacattatagggggagatttcaggttgtttttttccaaagctgagggtactggcaagccaagggggagagggtctaagtgtgagaaccaaggggactgtgcctggaattccttcctgagcctgtgccgtaatgcccgcccctctccctcctccgtctgcgtgcagtcatctggggacctggagaatgatgagcaggcagccagtgccatctctgagctggtcagcacagcctgcggtttccggctgcaccgcggcatgaatgtgcccttcaagcgcctgtctggtgagcccctgcccctgcccttggtggtggtactgggagcggggggctacttccaggggcttctcggcttctcttcttccagcctcctaccatctcctggggtctctggtctggccactttcctccctttgggactcccttgtatcagaattgtgaatgagaaggcaagagaaaggagatctagcagaggccactcatcttcaaatctctgagcctggaactatagaacttctttggctttgatcccagccaatgtgcgtgtggccccgccccatggagtctgttgcacccactaactctgtgctcccttccctctcctggggcgggggaaggtgtgtctctcctccagtggtctttggagaacacacactgctggtgacggtgtcaggacagagggtgtttgtggtgaagaggcagaaccgaggtcgggagcccattgatgtctgagcctgccggagggcgagggtcggagaagcggatgggtcctgggcctctgtgatgaggcaggcacacctgtcggtcttggcttgctgctagaactagggccttctgctcgcccacctcccacccctacctggacgggcccaggcttggggactctgagctgtgttaaggagaacaagggcaaggagacctccctttgtgctccctcactccctaataaacatgagtctgatgttctccaaaaaaaaaaaaaaaaaaaaaaaaaaaaaaaaaaaaaaaaaaaaaaaaaaaaaaaaaaaaaaaaaaaaaaaaaaaaaaaaaaaaaaaaaaaaaaaaaaaaaaaaaaaaaaaaaaaaaaaaaa

SEQ ID NO: 378 - DNA, 1497 bp, Homo sapiens
acgctatagaaggtacgcctgcaggtaccggtccggaattcccgggtcgacttgctgcgtcatgckccgaaagatgacatcatcgtcatgctgctgtgcatgtcgctgaccgtgttgtttgatatggttattgccatcagcgtggggatcgtgctggcatcgctgctgtttatgcgtcgtatcgcacgtatgactcgcctggcaccggtagtcgtagatgttccagacgatgtcctggttctgcgcgttattggcccgctgttttttgctgctgctgaaggcttattcacggacctggagtcacgtcttgaaggcaaacggattgtgattctgaagtgggatgccgttccggtacttgatgctggtggtcttgatgcgttccagcgttttgtgaagcgtctgcccgagggatgtgaactgcgcgtgtgcaagtggaattccagccactgcgcactatggctcgcgctggcattcaaccgatcccgggacgcctggcgttcttcccgaatcgtcgcgcggcgawggcggatttataagtacgagattgaccagtcagcgcaaactgactggtcagcaaactgcattatttgytagctatgacggcgattatcgctacggcggcaacgtttgtcatagtggckwwcccaccagtaacggtcgcacacctgttcatgcccgccaacacgggcacccgccagccagagaatggcaccgacgaaaatacttagcactgcaccatgtgcgaaatactggggcatattaaactgtggtaactggttgaggattgaataccccacgccgaccaccattaccaccagacccaaccccatgagcacgttaccgagtaacgaagcgtttttgcgtttcatatgtcacctccggaactttctgggttgtaacagggaatacccctcttccttatgtgtaaagtatagacaacacccagtgggttatgtgcgggcgtgatcacaattacaacccttatttcaacaaaactttacaaataaacgcctgaacaccttgactttctaatagtccactcaggcaattattacgttatctgcatttgatacgcagttttttgtcaagcggggccgcaaccagtaaactacgcgccagttatgtacacactcaggacaaaaaaacgtgacgattaaattggattgkcggcctggcgaamccccggtgctgaatacgccgcaacgcgacataatgctggtgcctggttcgttgacttactggcagagcgtttgcgcgctycctgcgcgaagaggctaaattctttggttatacttcgcgagtcactcttggaggcgaagatgtccgcctgttagtcccgactacatttatgaatctcagcggcaaagccgttgcggcgatggccagttttttccgcattaatccggacgaaattctggtggcccacgacgaactggatctgcctcctggcgtcgccaaatttaaattgggcggtggccatggtggtcacaatggact

SEQ ID NO: 379 - DNA, 1852 bp, Homo sapiens
ccacgcgtccgcttctgcttgctcagatatttatggtgagagtatttcatctcattttacagagtcaacaggaaagttgatagagagcttgtcagattgtgcttcctccttacctataaaaaagattgctggtagtaattataacacttttttggactctgaactcagtatgttaaatgggacaaaagttctttcagacagtgccgtgggcattgacctgggtagtactggtgatacaacagaagcattgcacgaactaagaactgccgaagagttcaaaacagaagagcaagatgcctcagggagtatagaatttggtgtatcttttcctgatagggaatcatcatctatggaaacatccatcgaaccaaaagcaactgaaacttctcacacagagggaattactgccattgaggagagctgggagtctatgtttaacgatgatggtgactgcctggatccacgtcttctacaagagttatcagggaataccaagagcagagagagcatccaggaacctagatctgattactacaatcatgaagttcctgatattgacctcagtgattgtgaattcccacatgtcattgaaatttatgactttccccaagaatttcgtactgaagaccttctacgggttttctgcagttatcaaaagaaaggatttgatattaaatgggtggatgatacacatgccctaggagtattctccagtccaattacagctcgtgatgcgttgggtattaaacacaccatggtgaagattcgtcccttgtcacaggccacaagagcagccaaggccaaagctagagcttatgctgagttcctccagccagcaaaggagcgtcctgagacttcagcagccctagccagaaggttagtcatcagtgcccttggggttcgaagtaagcagagcaaaaccgaacgagaagcagagctcaagaaactgcaagaagccagagagagaaagcggttggaagccaagcaacgggaagacatctgggaaggcagagaccagtctacagtttgaacatcactcaatgaaagggataattccatgaatcagaaaatgtttccatagccttcagataagatgatccttccagagctctatgtacatgcagatgtgcatgttaaagagataaagtgatcgagacaaggactgactgggtatagaaggaagacagactcctgtcttcactcctaaatgcagttctttggaatcaccctactgtggtgggcgtagtagggagccatcagctaggaagaaacgtgggagatgtgaattccaagagttgcctggacagggcaagtcatgttagcgtgggtcacacttccaagatatttaaagcaaatacaaaacagaacagaggattcaaaccgcaagtatgggagatttaggccctgcagaggcagaccattccttagtatctcacaaagcagagtaatactggaggcagagtagggggtggttagagagcagttagtacaaagaggcagaacagtgtctggtttacttggcatacacagaatctgcactgccggttccagaactccaaagttggtgaactacaggagatgtgggtatttagactccaaagtttatactgagctcagtgcctgggaccgctccagctgcactgcagccaggggggataccagcttcattcctcagagtaaaccaaccttgggagctgtgtgccagttccagtgtaagcagtaataccatgttgtaagagggaacattaaagcccattttatgacataaaaaaaaaaaaaaaaaaaaaaaaaaaaaaaaaaaaaaaaaaaaaaaaaaaaaaaaaaaaaaaaaaaaaaaaaaaaaaaaaaaaaa

SEQ ID NO: 380 - DNA, 672 bp, Homo sapiens
ggcacgaggaggttgaatctacagctgaccatgggaaccttctctctttcgctctttggactaatgggagttgcttttggaatgaatttggaatcttcccttgaagaggaccatagaattttttggctgattacaggaattatgttcatgggaagtggcctcatctggaggcgcctgctttcattccttggacgacagctagaagctccattgcctcctatggtatgaaggatatggttcacggcggtattgtggaagggttatgatcatgggccctaaagtcagagcgcctgggattaagttgtcacaggcactatggcccttgcgagttgctttctcaaacttccttcagtttccctatctgtcagttaagtcggtattacctgcttcatagggttatgggaagaattaaacaatatgtgtaaagcacttactagcacactgcctaacacaataagttagaaatataatttgtgtagaactctgacaacatacatttaaacagatgttagtaattctggtataaggtttgtcataaccaaatggaaatgtaggaaacatttataatgttcttaaaagatagaaaattcacctccattttctttgtacttgaagatggcaccactggaataaatacttaagacactgaaaaagaaaaaaaaaaaaaaaaaa

SEQ ID NO: 381 - DNA, 2433 bp, Homo sapiens
aaactgtaaaaaagaaaggacaaacaggttgttttgttctagttctaatttcttaaaaaccactacatggttacaaaattggaataacatttggggacaactgggttaactacaaagaagaggattttaagaggagatgtgttgtattgactcattttgtattatttttggcttacagttcccatagctgttagagtctggtttgtttttgtttttactctcaaaatcatagtaaagatctctcagtctcctggctaaagattgaaggaaggcaaatctatttctaattatacatatatcagtaaggatgatctcaacataatagtaatgtgtatcttttggtatccagttttatttttggccttctaagaaagtgtctcataacacagaacattgccatttgctcttgtaggcctcaaatatgaaagctattagtcatagagcctaggaaaaaaagaattgattaatggtccttttattttgtaaccttataaatgctgtagatattatcaaaaaaattttaatttcatattgtttacatcatgcaactaatctaagcctcaaactcgttattggggctataaagaaaacgtttacttacccagctgaaacaggttaagawtattcttaatctcattatagataattgcccccatgggacttgaaatacaacaccttgtgctgaaaacttcaggttggcaatatttgaaggtttcgttgtagaagagtttaacattaactcctattttgacttacaaatcttgtttctcatcactaaaatgcttttgaattaataatccaacccacatgagctgagagtttttcttttgttagaaaagaaacagacatctttctgtatgaaagtataaattgtatggttttagatacataagaattgacaaaagcgagcgaaatctttgtacttctgagttcttgctgtatgtatgttttgttttaaatctgattagggacacccagcagctggccgggattcttggattgctccttgggagttaagattgtcaatactcctgtgaagcaagggatttcagccatagaacaaagatttattgttgccacctgaaaagtttacaagtatttattgtgtatttgatacattgcttgaaaagatgaaatctgttaaagattcttttcgatgtccaggttaagaagaaacctccttgtattgagtgaaactatatgttaaatgtattagagaatgtaggtggtatagaaattgatttttcttggtgtagaacaactcagttcggcaaagtttaaaatttgattaaacaagagaagtggttcaggttgaagatggacttgttaggaagtgatcaagtcctttaagtacttgtttctttttcaggttgtgatgtggccattccgaattttgttgagagtttggtttataattgtctcttttgtcttgttagtaaacattcatttgcaacagttttgaaggtgctgagtggaaaaccgaaacacatggttattgcgtattggacctagaatgaaataattgcctcaatatttaacaacaagccattcttatctcaaagatttaaattcccgaatgtcccattcgcaaatcatatgcaattgaagtgagcagcatgagcatctgggtcatgagggccttcatttacgtaaatttgtcactaaaacccagtagtagctctacaaaatcttaaactgctgcagtgctcaaggagatggaatatctttgtcattggtgctgaggagagcatttcggtagaagacagttgcgcctgaagattgagtgtaaatcattcaaaccagtggttctcagtgttggctgtatacactttgtagtcactttggaatgttggaagacacatcgatgcttgggttccgtatgccaagattctgatgttggtctggaatatgagctggtcataaggatttttaaaaactttctggtcatttcaatatgctgccaaggttgagaaccactgttgtaaaattcaccttgagttttctcatctgcaaaatagaaaaaaaaaatccttgctccctcccttcactacctcacaaggatattgagggtaaaggagaaaataatgggaaagtgcttgtgccgtggatgaaaagtgctattaaaagtcaaaggagtgttctgtttcaattcatagtatgatcagggaaagtgtaactgagtatactttgttgacttgggaaacctggagcactttctttggttggttaacgaagcatgcagatgtggaagcagacgttactattatccctactatggtcttctgtcatactgagacaggctgttttaattacctggttttacataggaaagaagaaatattaaggcttaaagtttgtaatgatcaatggctcataattcattaaatcttttcatacaaggaaaaaaaaaaaaaaaaaaaaaaaaaaaaaaaa

SEQ ID NO: 382 - DNA, 2189 bp, Homo sapiens
cgctcgcgccagcccttcccgctcttctgttctcgctctatttgccccgctgactgctggcctcgccagctttgccagtcttacgtctctgcggcccaccccgccccgccccatcttcttgcgcgactcgcgcccgctggtccccccctcctcctcccgcgtcctgcctgccccctcctcctgctctcgcaggctccttggcacccaggccgggaggcgacgcgcccagccgtctaaacgggaacagccctggctgagggagctgcagcgcacagagtatctgacggcgccaggttgcgtaggtgcggcacgaggagttttcccggcagcgaggaggtcctgagcagcatggcccggaggagcgccttccctgccgccgcgctctggctctggagcatcctcctgtgcctgctggcactgcgggcggaggccgggccgccgcaggaggagagcctgtacctatggatcgatgctcaccaggcaagagtactcataggatttgaagaagatatcctgattgtttcagaggggaaaatggcaccttttacacatgatttcagaaaagcgcaacagagaatgccagctattcctgtcaatatccattccatgaattttacctggcaagctgcagggcaggcagaatacttctatgaattcctgtccttgcgctccctggataaaggcatcatggcagatccaaccgtcaatgtccctctgctgggaacagtgcctcacaaggcatcagttgttcaagttggtttcccatgtcttggaaaacaggatggggtggcagcatttgaagtggatgtgattgttatgaattctgaaggcaacaccattctccaaacacctcaaaatgctatcttctttaaaacatgtcaacaagctgagtgcccaggcgggtgccgaaatggaggcttttgtaatgaaagacgcatctgcgagtgtcctgatgggttccacggacctcactgtgagaaagccctttgtaccccacgatgtatgaatggtggactttgtgtgactcctggtttctgcatctgcccacctggattctatggagtgaactgtgacaaagcaaactgctcaaccacctgctttaatggagggacctgtttctaccctggaaaatgtatttgcctccaggactagagggagagcagtgtgaaatcagcaaatgcccacaaccctgtcgaaatggaggtaaatgcattggtaaaagcaaatgtaagtgttccaaaggttaccagggagacctctgttcaaagcctgtctgcgagcctggctgtggtgcacatggaacctgccatgaacccaacaaatgccaatgtcaagaaggttggcatggaagacactgcaataaaaggtacgaagccagcctcatacatgccctgaggccagcaggcgcccagctcaggcagcacacgccttcacttaaaaaggccgaggagcggcgggatccacctgaatccaattacatctggtgaactccgacatctgaaacgttttaagttacaccaagttcatagcctttgttaacctttcatgtgttgaatgttcaaataatgttcattacacttaagaatactggcctgaattttattagcttcattataaatcactgagctgatatttactcttccttttaagttttctaagtacgtctgtagcatgatggtatagattttcttgtttcagtgctttgggacagattttatattatgtcaattgatcaggttaaaattttcagtgtgtagttggcagatattttcaaaattacaatgcatttatggtgtctgggggcaggggaacatcagaaaggttaaattgggcaaaaatgcgtaagtcacaagaatttggatggtgcagttaatgttgaagttacagcatttcagattttattgtcagatatttagatgtttgttacatttttaaaaattgctcttaatttttaaactctcaatacaatatattttgaccttaccattattccagagattcagtattaaaaaaaaaaaattacactgtggtagtggcatttaaacaatataatatattctaaacacaatgaaatagggaatataatgtatgaactttttgcattggcttgaagcaatataatatattgtaaacaaaacacagctcttacctaataaacattttatactgttaaaaaaaaaaaaaaaaaa

SEQ ID NO: 383 - DNA, 1601 bp, Homo sapiens
atgatttcgccaagctcgaaataacctcactaaagggacaaaagctggagctccaccgcgggtggcggccgctctagaactagtggatcccccgggctgcaggaattcggcacgagctcaggcttctgtctcacttttccgggggggggattagggcaaggagggcatgagggactgtctctccctaaaacccagacccctgttccccactcagttcttcttcatcctcctcctcatcttcattgctgaggttgcagctgctgtggtcgccttggtgtacaccacaatggtgagacactgggatggaggaagggaagaagattgggcaaaaccctgggagtgggctgtggcctgtgaatggccaccttctgtaccagcccctaaacactggcctgcctcacccaggctgagcacttcctgacgttgctggtagtgcctgccatcaagaaagattatggttcccaggaagacttcactcaagtgtggaacaccaccatgaaaggggtaaggttggctgggggaggttttagggtggagagaaagaagcaaggccccacctccaccctcatcttgtctccagctcaagtgctgtggcttcaccaactatacggattttgaggactcaccctacttcaaagagaacagtgcctttcccccattctgttgcaatgacaacgtcacccaacacagcccaatgaaaccctgcaccaagcaaaagctcacgacccaaaaagtaaggtgtgggctggcatgagtgggtggggactgttttcatggcctcagagtggcaaacggggatgggagtagggcagctgccaactataaatgctcttttctcttcctgaagggttgcttcaatcagcttttgtatgacatccgaactaatgcagtcaccgtgggtggtgtggcagctggaattgggggcctcgaggtaagcagatgaggaggctgggactgggacatgggcatgagaccagggctgctcaacccatctgaggcctctctggaggaaacagacttctaactgggcctcaggtagggtgtctgtgggacaggcttcaggatccctatcatgttccctcatctctccctgttcctccctctccagctggctgccatgattgtgtccatgtatctgtactgcaatctacaataagtccacttctgcctctgccactactgctgccacatgggaactgtgaagaggcaccctggcaagcagcagtgattgggggaggggacaggatctaacaatgtcacttgggccagaatggacctgccctttctgctccagacttggggctagatagggaccattccttttaggcgatgcctgactttccttccattggtgggtggatgggtggggggcattccagagcctctaaggtagccagttctgttgcccattcccccagtctattaaacccttgatatgccccctaggcctagtggtgatcccagtgctctactgggggatgagagaaaggcattttatagcctgggcataagtgaaatcagcagagcctctgggtggatgtgtagaaggcacttcaaaatgcataaacctgttacaatgttgaaaaaaaaaaaaaaaaaaa

SEQ ID NO: 384 - DNA, 2892 bp, Homo sapiens
  misc_feature (20)..(20): n equals a,t,g, or c
  misc_feature (26)..(26): n equals a,t,g, or c
  misc_feature (54)..(54): n equals a,t,g, or c
  misc_feature (2715)..(2715): n equals a,t,g, or c
  misc_feature (2871)..(2871): n equals a,t,g, or c
  misc_feature (2882)..(2882): n equals a,t,g, or c
tcattaaagggaacaaaagntggagntccaccgcggtggcggccgctctagaantagtggatcccccgggctgcaggaattcggcacgagaagaggtcctccctccaggactgaagtatggtattgtgctggatgccgggtcttcaagaaccacagtctacgtgtatcaatggccagcagaaaaagagaataataccggagtggtcagtcaaaccttcaaatgtagtgtgaaaggctctggaatctccagctatggaaataacccccaagatgtccccagagcctttgaggagtgtatgcaaaaagtcaaggggcaggttccatcccacctccacggatccacccccattcacctgggagccacggctgggatgcgcttgctgaggttgcaaaatgaaacagcagctaatgaagtccttgaaagcatccaaagctacttcaagtcccagccctttgactttaggggtgctcaaatcatttctgggcaagaagaaggggtatatggatggattacagccaactatttaatgggaaatttcctggagaagaacctgtggcacatgtgggtgcacccgcatggagtggaaaccacgggtgccctggacttaggtggtgcctccacccaaatatccttcgtggcaggagagaagatggatctgaacaccagcgacatcatgcaggtgtccctgtatggctacgtatacacgctctacacacacagcttccagtgctatggccggaatgaggctgaraagaatttctggcaatgctcctgcagaattctcctaccaaaaaccatctcaccaatccctgttaccctcgggattatagcatcagcttcaccatgggccatgtatttgatagcctgtgcactgtggaccagaggccagaaagttataaccccaatgatgtcatcacttttgaaggaactggggacccatctctgtgtaaggagaaagtggcttccatatttgacttcaaagcttgccatgatcaagaaacctgttcttttgatggggtttatcagccaaagattaaagggccatttgtggcttttgcaggattctactacacagccagtgctttaaatctttcaggtagcttttccctggacaccttcaactccagcacctggaatttctgctcacagaattggagtcagctcccactgctgctccccaaatttgatgaggtatatgcccgctcttactgcttctcagccaactacatctaccacttgtttgtgaacggttacaaattcacagaggagacttggccccaaatacactttgaaaaagaagtggggaatagcagcatagcctggtctcttggctacatgctcagcctgaccaaccagatcccagctgaaagccctctgatccgtctgcccatagaaccacctgtctttgtgggcaccctcgctttcttcacagcggcagccttgctgtgtctggcatttcttgcatacctgtgttcagcaaccagaagaaagargcactccgagcatgcctttgaccatgcagtggattctgactgagccttcaaagcagctcctggagtccaatggctgcttagagtcagcctgggtggcaccaggcaatgcaggtgaartggstgccttcaggaaatacaactaactaaaatcaaacacctaggtcacgtgcctctcaaatactgatttctgccacagcacctcttgaggcatcccttggctattctgtgcatattgttcttcagagacctcactacccacatgctgatctattggggaacagagaasagacaggccacgaaggtcaggctctttatattaagttccccagaggaagagtaagttgagaaggtatcagtttaatgttgaagaattgacctcagggctcagtttccatttccctccctcagtattcttcctggcaagatacccattaagcatttcgccaatcagaatctcattttatagtttttcccattggtctttaactaagacttccttgtagcaatctcgtaagcagtgaaccccctcagatcagtagaatatagtatctgggggagaagacttacttccttcagggcagcagccacagccaggcttctgtcatacaggtagatcccgaagcacagagacataaaaaaggtctcccagaaaactatagaccattctccaagtggaattcccacttagggctctggtcactagattgcaacctgtgtgtttgtcatcatcctcatctcaccattgtattgctatgccctcccataaaaacacattgatccctagcaagattattgcattccagattttactgcctttgctaggcttttgcttagcaaagggctgactttccattgttatcatggtgtatatatttttgtcaccattcccacaagtatacttgatgttgtcatagaacgaacatcctactctatgatttactaaccaattactttcccagatcatagacctctctgcatagtagtcataggtcttgactttggggaaagaaaaggaagctgcaggaatatttatctccaaagtcgaatgagaaagaactccagcaaatccaatggctacaaactaaaaatcagcattatttcatattgctgtttcttagctgaatatggaataaagaactattattttattttgaaaaaaaaaaaaaaaaaaaaaaaaaaaactcgagggggggcccggtacccaattcgccctatagtgantcgtattacaattcactggccgtcgttttacaacgtcgtgactgggaaaaccctggcgttacccaacttaatcgccttgcagcacatccccctttcgccagctggcgtwatacaaaaaaaagcccgcaccgatcgcccttcccaacagttgcgcancttgaatgggnaatggcaatt

SEQ ID NO: 385 - DNA, 1015 bp, Homo sapiens
ggcggcacgagaaatgagggtttggcatgcagctcgtcatcttaagagttactatcttcttgccctggtgtttcgccgttccagtgccccctgctgcagaccataaaggatgggactttgttgagggctatttccatcaatttttcctgaccgagaaggagtcgccactccttacccaggagacacaaacacagctcctgcaacaattccatcggaatgggacagacctacttgacatgcagatgcatgctctgctacaccagccccactgtggggtgcctgatgggtccgacacctccatctcgccaggaagatgcaagtggaataagcacactctaacttacaggattatcaattacccacatgatatgaagccatccgcagtgaaagacagtatatataatgcagtttccatctggagcaatgtgacccctttgatattccagcaagtgcagaatggagatgcagacatcaaggtttctttctggcagtgggcccatgaagatggttggccctttgatgggccaggtggtatcttaggccatgcctttttaccaaattctggaaatcctggagttgtccattttgacaagaatgaacactggtcagcttcagacactggatataatctgttcctggttgcaactcatgagattgggcattctttgggcctgcagcactctgggaatcagagctccataatgtaccccacttactggtatcacgaccctagaaccttccagctcagtgccgatgatatccaaaggatccagcatttgtatggagaaaaatgttcatctgacataccttaatgttagcacagaggacttattcaacctgtcctttcagggagtttattggaggatcaaagaactgaaagcactagagcagccttggggactgctaggatgaagccctaaagaatgcaacctagtcaggttagctgaaccgacactcaaaacgctactgagtcacaataaagattgttttaaagagtaaaaaaaaaaaaaaaaaa

SEQ ID NO: 386 - DNA, 1970 bp, Homo sapiens
ccacgcgtccgggcggcgcccgcgctcgcaggccactctctgctgtcgcccgtcccgcgcgctcctccgacccgctccgctccgctccgctcggccccgcgccgcccgtcaacatgatccgctgcggcctggcctgcgagcgctgccgctggatcctgcccctgctcctactcagcgccatcgccttcgacatcatcgcgctggccggccgcggctggttgcagtctagcgaccacggccagacgtcctcgctgtggtggaaatgctcccaagagggcggcggcagcgggtcctacgaggagggctgtcagagcctcatggagtacgcgtggggtagagcagcggctgccatgctcttctgtggcttcatcatcctggtgatctgtttcatcctctccttcttcgccctctgtggaccccagatgcttgtcttcctgagagtgattggaggtctccttgccttggctgctgtgttccagatcatctccctggtaatttaccccgtgaagtacacccagaccttcacccttcatgccaaccgtgctgtcacttacatctataactgggcctacggctttgggtgggcagccacgattatcctgatcggctgtgccttcttcttctgctgcctccccaactacgaagatgaccttctgggcaatgccaagcccaggtacttctacacatctgcctaacttgggaatgaatgtgggagaaaatcgctgctgctgagatggactccagaagaagaaactgtttctccaggcgactttgaacccattttttggcagtgttcatattattaaactagtcaaaaatgctaaaataatttgggagaaaatattttttaagtagtgttatagtttcatgtttatcttttattatgttttgtgaagttgtgtcttttcactaattacctatactatgccaatatttccttatatctatccataacatttatactacatttgtaagagaatatgcacgtgaaacttaacactttataaggtaaaaatgaggtttccaagatttaataatctgatcaagttcttgttatttccaaatagaatggactcggtctgttaagggctaaggagaagaggaagataaggttaaaagttgttaatgaccaaacattctaaaagaaatgcaaaaaaaaagtttattttcaagccttcgaactatttaaggaaagcaaaatcatttcctaaatgcatatcatttgtgagaatttctcattaatatcctgaatcattcatttcagctaaggcttcatgttgactcgatatgtcatctaggaaagtactatttcatggtccaaacctgttgccatagttggtaaggcttcctttaagtgtgaaatatrtagatgaaattttctcttttaaagttctttatagggttagggtgtgggaaaatgctatattaataaatctgtagtgttttgtgtttatatgttcagaaccagagtagactggattgaaagatggactgggtctaatttatcatgactgatagatctggttaagttgtgtagtaaagcattaggagggtcattcttgtcacaaaagtgccactaaaacagcctcaggagaataaatgacttgcttttctaaatctcaggtttatctgggctctatcatatagacaggcttctgatagtttgcaactgtaagcagaaacctacatatagttaaaatcctggtctttcttggtaaacagattttaaatgtctgatataaaacatgccacaggagaattcggggatttgagtttctctgaatagcatatatatgatgcatcggataggtcattatgattttttaccatttcgacttacataatgaaaaccaattcattttaaatatcagattattattttgtaagttgtggaaaaagctaattgtagttttcattatgaagttttcccaataaaccaggtattctaaaaaaaaaaaaaaaaaaaaaaa

SEQ ID NO: 387 - DNA, 1499 bp, Homo sapiens
  misc_feature (42)..(42): n equals a,t,g, or c
  misc_feature (330)..(330): n equals a,t,g, or c
  misc_feature (1298)..(1298): n equals a,t,g, or c
  misc_feature (1319)..(1319): n equals a,t,g, or c
  misc_feature (1373)..(1373): n equals a,t,g, or c
  misc_feature (1375)..(1375): n equals a,t,g, or c
  misc_feature (1393)..(1393): n equals a,t,g, or c
gggccccggtccggaattcccgggtcgacccacgcgtccganaatactctgatctttgctgtgctggcttctatagtgtttatggggtggacaactaagacatttagaattgcaaaatgccaatcagattggatggaacgctgggttgacgatgcattttggagcttccttttttcgcttatccttattgtaatcatgtttttgtggagaccatcagcaaacaatcagagatatgccttcatgcccttaatagatgattctgatgatgaaattgaggaattcatggtaacttctgaaaatttaaccgaaggaataaaattaagagccttnaaaatcagtttccaatgggaacagctaagcctggccacttgctgagaactttgakgaagatttgaagtgggtagaagaaaatattccctyttcatcacagatgtagctcttccagtgttagtggattcagatgaggaaatcagaccagatctgaaatggctgaaaaaatgttctcttcagaaaagataatgtgattggaacccgtataagaaatgtagttaagcctgaaggactatccttcatcaagactgaaagtgagctttgatttgatattgcctaaaaatttttattgtgttatcttggaagtctgtgtatcaaaatgaagaattcagatggtaggaggttctatagtccttttaaagctgactcttgagtgtcagttgaatatccattaaattggatttggaaataacctgaggraagtattatgataaagatctgcacagatgcctcttagctgataggtggcaggcctgtgggtttgggttctccctcttttctctggaacatatgacaattccagattaaagaaaaatgttttttaataaatacccttggtctttcttctagtcacctttgaggtagatattgtgattttctggagtatagtatatccgtgtctctgtgtcttaggtttactagatgcaataatacttctctttgacatttgtactgaagtgatttgatattaagtaaaacagttaatgtttgaatataggcatatttataggttttttccgctcccccccaacccaccctttttaaaaaatctatacaaagcccytgtttgartctcatcatgcacatcaaatcatggagttaggtcttctctgagctcaggggaacacaagtgcacagagagagatgtcttgagggtcactaccaaagaattaccctcattgtccctcactcaggccatgtgtacatgcgatgctgctgagtgtgctggggtgggtggtggccacgtngctcccccagagcacttcctnactggcaagctgggagacccattactggtgaactttgtggaaattagaactgtntnttttacataatcttggcntattacatttcataataaaaacatacatttagttgcatgctaaaaaaaaaaaaaaaaaaaaaaaaaaaaaaaaaagggcggccgctctagaggatcccttcgaggg

SEQ ID NO: 388 - DNA, 3490 bp, Homo sapiens
  misc_feature (3336)..(3336): n equals a,t,g, or c
  misc_feature (3430)..(3430): n equals a,t,g, or c
  misc_feature (3483)..(3483): n equals a,t,g, or c
attgggtacgggrccccccctcgagtttttttttttttttttttgccagagttaaactaaataacccatgttatgtgtacaaaatcccctttgttgaaaaataaggggctttctaaactaataaaaaaggaagttttcaaaaattatagtttattaaaacaacttttttggcaaacaaagttacttcaggtgaggaaattttatactgtgaataaaattccaaatgaatcttttcttaaaactttttaaaaaattatgtgccagtgtatactaatgctatagattcttgtcttagaagtttttaaagcattctgttaatgcccactgaaacaatgggactccaaaaatatagtcaataatcatgataaaaaattataatatgattatcaagtgaagcaggtattgagaaataaaaattctcacttgctcactggcaatttctttctaacagatattatggagaaggcctgaagtaattcagacagatagctgtttatggtgaattataataatacttcatgagggcagagctaattaaaactagtaattgcttaaaattcaaagccatttctggacatataaaatgagagatgaatctgaaagtttttcttttgtaaaacctctttccagttcttaaagtccagtttgctacatcccccaatctgatctaccattgcatattaatgatcaacttaaatgtggtatttagatgtgcaatgtcacattgttataataataattataaaaagactttatttaggcctcaactttctccttttttttgttctttttcagaaaagaaggagtgcggaatttcttctttttcttggatggcgattttgaaggggagccttcaggtgacaggacttcttcgattttctctggagacttaatagtaatctcgatgttttctatggttgtacttgtgcttaacctactcactcgcttagcaagctcatcttcaacatcatgcatatcatccttgccatttactaccatgacaggcacttccatggagatgaagctcttggaaaacagctcatggttttcttctaatttttcagggacattttgcggtgactgagtttgagactgaatttgtgaaacagatgaagcgtcatctgagagtaattcctgctcagcatcttctaggccttgttgtttacgttcgattgtcctcttatactcttcaagttctccttctgtgagatgactaaatgggttaggaggagctggtgggccatgatcatcatcttcaaattgcatagtagaaggtggcttatccacaacaattccagcaagcaactgagattgtggtcctgctgttttcaagtcatatcgattttgttcccgaatcttatttctcttttctagtacctcattcgggtttgtgtttaaaggaacaaactgatttggatcttcaattttgataggtgttccaccactaactttagatgagtcttctgctttcatccacgtgattttggttcggggactggtttctccgttccgagactcctcaggcacattcactttcatgtaagtatttggtgagttcagccatcttgttttttcacgctgttgcctctgtgccatgtatttgagaggagagagtggcactgtatcgtcttcaaaggaaaaagcagtcacagttgctgggatttccacatcactcttgtgcctaggcttctctcgaatgagaggatgcctgtaagcatagcctgttctataccccaagttgtccagagtcctcataagcccttcaaactcaatttcgccaaccttccatttttgatgggaacccatattcacacctcctccaccagacgctgctacagtgtaagtgaaagctttatacttctgaaagtccagtacatggagattgtctactccacctgcacctgctagggcctgcacctgaatctcacaggctagttgcacattaaaaatataatgaaaagcctcctctaatgtttctccaagtgcaaccacaccatgattcctgagtaccagcaccttacaacttggtcccagaaccttctgcagttgaattctctcctcctgttcttcaagtgacccttggtagtcataataggcaacatctcccagaagaagagactcttgagaaattggaaggatcccacatttcatggaggatacagctgctgttgcaagggtatggatgtgtatcacacacttaacatcaggacgtgttgaatagattgcagcatggggactgaatcctgtatggtcaattttcaaattggtacttccctggtcaaccacttctcctattatattgactttcaccaaattggaggctgtagcttcagaaaaagataggcctctgggaattattataatgtggtcttgctccttacttattcttactgagatataggtatttgccaggtgtgcccatccaaacaagtctacaagtctgtacaggctggcaagtttacagcgagtaagtttttctcccttcacatatgaggatgtatctgcaccaggaaggtcattgataggtgtgaccatgccaagactgagaggaggtgaagaaaaacccgagaaagaattggccatgatgtaatctgcaatctgctgtaatgctagtaatccagttgggttgtggcctttcttcatctgttcttgaataaggcattccaagtcttcccgaaaggcaggactttgcaggatctgagtaactcgtttcctctgctccatcatgttgaagtcttgtcgtagatcaggagacatgttcctctccctaatgtattctgggtcattttcattgatgcggtcaaaatatctctctttgtgaggcatgctgggaggaggaggagtggtaatcacgccttggctggcatctgagctcatgttttaagtctgtggattactcttgttatcgaagatccaaagcttccttctaacaagggtagtagacgtacgtgtctgtgtcttctgttctctaggtgtggattcctgcaatgctgcacagaaacctactgcagcctcagaccaacagcagcagcarcagcggcggcggcggcagcagcagcagcagcattagcagcagcagcwtctctcaatgctgagtagtaagtgtttgacttagtaaactctacaattaccattaggcgcttgcttatgagaggaggcggaatctttcttaaaggaatgggttttgtttttcctctctagtattgcttcataagaggcagagaggatggaatcagggagttttgtggactgagtaaatgagtacagctgtgggaggtcaaggttaaaattaactgggtggttgaggaatggaggcaatgattttagtgtaagtcnatgaaatgctagaagcaccagttttaaagagccctgctaaatttcaaacattgggggtaatgggcaaaataaagttggtatggccctggaaacnggattagtaatttgtgcccaatattttaatttaaattaaatatttggtggccnatatttc

SEQ ID NO: 389 - DNA, 3951 bp, Homo sapiens
  misc_feature (4)..(4): n equals a,t,g, or c
  misc_feature (26)..(26): n equals a,t,g, or c
  misc_feature (3896)..(3896): n equals a,t,g, or c
  misc_feature (3914)..(3914): n equals a,t,g, or c
  misc_feature (3948)..(3948): n equals a,t,g, or c
tcantaaagggaacaaaagctggagntccaccgcggtggcggccgctctagaactagtggatcccccgggctgcaggaattcggcagwgcttctacgaggacatcgctcagggcaccaagtgcaccctggagttccaggtgattactggtggtcactatgatgtagattgtcgattagaagatcctgatggtaaagtgttatacaaagagatgaagaaacagtatgatagttttaccttcacagcctccaaaaatgggacatacaaattttgcttcagcaatgaattttctactttcacacataaaactgtatattttgattttcaagttggagaagacccacctttgtttcctagtgagaaccgagtcagtgctcttacccagatggaatctgcctgtgtttcaattcacgaagctctgaagtctgtcatcgattatcagactcatttccgtttaagagaagctcaaggccgaagccgagcagaggatctaaatacaagagtggcctattggtcagtaggagaagccctcattcttctggtggttagcatagggcaggtatttcttttgaaaagctttttctcagataaaagaaccaccacaactcgtgttggatcataactacgttttgagaattgatgcaccattgccactgtaatattgctgtcctctaattaattttaggtactgaagaacttaatattggcaacatttttaaatccttactcatacacttgttgggagggatgtacaatgcatattcccaaactgtggaaaggacacctttttttatttgtaaaggtggaaaaactttggaactcattttgggctattcatgttaaatattcaacaccaatgatctactctgttcgcagttgtttatatctactcttcgcacactaaactttggtattttgattccttttaaccatttaagactacttttcttataggtagttgatattttaaaaactttagatttaatgtctacatgtgttagggaggaagaaaattgccttttaattgttaataagaaaaccaaatgtgatgaactgtagcccaagccctattctgcactgttcagttttatggaggaaaaataaatctaccataggaatgttagttaatattgatatatcatggtaaaattgatttctcactagcttagaaaatgtcagacttttgtttttggggtttataatttaaaccagctatgctattttttcataaaggcatttgtagtacacagaaaacagtagtttcagtagtgtaaaagagtttatacaggccttaaatatcagactttgtaacaggtagaaatattacagaataatttaagacactacaatgggggcaaatgaaataggaaaatttttagtgagttacmcgtactcattacattttcagtgcttttacaaggaaaaaaggtgatatgtttaattttaacattttaattggctagctcttgcccttatatgactttaatgtctgtgagtcattcccagcttaaattaacaattgttagtattagtctcacacataagtgccatacattttatcctcatggatgtgatgcactgaaaagttagttgctctccttttttcttttttttgtcgtgcatattttatttctgtagtttctggttagctaccctaaagtgatttaaaaatttagaatgctttgtgtttcctatttggtaatcttcattgacttttctttagttaatgagtattaaatagtgcatattctgtagactatagggtttacattgtgttgcatcttataacttgtatagattgagctgattgaaataagattttgttccaagtattatctgatagaatacaagatgattcaaaattatatagatatttaaagcttttctgctgttttttttttttttaattgcaactgcttttctgccgtgcctctcttccctacccaaaagtgatgagttctgaacaagacaagactgtcatattgtagagactttggtatgtgataccatagaatactgattggatagccatcctagtcacttaccaatactgactagaagttaactcttaattctaagctatcttaaaatgcatatatatacttcttgcatggaagagcaaaacaaattcaagttgtcatgcctgataatttcagatgccaccgtatagcaaagggtgaacatgttttcaaccctttaactttttacggtgtttgaagaccagctactccttaatatttatcaatggattaagaagtttaagattttgcagatttatcaatttgggtttttgtactgaagttgtcttgcggctttgcaagtgtccctttatatttaaatttgaaagttgtaagcactgatgttaatgtgattgatcagcatgggcatatgtaaaatgtccttttctggttgcctctctatgctattgtgttcagatacttacaccataattaaacagtaagttatagacttgctgagtttggcatagatagtgcactcatttaatctgtgcctctcaaaacttcagaatattagcatattaccacaaataatttttggtgaaactattgagatattaaaatttttgaaatcactactgttacctgttatagaaaatagtgttggcttagtctagtctctgtgtaactggttacattttgatggttgtctatactcaactggatatgtgtatgtaaattagaaaatacatacctatccagacataaatgctaagtaacatttttttcttcctccaactacataatttgtagctcatcatttttccttaatcctttcctaacttgttgcagcagtttgaatttcccagatatttatgtttgaacataatggctcagaatacatatttgaacatcatagttgtatatatttttaaagtagaataaataatggaaagcaacttgatatacaagtttatactaaaatttcaactgtgtgaagatacattttaaggcattactttgctaataatctacacattcttttttctattaaataaacaaatggtttgtggttcacagctttcatccaagcttggtgataatcaattttgaaaatacagtggactgaaaagcaaatttattctttcgaagatttcatttaaatctctgtactatgcatttttgtttcagtttgtaaatgtgtaacatttatagttaaataggacaaagcaggccctatgactattgttttcaaaaaattaatatataaataattcagaggggtttttcatttacttttgaaaagaaatttctttaacaggattgcacctatcaatttcttgtagaataaaaaaaaatctttcaacaaactgactttacttgtttctgtcaggatttaaatctttctaaagctccttataaacttaaagcctagagtacagttctgtaatgagagtgattatttatttggtattttattaaaatatctgagggactgtccaagaaagaaggtgaaagagaaataccacgtctgtactgcctaatttgtaaccttctctttgcattccttactgaaagtttgtgtaggtgaaaagcagttaaatcatcagttgctctaaagaggtcttaatttttaagtaaattacctttagtttgtatattacccagttgtatcagtgtttttcttaataatgtagtcagaggggacagtctggttcctgggcataattctccaaaaacaacagggaaataactataaatataggttaacatttattgaatgcctaccttgtgctaggtgctgtgctgagtatttgtattgacacatttaatctttgcaatgattctatgaaataaaggtattatttcattttacagatgaggaaactgaggaatagaggggtaagaaattattaccagattacaagttgattacctnagctgctcaagcttttancttgaatgctacaaaacataggtgatttaagtanttt

SEQ ID NO: 390 - DNA, 1652 bp, Homo sapiens
ggcacgagcagctgccagatccgctgatctagtgcttctcgaaaaaaaccttcaggcggcccatggctgtcgatattcaaccagcatgccttggactttattgtgggaagaccctattatttaaaaatggctcaactgaaatatatggagaatgtggggtatgcccaagaggacagagaacgaatgcacagaaatattgtcagccttgcacagaatctcctgaactttatgattggctctatcttggatttatggcaatgcttcctctggttttacattggttcttcattgaatggtactcggggaaaaagagttccagcgcacttttccaacacatcactgcattatttgaatgcagcatggcagctattatcaccttacttgtgagtgatccagttggtgttctttatattcgttcatgtcgagtattgatgctttctgactggtacacgatgctttacaacccaagtccagattacgttaccacagtacactgtactcatgaagccgtctacccactatataccattgtatttatctattacgcattctgcttggtattaatgatgctgctccgacctcttctggtgaagaagattgcatgtgggttagggaaatctgatcgatttaaaagtatttatgctgcactttacttcttcccaattttaaccgtgcttcaggcagttggtggaggccttttatattacgccttcccatacattatattagtgttatctttggttactctggctgtgtacatgtctgcttctgaaatagagaactgctatgatcttctggtcagaaagaaaagacttattgttctcttcagccactggttacttcatgcctatggaataatctccatttccagagtggataaacttgagcaagatttgccccttttggctttggtacctacaccagcccttttttacttgttcactgcaaaatttaccgaaccttcaaggatactctcagaaggagccaatggacactgagtgtagacatgtgaaatgccaaaaacctgagaagtgctcctaataaaaaagtaaatcaatcttaacagtgtatgagaactattctatcatatatgggaacaagattgtcagtatatcttaatgtttgggtttgtctttgttttgtttatggttagacttacagacttggaaaatgcaaaactctgtaatactctgttacacagggtaatattatctgctacactggaaggccgctaggaagcccttgcttctctcaacagttcagctgttctttagggcaaaatcatgtttctgtgtacctagcaatgtgttcccattttattaagaaaagctttaacacgtgtaatctgcagtccttaacagtggcgtaattgtacgtacctgttgtgtttcagtttgtttttcacctataatgaattgtaaaaacaaacatacttgtggggtctgatagcaaacatagaaatgatgtatattgttttttgttatctatttattttcatcaatacagtattttgatgtattgcaaaaatagataataatttatataacaggttttctgtttatagattggttcaagatttgtttggattattgttcctgtaaagaaaacaataataaaaagcttacctacataaaaaaaaaaaaaaaaaaaaa

SEQ ID NO: 391 - DNA, 509 bp, Homo sapiens
cacgagtgaacacagacagcagccgcctcgccatgaagctgctgatggtcctcatgctggcggccctcctcctgcactgctatgcagattctggctgcaaactcctggaggacatggttgaaaagaccatcaattccgacatatctatacctgaatacaaagagcttcttcaagagttcatagacagtgatgccgctgcagaggctatggggaaattcaagcagtgtttcctcaaccagtcacatagaactctgaaaaactttggactgatgatgcatacagtgtacgacagcatttggtgtaatatgaagagtaattaactttacccaaggcgtttggctcagagggctacagactatggccagaactcatctgttgattgctagaaaccacttttcttcttgtgttgctttttatgtggaaactgctagacaactgttgaaacctcaaattcatttccatttcaataaactaactgcaaatcactaaaaaaaaaaaaaaaaaaaaaa

SEQ ID NO: 392 - DNA, 1000 bp, Homo sapiens
ggcacgagctgccgaggtcggcagcacagagctctggagatgaagaccctgttcctgggtgtcacgctcggcctggccgctgccctgtccttcaccctggaggaggaggatatcacagggacctggtacgtgaaggccatggtggtcgataaggactttccggaggacaggaggcccaggaaggtgtccccagtgaaggtgacagccctgggcggtgggaagttggaagccacgttcaccttcatgagggaggatcggtgcatccagaagaaaatcctgatgcggaagacggaggagcctggcaaatacagcgcctgtgagcccctcccccactcccacccccaccctcccccaccgccaaccccagtgcaccagcctccacaggtagagagtgcccaggctgcccttttgccagggccccagctctgcccacctccaaggaggggctggcctctccttcctggggggctggtggccctgacatcagacaccgggtgtgacaggcttgtccgcagtcgagatggaccagatcacgcctgccctctgggaggccctagccattgacacattgaggaagctgaggattgggacaaggaggccaaggattagatgggggcaggaagctcatgtacctgcaggagctgcccaggagggaccactacatcttttactgcaaagaccagcaccatgggggcctgctccacatgggaaagcttgtgggtaggaattctgataccaaccgggaggccctggaagaatttaagaaattggtgcagcgcaagggactctcggaggaggacattttcacgcccctgcagacgggaagctgcgttcccgaacactaggcagcccccgggtctgcacctccagagcccaccctaccaccagacacagagcccggaccacctggacctaccctccagccatgacccttccctgctcccacccacctgactccaaataaagtccttctcccccaaaaaaaaaaaaaaaaaaaaaa

SEQ ID NO: 393 - DNA, 904 bp, Homo sapiens
gctcgacgtcatgagttcttcccatctgctgctgactccctgcagggtggctcctccttacccccacctcttctcaagctgcagtccaccgggtatggttctggatggttcccccaagggagcaggtatgtaggaggtgaagaaaactgagatttcaagtatgggagagtttttactatctccattcctggattaaaagtgctgaaaaagtccacagttaaacattcctttattcaccctatggctcccaagaaaagcattcttcctctggagtactggtgtactaaggggacaatacaccaaatttgttgagtttacaatcaagtctactaaggttggacttccttatcagtttggcgagtcccagggcagaataatcatccatctacaggtctctgtttcctctccctccacagcagtggagagcatcccagtgtttggggcactgtgttcctcttcgtccctgcaccagaccctggaagccttggccagagacctcaccaaactcgacttgcggcgctgggccagcttcatggatgctggagtggagcacgatgacgtagcagagctgctgcaggagctacaaagcctggcccagtgctaccagggtggtgacagcctcgtggactaaagttcccagtgtgggagaaaggagctagtttgcaataaaaacagctggatgcaggagcccagtgtcttcatgcagaggagctcaatgtcgcgggactagctacaccaacatatgcactttttacatttagaaacactgtgattagaccacagaacaataaatatgtgccatcagaccaaaaaaaagtagagaaaggagctgaactccactctcgatgctatttacagaggacatctgtaaagtcttcataaaagaccttgaatgatgcctagc

SEQ ID NO: 394 - DNA, 531 bp, Homo sapiens
  misc_feature (446)..(446): n equals a,t,g, or c
  misc_feature (466)..(466): n equals a,t,g, or c
  misc_feature (469)..(470): n equals a,t,g, or c
  misc_feature (492)..(492): n equals a,t,g, or c
  misc_feature (503)..(503): n equals a,t,g, or c
gaattcggcacgagaatcactcattgtttgtgaaagctgagctcacagcaaaacaagccaccatgaagctgtcggtgtgtctcctgctggtcacgctggccctctgctgctaccaggccaatgccgagttctgcccagctcttgtttctgagctgttagacttcttcttcattagtgaacctctgttcaagttaagtcttgccaaatttgatgcccctccggaagctgttgcagccaagttaggagtgaagagatgcacggatcagatgtcccttcagaaacgaagcctcattgcggaagtcctggtgaaaatattgaagaaatgtagtgtgtgacatgtaaaaactttcatcctggtttccactgtctttcaatgacaccctgatcttcactgcagaatgtaaaggtttcaacgtcttgctttaataaatcacttgctctccacntcaaaaaaaaaaaaaaaamncsnnggggggcccgtacccatccctngggggggggtnttaaaattaaatggccgggtttaaaaag

SEQ ID NO: 395 - DNA, 1299 bp, Homo sapiens
attcggcacgaggcaaagttcactgtctcagcaaagttgaactgggctacctctctacagctgtttcctcagagggaaaaatcttgagaccagatggtggagctctggagtcagaggaaatgggtgtcttcagcacaaagctgctgcttttacttcagccacttctgacatttttacataccgagcctgagattgtgtgattatctcaaatcaaatcactttgatggagataaataatcaaaactgttttatagtcattgatttggtgagaacagtaatggaaaatggtgttgaaggacttctcatttttggagctttccttccagagtcctggctgattggtgttcgctgttcatctgagcccccaaaagcattattactgatacttgcacacagtcaaaagcgcagactggatggatggtcttttataaggcatttaagggtacactactgtgtttcactgaccatacatttttcttagcccctcaagtaatatagcacagagttatgaatgacaattcccctaaccattcctcttcatatctgcctcttccccttaccatcgtaattctccaaactggtcataaaggcactctgtgaagatattggggactgacatcttaagctctcacctggctgcagtaggaaaggccaaactgacgacaaaaaaaaaattctttataaagatgatatggtaacatgtatctttgccctgggtctgggtgggtccagtcagtctcagatttacaagcatttaggagcctaggtaaaagctgctagtattcttttaaaagttacatttatgacttgcaatgatagaaaactccttccaattaaatggcattttataatattatgtgtgtacttcacagtgttaaaaataccctcatacgttattgcatttgatcttcacagaaagtgcattttaaccagtactctgggtgcaataaataatatgtagaaatttaagtcctccaattccagcatatccagtgagttttgacagtgtgtttatgtggaatgtttaaggatatacaattgtactttatataaattggttcttgttcttcttaaatgtgacatgaaataattgtgctgctacattatactggaaattaacaggggaaaagggaagagctcttggctcccttgaggttctgctagtggtgttaggagtggttacaactgagcttttagtaaccatttaaccgtatgtaaacttggtttctaattaaaaaaaaatttctttttccaaaaaaaaaaaaaaaaaaaaaaaaaaaaaaactcgagggggggccc

SEQ ID NO: 396 - DNA, 1281 bp, Homo sapiens
  misc_feature (540)..(540): n equals a,t,g, or c
  misc_feature (675)..(675): n equals a,t,g, or c
  misc_feature (682)..(682): n equals a,t,g, or c
  misc_feature (1268)..(1268): n equals a,t,g, or c
gcggacgcgtgggttttggcgccggccccagcctgagcggggacggcggccgggagggcgcggcccgggttcccgttccccgcggagccatgcggtacaacgagaaggagctgcaggctctgtcccggcagccggccgagatggcggccgagctgggcatgaggggccccaagaagggcagcgtgctgaagcggcggctggtgaagctggtggtgaatttcctcttctactttcggacagacgaggccgagcccgtcggagccctgctgctggagcgctgcagagtcgtccgggaagagcccggcaccttctccatcagcttcattgaggaccctgagaggaagtatcactttgagtgcagcagcgaggagcagtgtcaggagtggatggaggctctgcgtcgggccagctacgagttcatgcggagaagcctcatcttctacaggaacgaaatccggaaggtgacgggcaaggaccccctggaacagttcggcatatccgaggaggccaggttccagctgagtggcttgcaggcgtgancgcagggcacggtggtcagcgtgcagcgggacgggactggccctgcccagccatgaatcgcttggccatgcctggatctgttttgttttggtttttggtttttgggtcagggtttcactgtgttgcccaggctanartgcantggtgccacagtcactgtgaccttgaccttctggactcaagtgatcctcctgcctcagcttcccaaagtagcggggatcacaggcatgagccgccacacccggccatcacacctggattttcagtgggaggtttttggtttggagacatccaaagcctgaagccaggtgggtgtgggcaggggctgcattttatgaaactgcccagcaagctgcgctccctggggccccaggatccacctaactggcctggcacctggtgccacgtgctgctgccgccaggatatgcgccttcccacaggtgccctgcctgagttgtgtgcatccaggggcctggtgagcccccaggctggtggcatggcccccctgccccgtgctgaatgaatgtacagagccagacaaagctgtgaatggcctaggggctgagtcccacaccagctgtgaattctcctgcagacaggagggccctggctgtgcacctggggaagtggttgccctggggccagggtgcttgttctgttcaaataaaggtacctcttttccacaaaaaaaaaaaaaaaaggcggccgcttaagagatccaagttangtacgcgtgaatg

SEQ ID NO: 397 - DNA, 1901 bp, Homo sapiens
cctagctgtccccctgagatgaagaaagagctccctgttgacagctgcctgccccgctcactcgagcttcaccctcagaagatggatcccaagagacagcacattcagctcctgagcagcctgactgagtgcctgacggtggaccccctcagtgccagcgtctggaggcagctgtaccctaagcacctgtcacagtccagccttctgctggagcacttgctcagctcctgggagcagattcccaagaaggtacagaagtctttgcaagaaaccattcagtccctcaagcttaccaaccaggagctgctgaggaagggtagcagtaacaaccaggatgtcgtctcctgtgacatggcctgcaagggcctgttgcagcaggttcagggtcctcggctgccctggacgcggctcctcctgttgctgctggtcttcgctgtaggcttcctgtgccatgacctccggtcacacagctccttccaggcctcccttactggccggttgcttcgatcatccggcttcttacctgctagccaacaagcgtgtgccaagctctactcctacagtctgcaaggctacagctggctgggggagacactgccgctctggggctcccacctgctcaccgtggtgcggcccagcttgcagctggcctgggctcacaccaatgccacagtcagcttcctttctgcccactgtgcctctcaccttgcgtggtttggtgacagtctcaccagtctctctcagaggctacagatccagctccccgattccgtgaatcagctactccgctatctgagagagctgcccctgcttttccaccagaatgtgctgctggccactgtggcacctcttgcttgaggccctggcctgggcccaggagcactgccatgaggcatgcagaggtgaggtgacctgggactgcatgaagacacagctcagtgaggctgtccactggacctggctttgcctacaggacattacagtggctttcttggactgggcacttgccctgatatcccagcagtaggccctgccttcctggccactgatttctgcatgggtagaccatccaagactgcagcgggtagaaggtggcagttcttcatgggagtctttttaacttggtgcctgagttctctcctaggcaagtggccagttgcctccacctcagttcttccatctttggtggggacagggcccagcagcatctcagcctcctacccacaattccactgaacacttttctggccctactgcacatggcccccagcctccatccttgtgctggtagcctctcacaactccgcccttgccctctgccttccacttccttccatctcatttctaaaccccaaacagctcatctctaaaaagatagaactcccagcaggtggcttctgtgttcttctgacaaatgattcctgcttctccagactttagcagcctcctgttcccattcttggtcacagctctagccacagcagaaggaaaggggcttccagaagaatatagcaccgcattgggaaacagcagcctcacctccacctgaagcctgggtgtggctgtcagtggacatggggagctggatggaaatgcctctcacttcaaaatgcccagcctgccccaaatgcctctaagcccctccctgtcccctcccttgtagtcctacttcttccaactttccattccccatcatgctgggggtcttggtcacaaggctcagcttctctccactgtccatccctcctatcatctgtagagcagagcacaggcagttgtgtgccttgggcccagggaaccctccatcaacctgagacaggactcagtatatggttcttgggtatgccctaccaggtggaataaaggacacagatttgatttctaaaaaaaaaaaaaaaaaa

SEQ ID NO: 398 - DNA, 1929 bp, Homo sapiens
ggcacgagtatggcttcccgtggactcagcctcttccccgagtcctgtccagatttctgctgtggtacctgtgatgaccaatactgctgctctgacgtgctgaagaaatttgtgtggagcgaggaaaggtgtgctgtgcctgaggccagcgtgcctgccagtgtagagccggtggagcagctgggctcggcgctgaggtttcgccctggctacaacgaccccatgtcagggttcggagcgaccttggccgttggcctgaccatctttgtgctgtctgtcgtcactatcatcatctgcttcacctgctcctgctgctgcctttacaagacgtgccgccgaccacgtccggttgtcaccaccaccacatccaccactgtggtgcatgccccttatcctcagcctccaagtgtgccgcccagctaccctggaccaagctaccagggctaccacaccatgccgcctcagccagggatgccagcagcaccctacccaatgcagtacccaccaccttacccagcccagcccatgggcccaccggcctaccacgagaccctggctggaggagcagccgcgccctaccccgccagccagcctccttacaacccggcctacatggatgccccgaaggcggccctctgagcattccctggcctctctggctgccacttggttatgttgtgtgtgtgcgtgagtggtgtgcaggcgcggttccttacgccccatgtgtgctgtgtgtgtccaggcacggttccttacgccccatgtgtgctgtgtgtgtcctgcctgtatatgtggcttcctctgatgctgacaaggtggggaacaatccttgccagagtgggctgggaccagactttgttctcttcctcacctgaaattatgcttcctaaaatctcaagccaaactcaaagaatggggtggtggggggcaccctatgaggtggcccctgagaggtgggggcctctccagggcacatctggagttcttctccagcttaccctagggtgaccaagtagggcctgtcacaccagggtggcgcagctttctgtgtgatgcagatgtgtcctggtttcggcagcgtagccagctgctgcttgaggccatggctcgtccccggagttgggggtacccgttgcagagccagggacatgatgcaggcgaagcttgggatctggccaagttggactttgatcctttgggcagatgtcccattgctccctggagcctgtcatgcctgttggggatcaggcagcctcctgatgccagaacacctcaggcagagccctactcagctgtacctgtctgcctggactgtcccctgtccccgcatctcccctgggaccagctggagggccacatgcacacacagcctagctgcccccagggagctctgctgcccttgctggccctgcccttcccacaggtgagcagggctcctgtccaccagcacactcagttctcttccctgcagtgttttcattttattttagccaaacattttgcctgttttctgtttcaaacatgatagttgatatgagactgaaacccctgggttgtggagggaaattggctcagagatggacaacctggcaactgtgagtccctgcttcccgacaccagcctcatggaatatgcaacaactcctgtaccccagtccacggtgttctggcagcagggacacctgggccaatgggccatctggaccaaaggtggggtgtggggccctggatggcagctctggcccagacatgaatacctcgtgttcctcctccctctattactgtttcaccagagctgtcttagctcaaatctgttgtgtttctgagtctagggtctgtacacttgtttataataaatgcaatcgtttggaaaaaaaaaaaaaaaaaaaaaaaaaaaaaaaaaaaaaaaaaaaaaaaaaaaaaaaaaaaa

SEQ ID NO: 399 - DNA, 442 bp, Homo sapiens
ggcacgagatcactcattgtgaaagctgagctcacagccgaataagccaccatgaggctgtcagtgtgtctcctgatggtctcgctggccctttgctgctaccaggcccatgctcttgtctgcccagctgttgcttctgagatcacagtcttcttattcttaagtgacgctgcggtaaacctccaagttgccaaacttaatccacctccagaagctcttgcagccaagttggaagtgaagcactgcaccgatcagatatcttttaagaaacgactctcattgaaaaagtcctggtggaaatagtgaaaaaatgtggtgtgtgacatgtaaaaatgctcaacctggtttccaaagtctttcaacgacaccctgatcttcactaaaaattgtaaaggtttcaacacgttgctttaataaatcacttgccctgcaaaaaaaaaaa

SEQ ID NO: 400 - DNA, 2454 bp, Homo sapiens
ggcacgagccaggacatgcagaaccttcctctagaacccgacccaccaccatgaggtcctgcctgtggagatgcaggcacctgagccaaggcgtccagtggtccttgcttctggctgtcctggtcttctttctcttcgccttgccctcttttattaaggagcctcaaacaaagccttccaggcatcaacgcacagagaacattaaagaaaggtctctacagtccctggcaaagcctaagtcccaggcacccacaagggcgaggaggacaaccatctatgcagagccagcgccagagaacaatgccctcaacacacaaacccagcccaaggcccacaccaccggagacagaggaaaggaggccaaccaggcaccgccggaggagcaggacaaggtgccccacacagcacagagggcagcatggaagagcccagaaaaagagaaaaccatggtgaacacactgtcacccagagggcaagatgcagggatggcctctggcaggacagaggcacaatcatggaagagccaggacacaaagacgacccaaggaaatgggggccagaccaggaagctgacggcctccaggacggtgtcagagaagcaccagggcaaagcggcaaccacagccaagacgctcattcccaaaagtcagcacagaatgctggctcccacaggagcagtgtcaacaaggacgagacagaaaggagtgaccacagcagtcatcccacctaaggagaagaaacctcaggccaccccaccccctgcccctttccagagccccacgacgcagagaaaccaaagactgaaggccgccaacttcaaatctgagcctcggtgggattttgaggaaaaatacagcttcgaaataggaggccttcagacgacttgccctgactctgtgaagatcaaagcctccaagtcgctgtggctccagaaactctttctgcccaacctcactctcttcctggactccagacacttcaaccagagtgagtgggaccgcctggaacactttgcaccaccctttggcttcatggagctcaactactccttggtgcagaaggtcgtgacacgcttccctccagtgccccagcagcagctgctcctggccagcctccccgctgggagcctccggtgcatcacctgtgccgtggtgggcaacgggggcatcctgaacaactcccacatgggccaggagatagacagtcacgactacgtgttccgattgagcggagctctcattaaaggctacgaacaggatgtggggactcggacatccttctacggctttaccgccttctccctgacccagtcactccttatattgggcaatcggggtttcaagaacgtgcctcttgggaaggacgtccgctacttgcacttcctggaaggcacccgggactatgagtggctggaagcactgcttatgaatcagacggtgatgtcaaaaaaccttttctggttcaggcacagaccccaggaagcttttcgggaagccctgcacatggacaggtacctgttgctgcacccagactttctccgatacatgaagaacaggtttctgaggtctaagaccctggatggtgcccactggaggatataccgccccaccactggggccctcctgctgctcactgcccttcagctctgtgaccaggtgagtgcttatggcttcatcactgagggccatgagcgcttttctgatcactactatgatacatcatggaagcggctgatcttttacataaaccatgacttcaagctggagagagaagtctggaagcggctacacgatgaagggataatccggctgtaccagcgtcctggtcccggaactgccaaagccaagaactgaccggggccagggctgccatggtctccttgcctgctccaaggcacaggatacagtgggaatcttgagactctttggccatttcccatggctcagactaagctccaagcccttcaggagttccaagggaacacttgaaccatggacaagactctctcaagatggcaaatggctaattgaggttctgaagttcttcagtacattgctgtaggtcctgaggccagggatttttaattaaatggggtgatgggtggccaataccacaattcctgctgaaaaacactcttccagtccaaaagcttcttgatacagaaaaaagagcctggatttacagaaacatatagatctggtttgaattccagatcgagtttacagttgtgaaatcttgaaggtattacttaacttcactacagattgtctagaagacctttctaggagttatctgattctagaagggtctatacttgtccttgtctttaagctatttgacaactctacgtgttgtagaaaactgataataatacaaatgattgttgtccatggaaaggcaaataaattttctacagtgaaaaaaaaaaaaaaaaaaaaaaaaaaaaaaaaaaaa

SEQ ID NO: 401 - DNA, 415 bp, Homo sapiens
ggcacgaggacatttcatataatggagtcatgtaatatgtagtctcttgcctgtatcttctttcacttacataatgcttgtgaggtttacccatgttgcacatgtatcagtatttcactcctttttattgctgagtaatattccattgtgttcattcaccagttggtggacatttggatcattttccctttggaattattaggaataatattgctatgaacattaatgttaaagtctgttttattgtttttgtttttgtttttttgttttttattgttgttgtttttgagatggggtcttgctcctgtcacccaagctggagtgscagtggcatgatcttggctcactgcaacctccagctcccaggttcaagcaattctcctgcctcagcctcccgagtagctgggattatagg

SEQ ID NO: 402 - DNA, 1346 bp, Homo sapiens
ggcacgaggcgttttccggccgtgcgtttgtggccgtccggcctccctgacatgcagccctctggaccccgaggttggaccctactgtgacacacctaccatgcggacactcttcaacctcctctggcttgccctggcctgcagccctgttcacactaccctgtcaaagtcagatgccaaaaaagccgcctcaaagacgctgctggagaagagtcagttttcagataagccggtgcaagaccggggtttggtggtgacggacctcaaagctgagagtgtggttcttgagcatcgcagctactgctcggcaaaggcccgggacagacactttgctggggatgtactgggctatgtcactccatggaacagccatggctacgatgtcaccaaggtctttgggagcaagttcacacagatctcacccgtctggctgcagctgaagagacgtggccgtgagatgtttgaggtcacgggcctccacgacgtggaccaagggtggatgcgagctgtcaggaagcatgccaagggcctgcacatagtgcctcggctcctgtttgaggactggacttacgatgatttccggaacgtcttagacagtgaggatgagatagaggagctgagcaagaccgtggtccaggtggcaaagaaccagcatttcgatggcttcgtggtggaggtctggaaccagctgctaagccagaagcgcgtgggcctcatccacatgctcacccacttggccgaggctctgcaccaggcccggctgctggccctcctggtcatcccgcctgccatcacccccgggaccgaccagctgggcatgttcacgcacaaggagtttgagcagctggcccccgtgctggatggtttcagcctcatgacctacgactactctacagcgcatcagcctggccctaatgcacccctgtcctgggttcgagcctgcgtccaggtcctggacccgaagtccaagtggcgaagcaaaatcctcctggggctcaacttctatggtatggactacgcgacctccaaggatgcccgtgagcctgttgtcggggccaggagccgcagtgggaggcacgtcgtcttctacccaaccctgaagtccctgcaggtgcggctggagctggcccgggagctgggcgttggggtctctatctgggagctgggccagggcctggactacttctacgacctgctctaggtgggcattgcggcctccgcggtggacgtgttcttttctaagccatggagtgagtgagcaggtgtgaaatacaggcctccactccgtttgctgtgaaaaaaaaaaaaaaaaaaaaaaaaaaaaaaaaaaaaaaaaaaaaaaaaaa

SEQ ID NO: 403 - DNA, 1599 bp, Homo sapiens
ggcacgagccaccatgctcaacatccttgctttggtgtatcgtgaccagaataagtataaggaagctgcccacctgctgaatgatgcccttagcatccgggagagcaccttgggacctgaccatcctgctgtggctgccacactcaacaatttggctgtgctctatggcaaaaggggcaagtacaaggaggcagagcctctgtgccagcgggcactggagattcgagaaaaggtcctgggcacgaatcatccagatgtggcaaaacagctgaacaacctggccctcttgtgccaaaaccagggcaagtatgaggccgtggaacgctactaccagcgagcactggccatctacgaggggcagctggggccggacaaccctaatgtagcccggaccaagaacaacctggcttcctgttacctgaaacagggcaaatatgctgaggctgagacactatacaaagagatcctgacccgtgcccatgtacaggagtttgggtctgtggatgatgaccacaagcccatctggatgcatgcagaggagcgggaggaaatgagcaaaagccggcaccatgagggtgggacaccctatgctgagtatggaggctggtacaaggcctgcaaagtgagcagccccacagtgaacactactctgagaaacctgggagctctgtataggcgccagggaaagctggaggctgctgagaccctggaggaatgtgccctgcggtcccggagacagggcactgaccctatcagccagacgaaggtggcagagctgcttggggagagtgatggtagaaggacctcccaggagggccctggagacagtgtgaaattcgagggaggtgaagatgcttctgtggctgtggagtggtccggggatggcagtgggaccctgcagaggagtggctctcttggcaagatccgggatgtgctccgcagaagcagtgaactcttggtgaggaagctccaggggactgagcctcggccctccagcagcaacatgaagcgagcagcctccttgaactatctgaaccaacctagtgcagcacccctccaggtctcccggggcctcagtgccagcaccatggacctctcttcaagcagctgacattcaacccggcccccaggtctgctgggtccccccacccccacagccctcacagcattccccattgctcctggctcttccccacccctaggtgggacagtgaaggggagcagtttaaccagaagattgctgctgcccttagggtctcagctccctcctcaggaatccctcttaggaaggaccctcaggacaccctctctgcaccctgtggtcctctagagtagctagctctgaggccccaaggtgggtacaaagcaggtatggccctcagagatgcagcctgctgctggcttttcagtcagagggttgggggctggccagccaagctgccttgccctggccgctcttactccctccctctgctgtctcacttcaggtccatgtatttcacttttcttaaataaaagaatcaggtaaaaaaaaaaaaaaaaaaaaaaaaaaaaaaaaaaaaaaaaaaaaaaaaaaaaaaaaaaaaaaaaaaaaaaaaa

SEQ ID NO: 404 - DNA, 370 bp, Homo sapiens
  misc_feature (307)..(307): n equals a,t,g, or c
  misc_feature (365)..(365): n equals a,t,g, or c
gagagagagactaagagtcatttcgagtatatttcttagagtaatggtaatgacccctgaaagtctgtcctatgggaacatgttctgcatccccaccccaaggttctcattgagggagaccctgcttgtgctattatttttgttttctttctccatagtggacagagttcacagaccgcactttggcackttgtcctcactgcaggaaaktktcatctattgggcgcagattacccacgtaagagaatgtatctgctggcttcttgcttggcttgccttttgggcagtcactgccacttggccttgnctttggaacatgggaagcatgcacggggatatgggaggcatctatggcagcctggggnattgt

SEQ ID NO: 405 - DNA, 1993 bp, Homo sapiens
gaattcggcacgagctgggctggaggggctgtgaggagggagggtggaggcaggaggggccgggaatgagcgccatgttctcccaggactttttcctggccattatcctgcaggacagcagcgcagattccttctggaaccccaacgccttcgagacggattccgacctgccggctggatggatgagggtccaggacacctcagggacctattactggcacatcccaacagggaccacccagtgggaaccccccggccgggcctccccctcacaggggagcagcccccaagaggagtcccagctcacctggacaggttttgctcatggagaaggctttgaggatggagaattttggaaggatgaacccagtgatgaggccccaatggagctgggactgaaggaacctgaggaggggacgttgaccttcccagctcagagcctcagcccagagccgttgccccaagaggaggagaagcttcccccacggaataccaacccagggatcaagtgtttcgccgtgcgctccctaggctgggtagagatgaccgaggaggagctggcccctggacgcagcagtgtggcagtcaacaattgcatccgtcagctctcttaccacaaaaacaacctgcatgaccccatgtctgggggctggggggaaggaaaggatctgctactgcagctggaggatgagacactaaagctagtggagccacagagccaggcactgctgcacgcccaacccatcatcagcatccgcgtgtggggcgtcgggcgggacagtggaagagagagggactttgcctacgtagctcgtgataagctgacccagatgctcaagtgccacgtgtttcgctgtgaggcacctgccaagaacatcgccaccagcctgcatgagatctgctctaagatcatggccgaacggcgtaatgcccgctgcttggtaaatggactctccctggaccactctaaacttgtggatgtccctttccaagtggaattcccagcgcctaagaatgagttggtccagaagttccaagtctattacctggggaatgtacctgttgctaaacctgttggggtagatgtgattaatggggccctcgagtcagtcctgtcctccagcagccgtgaacaatggaccccaagtcatgtcagtgtggcccctgctaccctcaccatcttgcaccagcagacagaggcagtgctgggagagtgtcgggtgcgtttcctctccttcctggccgtgggcagagatgtccacacgtttgcattcatcatggctgccggcccagcctccttctgctgccacatgttctggtgcgagcccaatgctgccagcctctcagaggctgtgcaggctgcgtgcatgcttcgctaccagaagtgtctggatgcccgttcccaggcctccacctcctgcctcccagcaccccctgctgagtctgtggcacggcgtgtagggtggactgtccgcaggggtgttcagtcgctgtggggctccctgaagcccaaacggctgggggcccataccccatgaagaagcccccaccttccctccacctgcttgtgttgggccccagggaactaaagggtgtgggtcagggaggggtctagaggctattcctaggcctcaggcctcccaaatatgcccctccccagtagctacggttccctgcctaggagctggggagggagagatctaatcccttcaaggaagtgataacactggagtggtaacaagaggagcaggaagcaaggccagccctggttctccatccccatgtgtttcaggtggaacaggaggaactggtccaggccaggcctcatcctcctggacccagcaggggcagaaggaggaagggactggtccaggcatgggtcccttccccctgctccatgggcacctctgctgtattgatatcactaataaagtctgtctgcactgcaaaaaaaaaaaaaaaaaaaaaaaaaaaaaaaaaaaaaaaaaaaaaa

SEQ ID NO: 406 - DNA, 665 bp, Homo sapiens
gaaacagctatgaccatgattacgccaagctcgaaattaaccctcactaaagggaacaaaagctggagctccaccgcggtggcggccgctctagaactagtggatcccccgggctgcaggaattcggcacgaggtgatctgcccgccttggcctcccaaagtgctgggattacaggtgtgagccgctgcgctcggccttctttgattttatattattaggagcaaaagtaaatgaagcccaggaaaacacctttgggaacaaactcttcctttgatggaaaatgcagaggcccttcctctctgtgccgtgcttgctcctcttacctgcccgggtggtttgggggtgttggtgtttcctccctggagaagatgggggaggctgtcccactcccagctctggcagaatcaagctgttgcagcagtgccttcttcatccttccttacgatcaatcacagtctccagaagatcagctcaattgctgtgcaggttaaaactacagaaccacatcccaaaggtacctggtaagaatgtttgaaagatcttccatttctaggaaccccagtcctgcttctccgcaatggcacatgcttccactccatccatactggcatcctcaaataaacagatatgtatacatawaaaaaaaaaaaaaaaaaactcgtag

SEQ ID NO: 407 - DNA, 2050 bp, Homo sapiens
gcgatctcggcttactgcaacctccgcctcccgggttcgagcagttctcctgcctcagcctcccgagtagctgggattgcgggcgcacaccaccacatccggctaattttgtatttttagtagagacgggctttttccgtgttggtcaggctggtcttgaattcccaacctcaggtgatccacccgcctcagcctcccaaggtgctgggattacaggcatgagccaccgcacccggcaagttttaaatgaataaattaaatttaaaagaagtctagttttttgccaatttttgtttttgacactctcgctcttgttgcccaggctggagtgcaatggcacaatctcagctcactgcaatctccgcctcccgggttcaagtaattctgccttagcctactgagtagctgggattgcaggcgcccaccaccatgcccagctaacttttgtatttttagtagagacagggtttcaccgtgtcggccaggatggtcttgaactcctgacttcagatgatctgcccaccttggtctccccaagtgctgggattaaaggtgtgagccactgtgcccagcccagtatttttttgtttgtttttaccgagatggagtcccgccccattgcccaggctagagtgcagtggcgtgatctcagtacactgcaacctccacttcccaggttcaagcgattctcctgcctcagcctcctgagcagttgggattacaggtagatgatgagctggagatcaaggcctactatgcaggccacgtgctgggggcagccatgttccagattaaagtgggctcagagtctgtggtctacacgggtgattataacatgaccccagaccgacacttaggagctgcctggattgacaagtgccgccccaacctgctcatcacagagtccacgtacgccacgaccatccgtgactccaagcgctgccgggagcgagacttcctgaagaaagtccacgagaccgtggagcgtggtgggaaggtgctgatacctgtgttcgcgctgggccgcgcccaggagctctgcatcctcctggagaccttctgggagcgcatgaacctgaaggtgcccatctacttctccacggggctgaccgagaaggccaaccactactacaagctgttcatcccctggaccaaccagaagatccgcaagacttttgtgcagaggaacatgtttgagttcaagcacatcaaggccttcgaccgggcttttgctgacaacccaggaccgatggttgtgtttgccacgccaggaatgctgcacgctgggcagtccctgcagatcttccggaaatgggccggaaacgaaaagaacatggtcatcatgcccggctactgcgtgcagggcaccgtcggccacaagatcctcagcgggcagcggaagctcgagatggaggggcggcaggtgctggaggtcaagatgcaggtggagtacatgtcattcagcgcacacgcggacgccaagggcatcatgcagctggtgtcctcagagcaagccctcaaagagctgggtctggctgagcaccagtgcgcttcacctgccgcgtgcacctgcatgacacacgcaaggagcaggagacggcattgcgcgtctacagccacctcaagagcgtcctgaaggaccactgtgtgcagcacctcccggacggctctgtgactgtggagtccgtcctcctccaggccgccgccccttctgaggacccaggcaccaaggtgctgctggtctcctggacctaccaggacgaggagctggggagcttcctcacatctctgctgaagaagggcctcccccaggcccccagctggacagaccctgggcctgcacttcaggactgtgggtgccctgggtgaacagaccctgcaggtcccatccctggggacagaggccttgtgtcacctgcctgcccaggcagctgtttgcagctgaagaaacaaactggtctccaggctgtcttgcctttattcctggttagggcaggtggtcctagacagcagtttccagtaaaagctgaacaaaaaaaaaaaaaaaaaa

SEQ ID NO: 408 - DNA, 645 bp, Homo sapiens
  misc_feature (3)..(3): n equals a,t,g, or c
  misc_feature (8)..(8): n equals a,t,g, or c
  misc_feature (18)..(18): n equals a,t,g, or c
  misc_feature (60)..(60): n equals a,t,g, or c
  misc_feature (66)..(66): n equals a,t,g, or c
  misc_feature (612)..(612): n equals a,t,g, or c
  misc_feature (643)..(643): n equals a,t,g, or c
ccnagccngatttacccntcactaaggggacaaaagctggagctcccaccgcggtggcgnccgctntagaactagtggatcccccgggctgcaggattcggcacgagcagaagtggccagttaatggggcttcattcccctgcactttggaaatgaccagcagtcccaaatgcatttgagagtattttcactcatgagagaaaacgtgcttctcagattctgaaggctttctgagtgaaaaccagacaaaacagacagtaagagtgctaataagtatgagacatctttctttttgttttccccccaccccaatctctcacctctggcttaaattcttaattttatgaaatgatacttggctgggtgcggtggctcatgcctgtaatgccagcaccttgggaggctgaggcaggagaatcacttgaacccaagtggtggaggttacagtgagctgagattgtaccactgcactccagcctgggcgacagagtgagactctgtctcaaaaaaaaaaaaaaaaaactcgragggggggccsgtacccaattcggcctawartgagtcgkrttacaattcactggccgkcgtttacaacgtcgtgacttgggaaancctggggtacccacttaatcgcttggagaanat

SEQ ID NO: 409 - DNA, 778 bp, Homo sapiens
ccaccacgccaccccgccgcagcccagcccgaggtgaagaccctggcggtcgaccaggtgaacggaggcaaggtggtgaggaagcactcagggacggacagaactgtgtgaagcccgccgtgccccaccccgcgctgtccatgcactgtgagcaccactgggaaatctcagccacaccttttctgtttaatcccatgcatgccaaacacttttcacacctaccgacccattctccttctgcttctcttgccctcttcttcacaccaaaatatgatcgtgtccctgccgcagaatatgtatttcctaattgctgtggccaaacgcctgtgtgccgaatcgcttgcttctgatcccgctccgtgtaacctaagtgcgctgcaggcaaagcccaggccacggctgcgtcactactgatgttcacgatgccacacagtcacacacctaattcattctcaagtcggagcaacacataccaaccttgaccttatcctcaagctccagggcagcctggccgagcagcccctgctccctcctggagacccttgtcacctcccgagctcctcctggagacccctgtcacctcctgaccaacctttcccagggcggcaccgatcaccgagcagccgtgcgtgtatctcaaggaactaaataagatgacgctactcctcatagcaccacaacctgaatgtgtgttcatatttttttgttagttttatccaaaatgtttaagatcccaacaaactttattttctaaacctgcaaaaaaaaaaaaaaaaaa

SEQ ID NO: 410 - DNA, 1584 bp, Homo sapiens
gtccattcttccggtggagatggctgcggccgtggcggggatgctgcgagggggtctcctgccccaggcgggccggctgcctaccctccagactgtccgctatggctccaaggctgttacccgccaccgtcgtgtgatgcactttcagcggcagaagctgatggctgtgactgaatatatccccccgaaaccagccatccacccatcatgcctgccatctcctcccagccccccacaggaggagataggcctcatcaggcttctccgccgggagatagcagcagttttccaggacaaccgaatgatagccgtctgccagaatgtggctctgagtgcagaggacaagcttcttatgcgacaccagctgcggaaacacaagatcctgatgaaggtcttccccaaccaggtcctgaagcccttcctggaggattccaagtaccaaaatctgctgcccctttttgtggggcacaacatgctgctggtcagtgaagagcccaaggtcaaggagatggtacggatcttaaggactgtgccattcctgccgctgctaggtggctgcattgatgacaccatcctcagcaggcagggctttatcaactactccaagctccccagcctgcccctggtgcagggggagcttgtaggaggcctcacctgcctcacagcccagacccactccctgctccagcaccagcccctccagctgaccaccctgttggaccagtacatcagagagcaacgcgagaaggattctgtcatgtcggccaatgggaagccagatcctgacactgttccggactcgtagccagcctgtttagccagccctgcgcataaatacactctgcgttattggctgtgctctcctcaatgggacatgtggaagaacttggggtcggggagtgtgtttgtcacttggttttcactagtaatgatattgtcaggtatagggccacttggagatgcagaggattccatttcagatgtcagtcaccggcttcgtccttagttttcccaacttgggacgtgataggagcaaagtctctccattctccaggtccaaggcagagatcctgaaaagatagggctattgtcccctgcctccttggtcactgcctcttgctgcacgggctcctgagcccacccccttggggcacaacctgccactgccacagtagctcaaccaagcagttgtgctgagaatggcacctggtgagagcctgctgtgtgccaggctttgtgctgagtgctgtacatgtattagttcctttactgctgaccacattgtacccatttcacagagaaggagcagagaaattaagtggcttgctcaaggtcatgcagttagtaagtggcagaacagggacttgaaccaagccctctgctctgaagaccgcgtcctgaatttcttcactagagcttcctcatcaggttacccagaagtgggtcccatccaccatccaggtgtgcttggatgtttctccaccctcgaggtgtacgctgtgaaaagtttgggagcactgctttataataaaatgaaatatattctamaaaaaaaaaaaaaaaaaaaaaaaaaaaaaaaaaaaa

SEQ ID NO: 411 - DNA, 825 bp, Homo sapiens
tgacgttagggaacataacacttctttgccctgctagctctcagctctggggggcatcccccgatgtggtctgggctgggagcaggcatatcccctggttgttgcctgtgcctggtctgttcaccatcgtgtttgtgtgggcagagcctgccctgcaggagcagtgactttcttcccactgtgtgtcccggacctgtggtatgtgtccctttgccatcccaaacaggcaactgcttgctgctctccttgcttggcatagcctcctggtcagtggccaatgccccacaggccttcctgggcctggccctcctctcctgactcccagatccttccctgccctcttgtgtgcaaggacagattttgcagggaaagttctgtttcttctttgatacctttgttctgtcccctgccccatccccagcactcatgatcttgaagcccctatcacactctagttcagtcctgtgaaccatgtcctgagggcttgcagggaagtaggaaatagaaactcctccacaaagagccgaggatcagagaagacccctgagatgaatcagggccctgccctgcccaccaactcttttctagcaatcatgtcctgcccaggctgcaggcttcattaggctcctgctgtcctccatgatgtgactagctcaaggtgtatatatgttttgtacctctgccgatggctgtacatagtgtatgaaagttatttaagccccatgttgtacatttctgttcctagattggatgtgtgtgttctaagaagttgtcataaataaaacctgaatgaccaaaaaaaaaaaaaaaaaaaaaaaaaaaaaa

SEQ ID NO: 412 - DNA, 662 bp, Homo sapiens
ttttttttttttttttttttttttttttaaactttttatttgcatattaaaaaaattgtgcattccaataattaaaatcatttgaacaaaaaaaaaaatggcactctgattaaactgcattacagcctgcaggacaccttgggccagcttggttttactctagatttcactgtcgtcccaccccacttcttccaccccacttcttccttcaccaacatgcaagttctttccttccctgccagccagatagatagacagatgggaaaggcaggcgcggccttcgttgtcagtagttctttgatgtgaaaggggcagcacagtcatttaaacttgatccaacctctttgcatcttacaaagttaaacagctaaaagaagtaaaataagaaggcaatgcttgtggaatgtacagtgcatattggcggcgcacgcctcattacgattcgcctgcttgcttctcctgttcaatcgtttctttggaaggcagtggatttttctcttgcgtctctgtcttcttcagtttcgacttatcgaatttctcgatctcagccatatcgggtttgtcagacatggttgcggaggaaaagcgaagcgaggcgcacgagtacgagcgaagtctggtctgcgcagtggccaccaccgagttccccggccataatggcc

SEQ ID NO: 413 - DNA, 708 bp, Homo sapiens
gaggccttacagtttaatggctctttttaagaggatttttatttcatgttacttctgatagtacaacattaattctttaattcatcttttctctctactgtgctcattcttttttctctttcactcgttggcttaccttaatgtcttcacctttcaatggcaagtaataatgacactcaacgtgaaacaattaagaaactttgtaggctttcgtttttctttatttcaaactctagtcttcctctgaaaatggctgggctggtggcttatgcctgtaatcccagcaatttgggaggccgaggcaggagaattgcttgagcccaggagtttgagaccagcctgggcagtatggcaagacctccatctctacaaaaagttatttaaaaaattagccagttggctgggtgtggtggtgctcacgcctgtaatctcagcactttgggtggccgaggcaggcagatcacctgaggttgggagttcgagaccagcctgaccaacatggagaaaccccatctccactaaaacatacaaaattagctgggcatggtggcgtatgcctgcaatcccagctactcaggaggctgaggcaggagaatcgcttgaacctgggaggcggaggttgtggtgagccgagatcgtgccattgcactctagcgtggtcaacaagagtaaaactccatctcaaaaaaaaaaaaaaagggcggccgc

SEQ ID NO: 414 - DNA, 3588 bp, Homo sapiens
gggagcctgagggacccggcggctggtgagcgcccgctggaggctggagcttccgggccctggaaaggggtccccgcgcgccccgggtcggaggcagacccctgggtttgggggacatgggcatttggggcgcctgaacccaagacctctggatgagctgccccgttcagaccatggatcctgaggtgaccttgctgctgcagtgccctggcgggggcctgccccaggagcagatacaggccgagctgagccccgcccatgaccgtcgcccactgccaggtggggacgaggccatcactgccatctgsgagacccgctgcgctacaacgtgtgcctgggctcggtgctgccctacggggccacctccacactgctggccggagactcggactcccaggaggaagcgcacggcaagctcgtgctctggtcgggcctccggaatgccccccgctgctgggcagtgatccagcccctgctgtgtgccgtatacatgcccaagtgtgagaatgaccgggtggagctgcccagccgtaccctctgccaggccacccgaggcccctgtgccatcgtggagagggagcggggctggcctgacttcctgcgctgcactcctgaccgcttccctgaaggctgcacgaatgaggtgcagaacatcaagttcaacagttcaggccagtgcgaagtgcccttggttcggacagacaaccccaagagctggtacgaggacgtggagggctgcggcatccagtgccagaacccgctcttcacagaggctgagcaccaggacatgcacagctacatcgcggccttcggggccgtcacgggcctctgcacgctcttcaccctggccacattcgtggctgactggcggaactcgaatcgctaccctgctgttattctcttctacgtcaatgcgtgcttctttgtgggcagcattggctggctggcccagttcatggatggtgcccgccgagagatcgtctgccgtgcagatggcaccatgaggcttggggagcccacctccaatgagactctgtcctgcgtcatcatctttgtcatcgtgtactacgccctgatggctggtgtggtttggtttgtggtcctcacctatgcctggcacacttccttcaaagccctgggcaccacctaccagcctctctcgggcaagacctcctacttccacctgctcacctggtcactcccctttgtcctcactgtggcaatccttgctgtggcgcaggtggatggggactctgtgagtggcatttgttttgtgggctacaagaactaccgataccgtgcgggcttcgtgctggccccaatcggcctggtgctcatcgtgggaggctacttcctcatccgaggagtcatgactctgttctccatcaagagcaaccaccccgggctgctgagtgagaaggctgccagcaagatcaacgagaccatgctgcgcctgggcatttttggcttcctggcctttggctttgtgctcattaccttcagctgccacttctacgacttcttcaaccaggctgagtgggagcgcagcttccgggactatgtgctatgtcaggccaatgtgaccatcgggctgcccaccaagcagcccatccctgactgtgagatcaagaatcgcccgagccttctggtggagaagatcaacctgtttgccatgtttggaactggcatcgccatgagcacctgggtctggaccaaggccacgctgctcatctggaggcgtacctggtgcaggttgactgggcagagtgacgatgagccaaagcggatcaagaagagcaagatgattgccaaggccttctctaagcggcacgagctcctgcagaacccaggccaggagctgtccttcagcatgcacactgtgtcccacgacgggcccgtggcgggcttggcctttgacctcaatgagccctcagctgatgtctcctctgcctgggcccagcatgtcaccaagatggtggctcggagaggagccatactgccccaggatatttctgtcacccctgtggcaactccagtgcccccagaggaacaagccaacctgtggctggttgaggcagagatctccccagagctgcagaagcgcctgggccggaagaagaagaggaggaagaggaagaaggaggtgtgcccgctggcgccgccccctgagcttcacccccctgcccctgcccccagtaccattcctcgactgcctcagctgccccggcagaaatgcctggtggctgcaggtgcctggggagctggggactcttgccgacagggagcgtggaccctggtctccaacccattctgcccagagcccagtccccctcaggatccatttctgcccagtgcaccggcccccgtggcatgggctcatggccgccgacagggcctggggcctattcactcccgcaccaacctgatggacacagaactcatggatgcagactcggacttctgagcctgcagagcaggacctgggacaggaaagagaggaaccaataccttcaaggctcttcttcctcaccgagcatgcttccctaggatcccgtcttccagagaacctgtgggctgactgccctccgaagagagttctggatgtctggctcaaagcagcaggactgtgggaaagagcctaacatctccatggggaggcctcaccccagggacagggccctggagctcagggtccttgtttctgccctgccagctgcagcctggttggcagcatctgctccatcggggcagggggtatgcagagcttgtggtggggcaggaacggtggaggcagaggtgacagttcccagagtgggctttggtggccagggaggcagcctagcctatgtctggcagatgagggctggctgccgttttctgggctgatgggtgccctttcctggcagtctcagtccaaaagtgttgactgtgtcattagtcctttgtctaagtagggccagggcaccgtattcctctcccaggtgtttgtggggctggaaggacctgctcccacaggggccatgtcctctcttaataggtggcactaccccaaacccatcttttgttctcctatatcctccttctcctgttccatttcagttcagtttcagcggtgccaacctctttgcgtttcctttttgttgatgaggacccagagctgctgcacacactcacctctaaccccctcccctcgctgctgggccccatctccacaggagagactggttcggctctagggcctcagtctggagtgggataggagcagtgagtgacaaagcctctgaaagatgcatcatctcttcctcacacccatttagtgggggatgggtcctctagacttgaggggctaccctgggaagctgccgtagcttcagccaggcaagaaagcttccttcaacctgcatagccggtgggtgaggagattcccaccttccatagcctccaaacatgttcccaaggccccactttcaagaatcagacagcaggaagccatagatgctggctgggttccaggttatggggagaagaaatacagtcaataaaaggtttttgtataaaaaaaaaaaaaaaaaaaaaaaaaaaaaaaaa

SEQ ID NO: 415 - DNA, 1601 bp, Homo sapiens
ccacgcgtccgcccacgcgtccgcatttttatatatcttatttggggaaacatctattaaaacccatcacccaaatttttatcaggttgtttgtcttcttattgaattctaagagttctcttatatattctgaatagaaattctttatggaatatacatttagcaaatgttttctttcagtaattgcagtggcttgcgttttcatttttttttttaacagtggctttgcctatcccaaggcaacaaagattttctcattcatttttttctagaggcatcatacttttagttttacatttatgtctatgacccaatccaaattaatttgtgtatgatgtgaggccaggtgaaagtcattttgcatagtgtatcaaccattatagcacattttgttgaaaggactttttctctcatgaattaccttgacatttttgcaaagaatcgattggccatatttatgtggggcttttttttttttttttttttttgagacagagtcttgcgctgtcaccaggctggagtgcagtggcatgatctggagtgcagtggcatgatcttggctcactgcaacctctgcctcccgggttcaagcaattctcctgcctcagcctcctgagtagctgggactacaggcagtgtgtgtggggctatttctgaactttcttttgtgttccatagattgatatatctcttcatacacaatatgacactatcatgactactgtagcattatattataagccttgaaatcagatagtgtgagatttccaattttaaacttcttcaaaaatttttggctagattagatcctttgcctttccatatgaattttagaatctgcttgtcaacttctgtaaaaaatcctgcaagtatttttgattaggattcattgaatctataagttaatttgggaagaattatcatcttaaaaatattgagtcttccaacacacatatgtataatttcatcttcttaggtcttctttagttttttttcaccaatgtcttactgttttcagtgtgcaagtcttatacattcttggctaaatttaagtatatcattgtttttgatgtggttataaatgatattggtttttaaatttcaatttccagttgtttgttcctaatatatgaatatgcaatcaattttgtatactgattgggtattcttcaaccttgctaaactccctacttcagttctagtagtttttcgtagattctttaagattttctacatagatgatcatatcttctgagaatatagacagttttacttctttcttttcaacttatattctgttacctttatttatttcactggctagaacttccagtaatacgttgaataaaggtagataaagcagatatttgtgctttagtcctaatcttaggaaaaaaggcattaggtcatttacatgtatgatgtaaatgttatgatgtaaaatgtattttaactgtgatgttaactgtgaattatcttagatgctatatcaggttgaaaattcccttctattctttgttgttgagagatttttataataaatagatattgaattttgtcaaaaaaaaaaaaaaaaaaaaaaaaaaaaaaaaaaaaaaaaa

SEQ ID NO: 416 - DNA, 1643 bp, Homo sapiens
ccacgcgtccggctacttctgtggcctctcgtggctggcggcaggtggggtgatggtgctggcctcggcgctgctgtgtgtgattgtgtctgttctgaccaacgtgctcgtgggtggaaacaccccaaggaagaaccccatgcatcccagctcaaggtggtcagagctagaccttcttattctgttggggacggcgggccacgtcttgagcctgggcgccagcagcttcgtggaggaggagcaccagacctggtacttccttgtgaacaccctgtgtctagctctgagccaagaaacctacagaaactactttctgggagatgacggtgagcctccgtgtggcctctgtgtggaacaagggcatgacggggccacagcagcgtggcaggacgggcctggctgtgatgtcctggagcgagacaaaggccacggaagcccctctacctccgaagtgctcagaggccgcgagaagtggatggtgctggccagtccgtggctaatactggcctgctgccggctgctgcgctccctaaaccagacaggtgtgcagtgggctcaccggcctgacctcggtcactggctcaccagctctgaccacaaagccgagctctctgtcctggctgccctctccctcctcgtagtttttgtgctggtgcagaggggggtgctcccctgtgtccaaggctgccctggcgctggggctgctgggcgtctactgctaccgggcggccatcgggagtgtccggttcccgtggcggccggacagcaaggacatttccaagggtattattgaagctcgttttgtttatgtctttgtccttggcattctgttcacgggcaccaaagacttacttaaatctcaagtcattgctgcagacttcaaactcaagactgtaggtttatgggagatatatagtggattagttcttctggcagccttgctctttagaccacataatcttccggtcttagcatttagcctcttgattcagactctaatgactaaattcatctggaagcccctgagacacgatgcagctgagattactgtgatgcattattggtttggtcaagcattcttctattttcagggcaactccaacaacattgccaccgtggacatctccgcaggcttcgtgggcttagacacctacgtggaaatcccagccgtgctcctgacagcgtttgggacgtacgcagggcctgtgctgtgggccagccacttagtgcacttcctgagctcagaaacacgcagtggttcagcactgagtcatgcttgcttctgctacgcactgatttgttctattccagttttcacgtacatcgttttggtgacatctctgcgttatcatttatttatatggagtgtattttctccaaaacttctctacgagggaatgcacctgctcattacagctgctgtctgtgtattcttcacggcaatggatcaaaccagactcacacagtcttagactaagctgaacactggaaaaataatacatgcttaaagtctgctgttattctaaaatgaaagatatgaattcaacaaagttgatggataactttctttgactgctctacctgaatttagactaagcagtaaatagtttaataaaagatcactttaaaaaaaaaaaaaaaaa

SEQ ID NO: 417 - DNA, 2493 bp, Homo sapiens
tgtaaggtggtttggggtcatgtttttaaccacctggcaatacagtccactttctggtttcttttattgtgggaagtaaatggtcaagctgctcaggcagtgaaaagatgtggagaatgtccgttgtcattcttgccactgtattccatttgctaccgagatataacattaaggtggacacattttctaactgtattaattaaaagtcaatggatacagagagtggatttyctccccaagtcccatccctgctgaagaccgcttggatgaactccccaacccactgtgcccctcccgcaacactaccagtagactttagaaccatagttaactaagtcttttacctctgagatacttaattctgggaaaattggtgacaattttcaacttctaaataggtaactcgactgcaaaataatcaaaactgataacaatgaaactgcggctcttaaacaaagccatgcatgccgtgcatttgtattgaaatgtctccatgatatgaagccaaatattcaatgtaacatacttaatatccaaaggtggaaacaaaagaatgtagagatccagtgttaagagttccatttgcttcaattaattatttaccttcctgtggaataatatatatatatatatttaatagaaccatagatagactagtagaatttagattataaatgtgtgagtgcagattatcctgctattgcacaagctagaggggggaaaaatctcaattccagctggcaagatgctagccaggacacatataagaaagttgcactagattgaatggtcacagaatcggaggacatggaagaaaaaggaaacttcggtggttctgcagcagacatgggctaggtcatatgtggtttctatgagttcgtgtctcaaaaaaaaaaaggagggggggcatctgtccccggtggagctcacctatttggaatatggggcatttgttttttccactgcaatgatttcagtctggtttcatcatgttggaattcgatcacaccattttcaaacaatgttaacatagtccagcttttgtttttctcatctcttctgagaggagactcactgtttctgtctgaggaagctcataccctcggcaaaacatcaggacaaataaagagaaatgggggtacgcattcccaacagaagcagtgtgttatttgttttaaaactctgaacagagatcttggaaatctttcaaaaagaccattgaattcttcattggctgagaacgacgttttaaaatgtcttaaataaggctttgtttgcattgtttgagttcaaggggccttattattgaatggaattgcacaagcctttctttgtgcaatcaaaccattgttattggtagttctgtaaaggaaactgtggaatcgaattggcagtggagtcataaatctatttactgagtgtggcttccaagaaatgttgcaattcaaaatgcactaagtctgtgatttattggagatttggagattctaaataatatttttaaaaaacttccatgcaacttctggtttaatgtttggcaactccacatgataaaaaaataaaaacagcccaaccgagtttcggaattaagtattcttctagtaagtgattcaaacttgtaatatttgccacaggactgacttatttatttactagctagaagctcttaagttcacttgtttatcagggcatatacagaagggtttgttaaaactcgatgttaactttacaactttctgacctggtgcatgaattctcaagtactgtatttcactgtgttggtgtgtctgatggaaatttcgaggtggtcccacaaaaatattttatgtagtgtgccttcaaagagaaccatttatttctcttcacttatcgtcccacaaagtcacatttggtggtggtcagccaagtcgcatctggtctagttttactcttgtcccaattttaaagagaaatgggaatgagtttgccctggtgagacccataccattgcaatgattatcttgagcacttaaagtccagtgttggctgttagtgtatttgatattctgcctgtctcctcatggttgaaatatgtctgaagaatagcagcataatctcttggctgtttatacttttttaaactttcctgtgttgtaaatattgtatacttttggtgattccagctatgtaacctctatgctctgtaaggtgattatttgtatatagcaacatggcccagtgatattatatagtttcccaatggagaggttattgagtaacctttgcattagtttaaacactaccagaagaatgctgagccaactataaacactcaattttgtatgttttccaaattgtacttattactgcttttgatactgtattacgtgccaatagtttcccaatcacatagcaggcaagagatattttgtactttttgatccactgtaatatttaataaaaaatgttactatctgttaaaaaaaaaaaaaaaaaagggsggccgcccaaggg

SEQ ID NO: 418 - DNA, 664 bp, Homo sapiens
atgaaaccttcctcctactgcacagcccgcccccctacagccccggtccccacgcctagaagacagcggaactaagaaaagaagaggcctgtggacagaacaatcatgtctgactccctggtggtgtgcgaggtagacccagagctaacagaaaagctgaggaaattccgcttccgaaaagagacagacaatgcagccatcataatgaaggtggacaaagaccggcagatggtggtgctggaggaagaatttcagaacatttccccagaggagctcaaaatggagttgccggagagacagcccaggttcgtggtttacagctacaagtacgtgcatgacgatggccgagtgtcctaccctttgtgtttcatcttctccagccctgtgggctgcaagccggaacaacagatgatgtatgcagggagtaaaaacaggctggtgcagacagcagagctcacaaaggtgttcgaaatccgcaccactgatgacctcactgaggcctggctccaagaaaagttgkctttctttcgttgatctctgggctggggactgaattcctgatgtctgagtcctcaaggtgactggggacttggaacccctaggacctgaacaaccaagactttaaataaattttaaaatgcaaaaaactcggaaaaaaaaaaaa

SEQ ID NO: 419 - DNA, 2374 bp, Homo sapiens
ggcacgagtgcccttctcgtgggcccaccaaggctgaggcagagcttcctagcagacacaacttggaagggcttctcaggcacccatcctgacccccaggctggagaggagccaaaagcacttgttacatagtgattccttttgccctgtgsgcctcagttcttgcagtagttgtgaatctgtgtctgaaatcactactttcttctcggatcctttttctcttttcgagttgttaggatgtgttttgtacagctgtcatttgataaagaaggttgacctctaccaggggcaagtctggcacctttacctagaagtactctgccatgtcttgcccgttcatttatcgtttgttgggtttcatgagggatcccattgaagtagatcccttttatgaagggatcccattgaatgcagcattaactcagaacgtagcataaagtcgtcactgctcccagctgggacgtggtgtcttggcatcccttcctgccgtccttgactctttcccatcttcagttctataattttctcccaaacaaatgctcttttagagttaacactaaagatctggtctttgccgtcaaggttgacagaacagctgttcatggtgtttgcggtgaaacccgtgttctctttcaatgcagtctgtggctttaacgtgtgtcctgtaatttcgccaagwtcatttcttgcctctggtaacttgggggtggatttccttgggctctctaggtgtactgctatgtcagatgcaaaatgtcacccagcttcctgtcacatatccttgtctgtgcattcatgcatctacctcattccggttttctttctaatctcatgtattcctgttgtgaggaaatgtgttcttttcccgatccttttgtagttcatacacrtgacaattgggtttccacgcacgtgcatgagatgttcctccttcaaaccttgttactatgtcagcacattaactgcctggcatggaaaaagaaaaaaaaaaaagaaatatgttcttttcctaccatttgaaaaaaatcctccattgcttttattagagttttgaatacttgtgaaaattttcaaaagaaagtaattgattaccatttttgctgcttattacgatgagctgtgtccattagctgtgtcaccccactcttgcatttccagaatagtccctacccaattgcagcgggcatgtttttgagtggtgttgcattccatgtgcttgattttgtcctagaactggcacagcgcctgccctacctgcagccctgggttgtggccctgttgcgtaccatgtgatttgccaccccgcttctaggccatattaattcagccagaactgaacacctgacccaagggcagcaagcaatcatcagagcatagagctgacagaacatgatggaccacggacaccaccaggccttccagatctgaaatgcaaacaaggaaacagaagcttctaggcatcagaaggtgtggggagcagcacagtactcagaggagtgaggagcgtggcgcctgctgggaggaaggcctggccatggtatgttcttggatttctggcagcagccctcattggtccacgtgcgtccccactacagactccttgacttgagccagcttgagtgggtctctactcttttctattgtgttttgccacttggctgcttcctggccaagtcgcacctgactgcatgaacacctgttcaaacgtgtgttctctgttctctaagatgggtgaaagtcgatgccttctagtctcagtgaatttaacctgtgattttatgtctacgtatattgttcctttactgaacccaccacatgcgggccataaaatgagtgaaatcacagtgcaccctgttctcttatttttgaagtgtttcacgatttccagcatgtccatcagatggggggattgctaacttctctcttactcatgtacttacattctgtagttctcattgcatcactttggatgtttactttgaaaagcagaaactgtctctttaaacttggccctcaatgtcatttgcgtatctctgagaacaatagctatgtcccaccccagtttgtatttccgttggttgttggcacttttttctcattcccccatctcattaccttgtctgttttctggcactcactataatcagccttgcactagagctgtttgtggacttggcttcaccccctcctcctcagccctcccccacccattaaattgtgagctcttagaagacaggggtggcctttcatgtctgatcccctaccaaatctagcacagtgccttgcatcaagtagatttcaataaatatatgttaaatggcaaaaaaaaaaaaaaaaaaastcgagactagtkctctctctctctcctcgtgcc

SEQ ID NO: 420 - DNA, 2309 bp, Homo sapiens
  misc_feature (2304)..(2304): n equals a,t,g, or c
ggcacgagcagacacatcctgaagctgctgccgtccatggaggccactgggggcgagaagtccagcacgcccatcaagggccccaagaggggacatcctagacagaacctacacaagcattttgacatcaatgagcatttgccctggatgattgtgcttttcctgctgctggtgcttgtggtgattgtggtgtgcagtatccggaaaagctcgaggactctgaaaaaggggccccggcaggatcccagtgccattgtggaaaaggcagggctgaagaaatccatgactccaacccagaaccgggagaaatggatctactactgcaatggccatggtatcgatatcctgaagcttgtagcagcccaagtgggaagccagtggaaagatatctatcagtttctttgcaatgccagtgagagggaggttgctgctttctccaatgggtacacagccgaccacgagcgggcctacgcagctctgcagcactggaccatcggggccccgaggccagcctcgcccagctaattagcgccctgcgccagcaccggagaaacgatgttgtggagaagattcgtgggctgatggaagacaccacccagctggaaactgacaaactagctctcccgatgagccccagcccgcttagcccgagccccatccccagccccaacgcgaaacttgagaattccgctctcctgacggtggagccttccccacaggacaagaacaagggcttcttcgtggatgagtcggagccccttctccgctgtgactctacatccagcggctcctccgcgctgagcaggaacggttcctttattaccaaagaaaagaaggacacagtgttgcggcaggtacgcctggacccctgtgacttgcagcctatctttgatgacatgctccactttctaaatcctgaggagctgcgggtgattgaagagattccccaggctgaggacaaactagaccggctattcgaaattattggagtcaagagccaggaagccagccagaccctcctggactctgtttatagccatcttcctgacctgctgtagaacatagggatactgcattctggaaattactcaatttagtggcagggtggttttttaattttcttctgtttctgatttttgttgtttggggtgtgtgtgtgtgtttgtgtgtgtgtgtgtgtgtgtgtgtgtgtgtgtttaacagagaatatggccagtgcttgagttctttctccttctctctctctcttttttttttaaataactcttctgggaagttggtttataagcctttgccaggtgtaactgttgtgaaatacccaccactaaagttttttaagttccatattttctccattttgccttcttatgtattttcaagattattctgtgcactttaaatttacttaacttaccataaatgcagtgtgacttttcccacacactggattgtgaggctcttaacttcttaaaagtataatggcatcttgtgaatcctataagcagtctttatgtctcttaacattcacacctactttttaaaaacaaatattattactatttttattattgtttgtcctttataaattttcttaaagattaagaaaatttaagaccccattgagttactgtaatgcaattcaactttgagttatcttttaaatatgtcttgtatagttcatattcatggctgaaacttgaccacactattgctgattgtatggttttcacctggacaccgtgtagaatgcttgattacttgtactcttcttatgctaatatgctctgggctggagaaagaaatcctcaagccatcaggatttgctatttaagtggcttgacaactgggccaccaaagaacttgaacttcaccttttaggatttgagctgttctggaacacattgctgcactttggaaagtcaaaatcaagtgccagtggcgccctttccatagagaatttgcccagctttgctttaaaagatgtcttgttttttatatacacataatcaataggtccaatctgctctcaaggccttggtcctggtgggattccttcaccaattactttaattaaaaatggctgcaactgtaagaacccttgtctgatatatttgcaactatgctcccatttacaaatgtaccttctaatgctcagttgccaggttccaatgcaaaggtggcgtggactccctttgtgtgggtggggtttgtgggtagtggtgaaggaccgatatcagaaaaatgccttcaagtgtactaatttattaataaacattaggtgtttgttacttaaaaaaaaaaaanaaaaa

SEQ ID NO: 421 - DNA, 1375 bp, Homo sapiens
aaacaggaaataaatacgaatgaaactgagctctaagcagcatgtaacctggcctgcatccaggaaatagaggacttcggatccttctaaccctaccacccaactggccccagtacattcattytctcaggaaaaaaaacaaggtccccacagcaaagaaaaggaataggatcaagagatacgtggctgctggcagagcaagcatgaattcgatgacttcagcagttccggtggccaattctgtgttggtggtggcaccccacaatggttatcctgtgaccccaggaattatgtctcacgtgcccctgtatccaaacagccagccgcaagtccacctagttcctgggaacccacctagtttggtgtcgaatgtgaatgggcagcctgtgcagaaagctctgaaagaaggcaaaaccttgggggccatccagatcatcattggcctggctcacatcggcctcggctccatcatggcgacggttctcgtaggggaatacctgtctatttcattctacggaggctttcccttctggggaggcttgtggtttatcatttcaggatctctctccgtggcagcagaaaatcagccatattcttattgcctgctgtctggcagtttgggcttgaacatcgtcagtgcaatctgctctgcagttggagtcatactcttcatcacagatctaagtattccccacccatatgcctaccccgactattatccttacgcctggggtgtgaaccctggaatggcgatttctggcgtgctgctggtcttctgcctcctggagtttggcatcgcatgcgcatcttmmmactttggctgccagttggtctgctgtcaatcaagcaatgtgagtgtcatctatccaaacatctatgcagcaaacccagtgatcaccccagaaccggtgacctcaccaccaagttattccagtgagatccaagcaaataagtaaggctacagattctggaagcatctttcactgggaccaaaagaagtcctcctccctttctgggcttccataacccaggtcgttcctgttctgacagctgaggaaacgtctctcccactgtttgtactctcaccttcattcttcaattcagtctaggaaaccatgctgtttctctatcaagaagaagacagagattttaaacagatgttaaccaagagggactccctagggcacatgcatcagcacatatgtgggcatccagcctctggggccttggcacacacacattcgtgtgctctgctgcatgtgagcttgtgggttagaggaacaaatatctagacattcaatcttcactctttcaattgtgcattcatttaataaatagatactgagcattcaaaaaaaaaaaaaaaaaaactcga

SEQ ID NO: 422 - DNA, 2458 bp, Homo sapiens
ggcacgagcgccatactgttctggtgatagtgaatagatctcatgagagctgatgattttataagaggtttccccttttgcttagttctcattctctcttgcctgccgccatgtaagacgtgcctttctgtcatgcttgtgaggcctccccagccacgtggagctgtgagttcattaaacctctttttctttataaattacccagtcttggttatgtctttatcagcactgtgaaaatgaacctatacagtaaattggtaccagtagagtggggcgctgctgtaaatacccaaaaatgtggaagcaactttggaactgggtaacaggcagaggttggaacagtttggagggatcagaagacaggaaaatgtgggaaagtttgggacttcctagagacttgttaaatggctttgaccaaaatgctgataatgattgggacatgaaatccaggctgagttggtctcagatagcgatgaggaacttgtttggtactggagtaaaggtgactcttgctatattttagcaaagagactggctgcattttgcccctgccctagagatttgtggaactttgaactcgagggagatgatttagggtatctggcagaagaaatttctaagcagcaaagcattcatgaggtgacttgggtgctgttaaaagcattcagttttaaaagggaaacagactataaaagtttggaaaatttgcagcctgatgatgagatagaaaagaaaaacccattttctgaggataaattcaagccccctgcagaaatttgcataagtaacaaggagccaaatgttaatcactaagacatggggaaaatgtctgcagggcatgtcagagacctttgcagcagtgcctcccatcacaggcctggaggcctaggagggaaaaaatggttttgtgggccaggcccaaggtccccttgctgtgtgcagcccagggacttggtaccatgcatcccagctgctctagtcatggctaaaaggggccaagatacagctcaggccttggcttcagagggtgcaagccccaagtcttggcatcttccacgtagtgttgagcctgcaggtgcacagaagtcaagaactgaggtttgggaacctctgcctagatttcagagaatgtatggaaatgcatgtatgtccaggcagaagtttgctacaggagtgaggccctcatggagaacctctgttaaggcaatgtggaaggggaagcccccacacagagaccccactgggacactgcctagtagagctgtcagaagaaggccaccgtcctccagacatcagaatggtatatccactgacagcttgcaccatgcacctggaaaagccacagacactcaacgccagcctgtaaaagcaaccgagaagtaggctgtaccctgcaatgccataggggtggagctgcccaagaccatgggaacccacctcctgcatcagtgtgacctggatgtgagacatggagtcaaaggagaccattttggagctttaagatttaactgccctgctggatttcagacttgcatggggcctttagccacttcgttttggccaacttctcccacttgaaatgggtgtattcagccaatgcctgtacctccgttgtatctaggaagtaactaactagcctttgattttacaggctcataggtggaagggacttgccttgtttcagatgagactttggagtatggacttttgagttaatgctgaaatgagttaagactttgggggactgttgggaaggcatgattgatttttaaatgagaggacatgagatttgggaggggccagggagagaatgatatggtttggctgtgtccccatccaaatatcaccttaaattgtagctcccataattgtgggagggacctggtgggagataattgaatcataggggcagtttctcccatactgttctggtggtagtgaataagtctcacgagatctgatggtttaataaggggtttccccttttgcttggctctcattctctcttgtctgctgccatgtaagatgtgccttttgccttccaccatgattgtgaggcctcccagccacatggaactgtgagttcattaaacctctttttcttcataaattacccagtctcgggtatgtctttatcagcagtgtgaaaacagactaatacaccactcctctaccttctttattttctcagtgtggaaaatgcctgatgaaagctttggggccctcacagatgcacaactcaagtgctgattctatcacttatctaccagctctgtgaccttgaacaagccgcttaaccttgctaagcctctgttttctcatatgtcaaatggtgataataatgcctacctcccgaggttgttgtaagaattataagcacaaatgtatgtaaagtgcctggcacaaagtaggtgctcaataaatggtagctattataatacaaaaaaaaaaaaaaaaa

SEQ ID NO: 423 - DNA, 1535 bp, Homo sapiens
ggcacgaggtcaagcgaaaggatttcaaggaacagatcatccaccatgtgttcaccatcattctcatcagcttttcctggtttgccaattacatccgagctgggactctaatcatggctctgcatggactcttccgattacctgctggagtcagccaagatgtttaactacgcgggatggaagaacacctgcaacaacatcttcatcgtcttcgccattgtttttatcatcacccgactggtcatcctgcccttctggatcctgcattgcaccctggtgtacccactggagctctatcctgccttctttggctattacttcttcaattccatgatgggagttctacagctgctgcatatcttctgggcctacctcattttgcgcatggcccacaagttcataactggaaagctggtagaagatgaacgcagtaccgggaagaaacagagagctcagagggggaggaggctgcagctgggggaggagcaaagagccggcccctagccaatggccaccccatcctcaataacaaccatcgtaagaatgactgaaccattattccagctgcctcccagattaatgcataaagccaaggaactaccccgctccctgcgctatagggtcactttaagctctggggaaaaaggagaaagtgagaggagagttctctgcatcctccctccttgcttgtcacccagttgcctttaaaccaaattctaaccagcctatccccaggtagggggacgttggttatattctgttagagggggacggtcgtattttcctccctacccgccaagtcatcctttctactgcttttgaggccctccctcagctctctgtgggtaggggttacaattcacattccttattctgagaatttggccccagctgtttgcctttgactccctgacctccagagccagggttgtgccttattgtcccatctgtgggcctcattctgccaaagctggaccaaggctaacctttctaagctccctaacttgggccagaaaccaaagctgagcttttaactttctccctctatgacacaaatgaattgagggtaggaggagggtgcacataacccttaccctacctctgccaaaaagtgggggctgtactggggactgctcggatgatctttcttagtgctacttctttcagctgtccctgtagcgacaggtctaagatctgactgcctcctcctttctctggcctcttcccccttccctcttctcttcagctaggctagctggtttggagtagaatggcaactaattctaatttttatttattaaatatttggggttttggttttaaagccagaattacggctagcacctagcatttcagcagagggaccattttagaccaaaatgtactgttaatgggtttttttttaaaattaaaagattaaataaaaaatattaaataaaacatggcaataagtgtcagactattaggaattgagaagggggatcaactaaataaacgaagagagtctttcttatgcaaaaaaaaaaaaaaaaaaa

SEQ ID NO: 424 - DNA, 1682 bp, Homo sapiens
tttttttttttttttttttttttttttttttwtccttcagcaagcctcttttaatgatttaaaaaagaactactaacttttacaaataattgtgttcagagacagactttcaatctaaagaaaagatcaaggacctagctctcgtggcagaatgcagaaacagaagcctccagattgatctctgcagatgctaacgtggcccactttgtcctcatattcagcctgatcctaaagcccttacaactaagccaatacctgcttggattcttctgacaactggcaaagatgtcacgttccacttcttatctcaccacctcttaaccacaaattggccccagtggctttcaaaagggggaaaaaattgtgcgagtttgagactgtttatgtattcatgactaaaaccaaatctgagatctttggaactcttagctggccctggggcatgcgagccgcctgtgcatccctttggtccacctggaggcccgtgaagaccttcagtggaaggaagagtgggtcagatgagacgtgtccatttcatcagtcagccatcggtgacaggctgaattcagagacccaggccagagtgtaccagctacaaaatttatccaaggattccaattatgctttaaaaaattctaccagaagaagtaaaaaacgatgtttatatgttaagaaatgtaacagagtagctctcatttgataatataaaatagctctgcctctattcaaaacagttgattttaaaagtaggtatatagtcgctatacttattattatttttagattgctttaaaaagcatatgcgtccctatctctttggcaagcacccagcggtgagtcacgccctgcacccgcagcagccgatctgagaggctcctcagggagcctccgtgaacttttccaaaccctccatgcgggccgcacacaggatgcccgtgccgggtcgtttcccatcagcttccagccacgctgcttgcttgtagctaaaagcaagccagggatgcccgtgtcagatgaagctgcttacgagtctccatggaaaggcggcgctggtgctccggcacttggtttgctcggtgcactctcttcagaggtcgccgaccgagccctccaggcggctccagcttgggcgcctcgggatgcgggccggggagacctcccggggcaggaccggcctcaggggccagcgggcgcgtcgttggggcccagcaggagcttggcgccctgtttgtcgatgctggagttgatgctgtctgcgtccttctccggctcggggacgcaggtgcagcccacggggatggtgacgtaggcctcggtgtagacggaacggccgccggcgcaggcgggggtgcggcgcaggacgacggtgggcatgtagacaggggcgctgcggaagcgcacgtcctcctcgccgaacagcccggtcaggcagccccggcacaggcagtaggcttcaggcaggtacctggggtacctcgccgggtcgtaggagattctgtaggcccagggcgacacgctgcgcaggttggtgggcggccggaagcggcggtcggcgggcctgccccctgccgggcagctcgcgttgcgcgcctgctcacgcggccccagctgcagcgtgtggtggaaggcactgagcacgccggccgccaggcgcccgtacagctgctccagtagctcctccg

SEQ ID NO: 425 - DNA, 433 bp, Homo sapiens
ggcacgagagatgggcagcaacaagggagcctcccaggcgggcatgacagggtacgggatgcccaggcagatcatgtaggacgcggcatcctgcccctggtagagaggacgaatgttccacaccatggtctctacgaaaaagaaatagttagtcaccttctgaccttctcctctttctcaaagccttctgtccctggtttttgcaagtgctgcatttccgccgagaatccgcgttgcctactgctgccacctcctgttcatttagaactatgcaaagactccgcttccgttttcctgagctcctcgggccccagagtctctgtttgattatttatttatttatttatttatttgccaaaaattctcctcttcaacttatagaatgcacctaataaagtaattagtcttgtgtcttaaaaaaaaaaaaaaaaaa

SEQ ID NO: 426 - DNA, 1162 bp, Homo sapiens
  misc_feature (632)..(632): n equals a,t,g, or c
gaattcggcacgagtttagcatccaagttccccaccaccaagttagagatgactgctgtggctgacattttcgaccgagatggggatggttacattgattattatgaatttgtggctgctcttcatcccaacaaggatgcgtatcgaccaacaaccgatgcagataaaatcgaagatgaggttacaagacaagtggctcagtgcaaatgtgcaaaaaggtttcaggtggagcagatcggagagaataaataccgggtaaggaagagaaaaagcagtcctttgttgtggtggtttctcatatgtggctgatcccaccttttcctcctgatgcttagaggcccagagcccatcggacttgagatgtggtcactctctgacctcatctctatagatgccaagtgtcaggtaccctgttacatctgaaaactagtcccatatctacctagatagtagtagtttgtatttaagttttaagataggagatatttcagagctgtcacttcacatctgacaaagttcctagggggatgaaggtacctttggaaacaattatatctattgactgaccacttgcccacaaagagatggtcattgtgagcctgagtggctcccaggctagagaggcctggggnaaactktgttgaagccccaacagacactgtgcctgctctgagctgggctacaaatggggcccaggagcactgaggagacatcaggctcagtggtcttccctggaaagccatgctaggtgtggccataactgacagtgaactatacttgtgttttagcttcttttgggaccagggtcagggacatagaaggatctgaaacaggtctcctaaaatatatcaacagctcgtcaagattctctaaagtcctaagaaaaatctatgattggcaaagaggatttagattgcactaagaaacacaggaaggtccatgtttcattagtatatccaaaatgtcctcaaagtacaccaaatctaccccatgctgcagtctcctgaggagtgctgggtgaatctgctttgaatataacctagggcatttagttaataaagctccatataatcttatgcctgcttgttggattttgttttcttgttttttgtttttaattatctatgagagaaatgaattaacaagaacaacatagcatgga

SEQ ID NO: 427 - DNA, 1801 bp, Homo sapiens
acgagatgaaactggcgaagaaagggaaaggggagtaaccatggatgttggtatgacaaagtttgaaaccacaaccaaagttattacattaatggatgctccaggccataaggacttcattccaaatatgattacaggagcagcccaggcggatgtagctgttttagttgtagatgccagcaggggagagtttgaagctggatttgagactggaggacaaacacgagagcatggactcttggtccgttctctgggagtgacgcagcttgcagttgcagttaataaaatggatcaggttaattggcaacaagaaaggtttcaagagattactggaaaacttgggcactttcttaagcaagcaggttttaaggagagtgatgtaggttttattcctacaagtggtctcagtggtgaaaatctaatcacaagatctcagtcaagtgaactcacaaaatggtataaaggactatgtttattagaacaaattgattcctttaagcctccccagcgatctattgacaaaccttttagattatgtgtgtccgatgttttcaaagatcaaggatctggattttgcataactggtaaaatagaagctggttatatccaaactggtgaccgactactggcaatgcctcctaatgaaacttgtaccgtgaaaggaatcactctgcatgatgaacctgtcgactgggcggcagcaggcgatcatgttagtcttactttggttgggatggatatcatcaaaatcaatgttggctgcatattttgtggccccaaagtacccattaaagcttgcactcgtttcagagcccgaatcctcatctttaatattgaaattcctatcactaaaggatttcctgtgctgttacactaccaaactgtcagtgaacccgccgttattaaacgattgattagtgtcttaaacaaaagcacgggtgaagtcacaaagaaaaagcctaagtttttgactaaaggccagaatgcattggtagagctacagacacaaagaccaatagctcttgagctatataaagacttcaaagagctggggaggttcatgctacgttacggtggttctacaatagctgctggtgttgtcactgagataaaagaatgatgggtcagaatttctaccacgtttctggatacagtgaaatagctaacctctgtttcaagaatgcagttattaagtcaaaggaacaatgtgcaattgatatgtttttagatgagagagaaaaattaaagctaaaattagctgcaaagaagtattaataatcacctctgcaaaaattctaagttgccaactggcaaagaaagtctaatgttaaaaacaactttgcctttgaaacgttaataaatggatttactttgctaagatttatggcaagtgtcaaaaatagtatctgaagatactgaatcatcatgaaatgaactctacttctggccaaagcacaatgtatttgcagttttcccttttgattcaattatactgcacatgttttaaggaaaagtaacttaattgggtttttcaggcagttgatatttgacctaagctttttttttttttttttttttttttccagttaatgctaagaaaagatttggggaaggttataataaaagtattttgtggtgaccataagaatgtccctccccaaacaagtaaacttgtgaaagtttaatttggaattagtggaagctgttcctttgaaagccaagatattatttaagttgtaaagccagctaataaaatgccttagtttgagcataaaaaaaaaaaaaaaaaaaaaaaaaaaaa

SEQ ID NO: 428 - DNA, 1015 bp, Homo sapiens
gattaaatccccatctttttggagttaacaatttaatgagaaatagaaattaaagaaaaaaaaaacattcctcggccttagggcccttgcagttgctgttcagctgcctggaatgctgtcccccagatgcccagattcttaactcccttgcctccctcatggctgctcccacgcctcctgctcagtgggacctgctctggccatccctttcagctctgtgcatactcctctaccacgtgccggggctttctccccattctatttccctcctaagtttgctttgtaattgtctgtttccctctgctagaatttaagttccatgaggcaggcatctttgtctcttttgttcattgctgtatccacatgcctagtacagtgcctggcacagtagtaggtgcttgctcagtaattttcattgaatgattgaatgggcgaatgagaataaataaatgagggcatccagggaacccaaggaaggctacagtggctagtgagaaaaaggcagaatggtggagatgagatcmcmtagggaataagaatttgagggtttaatataagagcaggccggcatggtggctcacccctgtaatccccggcacttcgggaggccgaggcaggtggatcacttgaggtctcgagctcgtggcctcgagtgatccgcccaccttggcctcccaaactgttgggattacaggcgtgagccaccatgcccagcctttattagccaatttgaaacctgtgcaacaagttctgcagggccttgataacttgaggtaatacttaaattacttgtggacaggtttttggttttttctttggacactaattcattaattccatttaggaggtatttattgagccagcagtgtgtgtggtgctgaggtcacatgaggagcagaatagataagacattaaatccccatctttttggagttaacaatttaataaaaaaaaaaaaaaaaaaaaaaaaaaaaaaaaaaaaaaaaaaaaaaaaaaaaaaaaaaaaaaaactcga

SEQ ID NO: 429 - DNA, 3667 bp, Homo sapiens
  misc_feature (1)..(2): n equals a,t,g, or c
  misc_feature (5)..(5): n equals a,t,g, or c
nnccnatgaacccagytcgaattaccctcactaaagggaacaaaagctggagctccaccgcggtggcggccgctctagaactagtggatcccccgggctgcaggaattcggcacgagcgaaaacggacaaaacctccaccaccggcagcatcctgaatcttaacctggatcgaagcaaagctgagatggatttgaaggagctgagcgagtcggtccagcaacagtccacccctgttcctctcatctctcccaagcgccagattcgtagcaggttccagctgaatcttgacaagaccatagagagttgcaaagcacaattaggcataaatgaaatctcggaagatgtctatacggccgtagagcacagcgattcggaggattctgagaagtcagatagtagcgatagtgagtatatcagtgatgatgagcagaagtctaagaacgagccagaagacacagaggacaaagaaggttgtcagatggacaaagagccatctgctgttaaaaaaaagcccaagcctacaaacccagtggagattaaagaggagctgaaaagcacgtcaccagccagcgagaaggcagaccctggagcagtcaaggacaaggccagccctgagcctgagaaggacttttccgaaaaggcaaaaccttcacctcaccccataaaggataaactgaagggaaaagatgagacggattccccaacagtccatttgggcctggactctgattcagagagcgaacttgtcatagatttaggagaagaccattctgggcgggagggtcgaaaaaataagaaggaacccaaagaaccatctcccaaacaggatgttgtaggtaaaactccaccatccacgacggtgggcagccattctcccccggaaacaccggtgctcacccgctcttccgcccaaacttccgcggctggcgccacagccaccaccagcacgtcctccacggtcaccgtcacggccccggcccccgccgccacaggaagcccagtgaaaaagcagaggccgcttttaccgaaggagactgccccggccgtgcagcgggtcgtgtggaactcatcaactgtccagcagaaggagatcacacagagcccatccacgtccaccatcaccctggtgaccagcacacagtcatcgcccctggtcaccagctcggggtccatgagcacccttgtgtcctcagtcaacgctgacctgcccatcgccactgcctcagctgatgtcgccgctgatattgccaagtacactagcaaaatgatggatgcaataaaaggaacaatgacagaaatatacaacgatctttctaaaaacactactggaagcacaatagctgagattcgcaggctgaggatcgagatagagaagctccagtggctgcaccagcaagagctctccgaaatgaaacacaacttagagctgaccatggcggagatgcggcagagcctggagcaggagcgggaccggctcatcgccgaggtgaagaagcagctggagttggagaagcagcaggcggtggatgagaccaagaagaagcagtggtgcgccaactgcaagaaggaggccatcttttactgctgttggaacaccagctactgtgactacccctgccagcaagcccactggcctgagcacatgaagtcctgcacccagtcagctactgctcctcagcaggaagcggatgctgaggtgaacacagaaacactaaataagtcctcccaggggagctcctcgagcacacaatcagcaccttcagaaacggccagcgcctccaaagagaaggagacgtcagctgagaaaagcaaggagagtggctcgacccttgacctttctggctccagagagacgccctcctccattctcttaggctccaaccaaggctctgttagcaaaaggtgtgacaagcaacctgcctatgccccaaccaccacagaccaccagccgcaccccaactaccccgcccagaagtaccattcccggagtaataaatccagttggagcagcagtgatgagaagaggggatcgacacgttccgatcacaacaccagtaccagcacgaagagcctcctcccgaaagagtctcggctggacaccttctgggactagcagtgaatcgggacacaaaccacccaccccattgggagaaaaacccagacgccaggaaaagaagaaacaacaaaggcaggagaacagccactttcagacttgaaaatgacaaaaccctcagttgagcctgagcccccggcgcgggggctgctacactacaggacacccagcatcggctttgactgcagactgttcacccacacgagccctgtgcttttggtgtaaataatgtacaatttgtggatgtcattgaatctagaggactttcccctttttatatttgtattaactttaacttattaaaaaaaaaaaaagaaaaagaaaaacratttaaaaaaaaaaaaaaaaagcaaccaaccccaacaacaaaaaagaatgttttggtattggagaagggatggtcagttagcctgtctgtcacacgacggaatggatactgggcccggggaccactttcatactcacgtcctcatccttggatacccaggggagggcgaaccgttttcgctcgtgtgtctgtacgcagcatgttgggatcgggagtttcggcacagactatcccatcaagccgttggctcctttcagctactacgttaccacgttcctaaaacgcaagctctccggaccagacggacacagggagaagctagtttctttcatgtgattgaaatgatgactctactcctaaaagggaaaaaacaatatccttgtttacagaagagaaacaaacaagccccactcagctcagtcacaggagagaacacagaaagtcttaggatcatgaactctgaaaaaaagagaaaccttatctttgctttgtggttcctttaaacacactcacacacacttggtcagagatgctgtgcttcttggaagcaaggactcaaaggcaaggtgcacgcagaggacgtttgagtctgggatgaagcatgtacgtattatttatatgatggaatttcacgtttttatgtaagcatgaaacacaggcagtatgagagaaagcaaggcccgtcatgctgtccgtacactacgtatgctgtagagccattttgtatgttgtgtaaaacaaaaagcattgatgaaaaagcaaaaggtgatgtatgtatatgagaaaattaattgtacgatatcattccagtacgttttgttgtacattttagtcttgtttactttctcttcattgttaagaggatgcgaactgtacagtttccagctagttacccatattagagaagaaataagagagtattagaagaaaacaggagagaaagaacatttgtgaattgcagttgtcaaaaaaaaaaatagcctagctggccttatttgtgaagcataattgcttttagcatatggaagtattttttcacattttctttgtataaaatttgtattaaacttaaatatctttttgatggtggtgtttctttgtgactgagccagtagactcacactatatgcttttttgggtttgcccgttccttcccccacccccccagttttttcagatttctttacctttttttaattaaactgttttggaaaaaaaaaaaaaa

SEQ ID NO: 430 - DNA, 1047 bp, Homo sapiens
atcgcataaaacttaaaactttacagtcagaggttcaattcctcttcttaacaacatacccatggccaacctcctactcctcattgtacccattctaatcgcaatggcattcctaatgcttaccgaacgaaaaattctaggctatatacaactacgcaaaggccccaacgttgtaggcccctacgggctactacaacccttcgctgacgccataaaactcttcaccaaagagcccctaaaacccgccacatctaccatcaccctctacatcaccgccccgaccttagctctcaccatcgctcttctactatgaacccccctccccatacccaaccccctggtcaacctcaacctaggcctcctatttattctagccacctctagcctagccgtttactcaatcctctgatcagggtgagcatcaaactcaaactacgccctgatcggcgcactgcgagcagtagcccaaacaatctcatatgaagtcaccctagccatcattctactatcaacattactaataagtggctcctttaacctctccacccttatcacaacacaagaacacctctgattactcctgccatcatgacccttggccataatatgatttatctccacactagcagagaccaaccgaacccccttcgaccttgccgaaggggagtccgaactagtctcaggcttcaacatcgaatacgccgcaggccccttcgccctattcttcatagccgaatacacaaacattattataataaacaccctcaccactacaatcttcctaggaacaacatatgacgcactctcccctgaactctacacaacatattttgtcaccaagaccctacttctaacttccctgttcttatgaattcgaacagcatacccccgattccgctacgaccaactcatacacctcctatgaaaaaacttcctaccactcaccctagcattacttatatgatatgtctccatacccattacaatctccagcattccccctcaaacctaaaaaaaaaaaaaaaaaaaactcgagggggggcccgg

SEQ ID NO: 431 - DNA, 3169 bp, Homo sapiens
  misc_feature (3167)..(3168): n equals a,t,g, or c
ggcagaggtggaaacttgcaaagatgtatgggtagaactaacccattctgacctctcaattaaggcctttaaatgtcttctgtccattatgcacttaaacttggaagggcttgggggccttgaaggcagggaagccctggccctctgcccaggtgacgggagccacctcctctgccgcaggactgacagctccttcagtttcatggcattcttctttaccttcatggctcagttggtcatcagcatcatccaggccgtgggcatcccaggctggggcgtctgcggctggattgctaccatctccttcttcggaacgaacattggctcggcggtggtgatgctaattcccactgtcatgttcacagtgatggccgtcttttccttcatcgccctcagcatggttcataaattttaccggggaagtggggggagtttcagcaaagctcaggaggagtggaccacaggggcctggaagaatccacatgtgcagcaggcagcccagaacgcagccatgggggcagcccagggtgccatgaatcagcctcagactcagtattccgccacccccaattacacgtactccaatgagatgtgaaccagccacgcctaccaggtggcagagctggggccattgggacagggggctcaagccacatcgtcatttgtggttaccaagcagggttcccccttcccttttctccttccctactttgtacaaaggaccagagttatatatatatatatatgtatatgtctgtaccccagcccccacctttcagattctgctcttggcactcagctgtgggctgcacgtggagctgtcccgtgcggtagtagctgtgtctgtgtcccctcgtgaaatagtgtgcagtggaggtctcttgtggtgctagatgtgtgtttagagctaaaccagcccccacccccaccctccacctgcccctcttgcctctggcccctctgaccctggcccagggacccctcacggggccaggggaggcatagcagaaagactggccccttcctagggttatgagctggaactgtttctactttcagtcttcctgggaagtaacagtacttagcactcttggtggtgggtgggagggtgggtacaggccagggatattcccttgctcttttgatccctccaggcctcgcctccttcagcctcctcctccctcatctgttccctgatgtcacattccctgtgcaatcttcccttgcccatggtctgtctatctctttcctatgtggcttttctttgtcttccccaaggctgagtgtcccagttttatctgctcctgagactgagcccagatccccaaatctaatctgatttacagttcaaggaagctgatggggagctgggccttacccctgatgtaggaggggcacacagctgggggtgcagagcccacctgggtacctgacccccaggggatgaaaatgcaaggatgagtctgcttgggcctgagagtttgatctgcaggggcaggctcatcttttctctcccctgccttctcctccttctctccccagagcccccttgagcccctctgcctatgtccctctgcctcctccccatgcccccagttgctgtggcttgattctgctaccctgaccccaccatgtgccaggtggcatctgccttactgccttccctgaggagctgggacatgctgggcagttgtcagatgtaaaggcacagctggagcagagggcatgtcagtaatgattggtccctggggaaggtctggctggctccagcacagtgaggcatttaggtatctctcggtgaccgttggattcctggaagcagtagctgttctgtttggatctggtaggacagggctcagagggctaggcacggagggaaggtcagaggagaaggcaggcagggcccagtgagaggggagcatgccttcccccaccctggcttgctcttggtcacagggcggttctgggcacttgaactcagggcccaagcagaagcacaggcccagtcctggctgcaagcacaatagcctgaatgggatttcaggttaggcagggtgggaggggaggctctctggctttagttttgttttgttttccaaatcaaggtaacttgctcccttctgcctacaggccttggtcttggcttgtcctcacccagtcggaactccctaccactttcaggagagtggttttaggcccgtggggctgttctgttccaagcagtgtgagaacatggctggtagaggctctagctgtgtgcggggcctgaaggggagtgggttctcgcccaaagagcatctgcccatttcccaccttcccttctcccaccagaagcttgcctgagctgtttggacaaaaatccaaaccccacttggctactctggcctggcttcagcttggaacccaatacctaggcttacaggccatcctgagccaggggcctctggaaattctcttcctgatggtcctttaggtttgggcacaaaatataattgcctctcccctctcccattttctctcttgggagcaatggtcacagtccctggtacctgaaaaggtacctaggtctaggcccttcttccctttcccttcctctcccctaccccagaactttggctccctttcccttctctctctggtagctccaggaggcctgtgatccagctccctgcctagcatccatgacctgttggatgttacctccaatcagtttcctgtcctacctgcctctttggcttggacctatatggccatgctctggctctacccttgggaagcctgatcccggtgtgtggcccagcttgttcaggccctgggatgctgcatctccaggcaactatgcactttcccggggagagaaccagtatgagaagtgggggcagggcacacattcatctttgtaggaaggtctggcctggggtcgggtgaaggagggcccaggtcagttctggggtcccagtgacctgctttgccattctcctggtgccgctgctgctccctgtttctggagctggatgttccccagctggcagttgagctgcctgagccaatgtgtctgtctttggtaactgagtgaaccataataaaggggaacatttggccctgtgaaaaaaaaaaaaaaaaaaaaaaaaaaaaaaaaaaaaaaaaaaaaaaaaaaaaaaaaaaannc

SEQ ID NO: 432 - DNA, 217 bp, Homo sapiens
ttctctgccctatatcgatctgtttcttgccgatttaaaacacgttgccgacgcgccgtttaaacagtggaccgacggtaacgccgccagagtgctggataacctgaaaaaactcgccgcagcgggcaaaaaaatcattatccgcgtgccgctgattcagggctttaatgccgacgaaacctctgtaaaagccattaccgattttgccgccgacgag

SEQ ID NO: 433 - DNA, 2731 bp, Homo sapiens
  misc_feature (2615)..(2615): n equals a,t,g, or c
tggtcccagtaggggtkgagcggragggatgatgccagcytgagctagccaggttctttgattagggcattggatgtgaaatgtaaaatgctctctccttttcttctatcagctgttcagaggagactcattacaactcctgctgaagctcctaatcttcttcccttctcttctaccctttccccctaccctcacttggcctgaagacgttctccccagagtttaccttgctcccctggtgctatgtgtatggtgaacctggcactatggccgcgtctgggactggccagacaactgctgctggctctccttattccaggaaggatttaaaggggaattgcactgcaggcaatgcaccagagcagcagcatcaggagcttggggagtaaggctcctctggcattattacacacatgcaaagctgaccgcaatgacagcagctgcttctttgaactgttggcagcagccaagcggcagcatgaagtgacagatcactcctgagctcaagatgaactccaccttggatggtaatcagagcagccaccctttttgcctcttggcatttggctatttggaaactgtcaatttttgccttttggaagtattgattattgtctttctaactgtattgattatttctggcaacatcattgtgatttttgtatttcactgtgcacctttgttgaaccatcacactacaagttattttatccagactatggcatatgctgacctttttgttggggtgagctgcgtggtcccttctttatcactcctccatcacccccttccagtagaggagtccttgacttgccagatatttggttttgtagtatcagttctgaagagcgtctccatggcttctctggcctgtatcagcattgatagatacattgccattactaaacctttaacctataatactctggttacaccctggagactacgcctgtgtattttcctgatttggctatactcgaccctggtcttcctgccttcctttttccactggggcaaacctggatatcatggagatgtgtttcagtggtgtgcggagtcctggcacaccgactcctacttcaccctgttcatcgtgatgatgttatatgccccagcagcccttattgtctgcttcacctatttcaacatcttccgcatctgccaacagcacacaaaggatatcagcgaaaggcaagcccgcttcagcagccagagtggggagactggggaagtgcaggcctgtcctgataagcgctatgccatggtcctgtttcgaatcactagtgtattttacatcctctggttgccatatatcatctacttcttgttggaaagctccactggccacagcaaccgcttcgcatccttcttgaccacctggcttgctattagtaacagtttctgcaactgtgtaatttatagtctctccaacagtgtattccaaagaggactaaagcgcctctcaggggctatgtgtacttcttgtgcaagtcagactacagccaacgacccttacacagttagaagcaaaggccctcttaatggatgtcatatctgaagtggctcagttacggggttcccgtgtgtgtgtgtgtgtgtgtgtgtgtgtgtattttatctctaagtattcctaattcactaggaaatctgggacagaatactttgactctaaacaatagcatacaaattattcgtatggataccttctaagtttgtagaaatggttttcaaaagtgcttgtgaattagaagactcaagatcatgaagacaaattgctcttgctctcaatttttgaaatgtcttggaaatgactacagttctcagatttaaaatgaataaagccatatctaacacctctttccagctggcatgactgaacctgagtgtgaaaagcgtcagcattttaaaaagtcatcactttcttgtcactttctgggctctttccagctatttgggcttcatatgcaattgatttcttctaacggaatagtaaaatataaatgaaaaggttttagaaattactttttatgtatgccaaagcataactacactgcaagtttcaacactgtcatttagaaagccaaatgttctgtgttttattctcttgagagaattctcagtagggtgaataatgtgamcacataaacattaattttagaattttacagtgaaccatgaagcaaaagtgcaatcaaattatacaatttatgaaaaactgagctactttttgtgccatgcttcacagagatctaaagatatgtgtgcgtagaagtaatcgtgtagtacttttgcccatgcctttgtgttatgtctatatttagaatatctgaattgttagatttctcttttacagcaaaatgtgcttaagctaaaaagtaattcagggaattcgatatcaagcttatcgataccgtcgacctcgagggggggcccggtacccaattcgccctatagtgagtcgtattacaattcactggccgtcgttttacaacgtcgtgactgggaaaaccctggcgttacccaacttaatcgccttgcagcacatccccctttcgccagctggcggtaatagcgaagaggcccgcaccgatcgccctttccaacagttgcgcagnctgaatggccgaatggccaaattgtaagcgttaatattttggtaaaaaatcgcggtaaaattttggtaaatcagcctcaatttttaaccaattaggccgaaaatccggcaaaatcc

SEQ ID NO: 434 - DNA, 590 bp, Homo sapiens
cggcacgagcctcatttgattccttctatttgcacaagtcaccttggactgcagggagctgttttgcaaaagcagtttagtaggcttagatctcaaattcatcttgagaacatttttttgaggtagtaatttcctcagaagactcttgtgttttgttttggtttttttttctgagctactcggactctttattagaacaatcaatcattttcctttggacctacaatttttgcctatgctgcagccactttgtgagtgagaatgaatatgtctgtgtgaacacacaggcatgcgtgtgtatgtgcacgtacatgggccagaatgaatggatgtgtgtgtgtgagggatacctcagatttttcttttcttattttgtgtgaaaatctcttttctacagattttccagggtttaagcattgcttgctgtataaaaaactttactgaattatatacagtttgaatgaaatgttattttaaaaacaaaacaattgttaagtgttccataaaggttatgttgaattttggtcagatgaatatttgtaagtaaaaaatatatgcatttctgaacctcaaaaaaaaaaaaaaaaaaa

SEQ ID NO: 435 - DNA, 1257 bp, Homo sapiens
atttcttatcagtgtaaccgtcagagaaaacgtgctccagcccaaaaaaacgttacaattgccgcccattactgaaaaccacagtaaagcgaggttttatgcgtaccgttttgaacattctgaactttgtgcttggcggatttgccaccactctgggctggctgttggcgactctggtcagtattgtgctgatttttaccttaccgctgacacgatcctgctgggagatcactaaactgtctctggtgccttatggcaatgaagctattcatgtcgatgaactgaacccggctggcaaaaatgtgctgctgaatactggcggtacggtattgaatattttctggctgattttctttggctggtggttatgcctgatgcacattgcaacgggcatcgcacaatgtatttcaatcattggcattcctgtcggcattgcgaactttaaaattgccgctattgcactatggccggttggtcgtcgcgtggtatcggtagaaacagcgcaagctgcgcgtgaagccaatgcacgtcgtcgttttgaataatccactaatatggcctttatgctaagtcctttgctcaaacgctatacctggaacagcgcctggctgtattacgcgcgtatttttattgcgctttgtggaaccacagcgtttccgtggtggctgggtgatgtaaaactgacgattccgctaacgctggggatggtggcagcggcgctgaccgatctcgatgaccgactggcgggacgtttgcgtaacctcatcattacgctgttctgcttttttatcgcctcggcctcagtagaattgctgtttccctggccctggctatttgcgattggcttaacgctctctaccagcggcttcattttgctcggcggtctgggtcaacgctatgcaacaattgccttcggtgcattgctgatcgccatttacactatgttgggaacatcactgtatgagcactggtatcagcagccgatgtatctgctggccggtgccgtctggtacaacgtcctgacacttattggtcatctgctgttcccggtccgcccgctgcaggacaacctggcgcgttgctatgaacaactggcgcgttatcttgagctcaagtcgcgcatgtttgatcctgatattgaagatcaaagccaggcaccgctgtacgatttggctctcgccaacggtctgctgatggcgacattgaatcagacgaaactctcgctgctgacccgcttacgtggcgatcgtggtcaac

SEQ ID NO: 436 - DNA, 731 bp, Homo sapiens
ggcacgagcagggctcacattcccagcctcacatcactcacaccttgcatttcacccctgcatcccagtcgccctgcagcctcacacagatcctgcacacacccagacagctggcgctcacacattcaccgttggcctgcctctgttcaccctccatggccctgctactggccctcagcctgctggttctctggacttccccagccccaactctgagtggcaccaatgatgctgaagactgctgcctgtctgtgacccagaaacccatccctgggtacatcgtgaggaacttccactaccttctcatcaaggatggctgcagggtgcctgctgtagtgttcaccacactgaggggccgccagctctgtgcacccccagaccagccctgggtagaacgcatcatccagagactgcagaggacctcagccaagatgaagcgccgcagcagttaacctatgaccgtgcagagggagcccggagtccgagtcaagcattgtgaattattacctaacctggggaaccgaggaccagaaggaaggaccaggcttccagctcctctgcaccagacctgaccagccaggacagggcctggggtgtgtgtgagtgtgagtgtgagcgagagggtgagtgtggtcagagtaaagctgctccacccccagattgcaatgctaccaataaagccgcctggtgtttacaactaaaaaaaaaaaaaaaaaaaaaaaaaaaaaaaa

SEQ ID NO: 437 - DNA, 1480 bp, Homo sapiens
  misc_feature (1465)..(1465): n equals a,t,g, or c
ggcacaggctgggactttgggctggctgcagtcttcggcacgaggccgaagtggctggctcatttaagatgaggcttctgctgcttctcctagtggcggcgtctgcgatggtccggagcgaggcctcggccaatctgggcggcgtgcccagcaagagattaaagatgcagtacgccacggggccgctgctcaagttccagatttgtgtttcctgaggttataggcgggtgtttgaggagtacatgcgggttattagccagcggtacccagacatccgcattgaaggagagaattacctccctcaaccaatatatagacacatagcatctttcctgtcagtcttcaaactagtattaataggcttaataattgttggcaaggatccttttgctttctttggcatgcaagctcctagcatctggcagtggggccaagaaaataaggtttatgcatgtatgatggttttcttcttgagcaacatgattgagaaccagtgtatgtcaacaggtgcatttgagataactttaaatgatgtacctgtgtggtctaagctggaatctggtcaccttccatccatgcaacaacttgttcaaattcttgacaatgaaatgaagctcaatgtgcatatggattcaatcccacaccatcgatcatagcaccacctatcagcactgaaaactcttttgcattaagggatcattgcaagagcagcgtgactgacattatgaaggcctgtactgaagacagcaagctgttagtacagaccagatgctttcttggcaggctcgttgtacctcttggaaaacctcaatgcaagatagtgtttcagtgctggcatattttggaattctgcacattcatggagtgcaataatactgtatagctttccccacctcccacaaaatcacccagttaatgtgtgtgtgtgttttttttttaaggtaaacattactacttgtaactttttttcttagtcatatttgaaaaagtagaaaattgagttacaatttgattttttttccaaagatgtctgttaaatctgttgtgcttttatatgaatatttgttttttatagtttaaaattgatcctttgggaatccagttgaagttcccaaatactttataagagtttatcagacatctctaatttggccatgtccagtttatacagtttacaaaatatagcagatgcaagattatgggggaaatcctatattcagagtactctataaatttttgtgtatgtgtgtatgtgcgtgtgattaccagggaactactaaaaaaaccaactgctttttaaatcctattgtgtagttaaagtgtcatgccttgaccaatctaatgaattgattaattaactgggcctttatacttaactaaataaaaaactaagcagatatgagttaaaaaaaaaaaaaaaaaaaaaaaaaaaaaaaaaaaaaaaaaaaaaaaaaaaaaaaaaaanaaaaaaaaaaaaaaa

SEQ ID NO: 438 - DNA, 885 bp, Homo sapiens
gggcactacaagtgcctttagtttgttctttaaagttcccagttccattactccaaaggttaagagatctgcctgccccgaaacacactcaattccctattattattgtctttggcaaccagcatcagagattaacactgtacatgccacctctgcacaaaagcaaaagcgtaagtccacgacagtgactctttgttattaattgttattgttattgttttggggagatccacattatcttgtcttcaagttaaaaacagtaattacgctgttcctgctgacaatgtcagtgatgagtatttcctgcacctacaatgtgaacacaggccaggcacctgctaaacgtcatatatacctgattataaagtcctgtgagctgagtactataatccctattttccaggtgagaaaaccaaggctcagacagagtaactttacccagcccacacagctggtaagtgagggcctgagattctgaatcccaggctgtagggtcccagcacctgtggccttccctcaagggacacagctccttatgaaaaaggaaaggagcagttccaattgcttgctcataagaaattaagtagatgaggaatgctgctccctttgggaggctgaagtgggaggatggtttgagcccaggagtttgagaccagcctgggcaacatagtgagacctcatctcttaaaaaaaaaaaagaaaaaattagcttgataatggtggcatatgcctgtagtcccagctacttgggaggctgaggcacgaggatggcttgagcctgggaggtcaaggctgcagtgagccgagattctgccattgcactccagcttggaagacagagtgaaaccctgtctcaaaaaaaaaaaaaaaaaaaaaaaactcgta

SEQ ID NO: 439 - DNA, 1174 bp, Homo sapiens
  misc_feature (198)..(198): n equals a,t,g, or c
  misc_feature (1174)..(1174): n equals a,t,g, or c
tagstttgcaaaagctatttaggtgacactatagaaggtacgcctgcaggtaccggtccggaattcccgggtcgacccacgcgtccggcggctcgtgccgggtgatgctaggcggctccctgggctccaggctgttgcgaggtgtgggtgggagtcgagggcagttcrggkcscgrggtgtccgcgaaggtggcgcanccatggcggcaggggagagcatggctcagcggatggtctgggtggacctggagatgacaggattggacattgagaaggaccagattattgagatggcctgtctgataactgactctgatctcaacattttggctgaaggtcctaacctgattataaaacaaccagatgagttgctggacagcatgtcagattggtgtaaggagcatcacgggaagtctggccttaccaaggcagtgaaggagagtacaattacattgcagcaggcagagtatgaatttctgtcctttgtacgacagcagactcctccagggctctgtccacttgcaggaaattcagttcatgaagataagaagtttcttgacaaatacatgccccagttcatgaaacatcttcattatagaataattgatgtgagcactgttaaagaactgtgcagacgctggtatccagaagaatatgaatttgcaccaaagaaggctgcttctcatagggcacttgatgacattagtgaaagcatcaaagagcttcagttttaccgaaataacatcttcaagaaaaaaatagatgaaaagaagaggaaaattatagaaaatggggaaaatgagaagaccgtgagttgatgccagttatcatgctgccactacatcgttatctggaggcaacttctggtggtttttttttctcacgctgatggcttggcagagcaccttcggttaacttgcatctccagattgattactcaagcagacagcacacgaaatactatttttctcctaatatgctgtttccattatgacacagcagctcctttgtaagtaccaggtcatgtccatcccttggtacatatatgcatttgcttttaaaccatttcttttgtttaaataaataaataagtaaataaagctagttctattgaaatgcaaaaaaaaaaaaaaaaaaaaaaaaaaaaaaaaaaaaaaaaaaaaaaaaaaaaaan

SEQ ID NO: 440 - DNA, 327 bp, Homo sapiens
atggggcccagcacccctctcctcatcttgttccttttgtcatggtcgggacccctccaaggacagcagcaccaccttgtggagtacatggaacgccgactagctgctttagaggaacggctggcccagtgccaggaccagagtagtcggcatgctgctgagctgcgggacttcaagaacaagatgctgccactgctggaggtggcagagaaggagcgggaggcactcagaactgaggccgacaccatctccgggagagtggatcgtctggagcgggaggtagactatcttgagacccagaacccagttttgccctgtgtagagttt

SEQ ID NO: 441 - DNA, 553 bp, Homo sapiens
aaaagaagcgggagaatctgggcgtcgctctagagatcgatgggctagaggagaagctgtcccagtgtcggagagacctggaggccgtgaactccagactccacagccgggagctgagcccagaggccaggaggtccctggagaaggagaaaaacagcctaatgaacaaagcctccaactacgagaaggaactgaagtttcttcggcaagagaaccggaagaacatgctgctctctgtggccatctttatcctcctgacgctcgtctatgcctactggaccatgtgagcctggcacttcccacaaccagcacaggcttccacttggccccttggtcaggatcaagcaggcacttcaagcctcaataggaccaaggtgctggggtgttccctcccaacctagtgttcaagcatggcttcctggcggcccaggccttgcctccctggcctgctggggggttccgggtctccagaaggacatggtgctggtccctcccttagcccaagggagaggcaataaagaacacaaagctgttaaaaaaaaaaaaaaaaaaa

SEQ ID NO: 442 - DNA, 789 bp, Homo sapiens
  misc_feature (540)..(540): n equals a,t,g, or c
  misc_feature (552)..(552): n equals a,t,g, or c
  misc_feature (787)..(787): n equals a,t,g, or c
ggcagagtaaaaatgatatatagtgttgttggtgattttggtttgttgttattacttctatattccaggtatctaggaaaatatcatgtttttaatatcagtctcttgaatgcttaccattatagaaaggagaggtctgggtcatgctgatgatcctcaagatctaatcagtgaacgcgattttcctataggagctcccagaagatgggccaaccaggaccctcaggagatagtgatttggctacagcactgcatcgccttagcttgcgtcgacaaaactatttaagtgagaagcagttctttgctgaagaatggcagcggaagatccaggttctggcagaccagaaggaaggagttagtggctgtgtcaccccgayagagagccttgcctctctctgcaccacccagtcagagatcacagacctcagcagtgccagttgccttcgaggttttatgccagaaaaattacaaattgtcaagccccttgaaggatcacaaactctgtatcactggcagcagcttgctcaaccaaacttgggnaaccatccttgnatccacgaccaggtgtcattactaaaggctttacccagttgcccggggatgctatttatcacatctcagatttagaagaggatgaaagaggarggtattacttttcaggttcagcaacctcttgaagtggaagagaaactttcaacatccaagccagtaagcagggatcttcctgccacccattacttcagcaggtggaccagttacagttgcaaccggcaacccaggaaagtgnct

SEQ ID NO: 443 - DNA, 1078 bp, Homo sapiens
aagctggcacgaggaagggtgatgtggctgcggcatcgccggcctcgctatgtctgccattttcaattttcagagtctattgactgtaatcttgctgcttatatgtacctgtgcttatattcgatccttggcacccagcctcctggacagaaataaaactggattgttgggtatattttggaagtgtgccagaattggtgaacggaagagtccttatgttgcagtatgctgtatagtaatggccttcagcatcctcttcatacagtagctggggaaaatgccagaatgtagttgccatcagatttgattgtgaacaaggactgactgcagaaaataatggaaaggatgtttaactcttttatctccgaacattgaatgagataaatttccagatgctgttctctattttaatgttattggaccaatgttctgtataaacaattaagatgtaaccatttaatagtctgtaacaatcaacctcagtactgtcactacaatattacattctgcaaatgttattctgttgtatcagatacaaaattttagtgaggtatctctaaggcacatagtagaaaacaaaattggttaattactcaagttcctttcactgtgatttggaaatgatttaatctttatagaatgagaaccttttttggactagcttttttattaaaatggctcaatttgtgttgataaggattgcattaatatttaatagtgcttgcttttcctctgggcacaccattttgatcattaaccagagtacctctactcttagcaaactctagtttatgacaagtatttaaaatatttaaaacaagcttatgcagttcttaaggacgaaggtaaatgagatgtaacttaaaaatagtattgggaaaatgttgatagttaacattagtggatttagactagccaaatgacatagtaggctctgaaacatcttgtcaagtatatgtattttgtgcatgaatttttgctggaaagctgtctttctctgaaaaacacaacgttcttagaatgaaaagaacaattataaaataattatcctaaaaaaaaaaaaaaaaaaaaaaaaaaa

SEQ ID NO: 444 - DNA, 864 bp, Homo sapiens
gaattcggcacgagggctgaagacacaggccaggcggaatgaagatgatggtggtcttgctcatgctgtcctcgctcagccggctcctgggcctcatgaggccatcatctctcaggcaatacctggactctgtgcccttgccaccctgccaggagcaacagccaaaggctagtgccgagctagaccacaaggcctgctacctgtgccacagcttgctgatgctggccggggtagttgttagctgccaggacatcactccagaccagtggggcgagctgcagctgctgtgcatgcagttggaccgccacatcagcacgcagatccgggagagcccccaggccatgcaccgcaccatgctcaaggacctggctacccagacctacatccgttggcaggagctgctgacccactgccagccccaggcccagtatttcagcccctggaaagacatctaaagggacagggtcagggcagcccagggctcctggcttcagcaggaagtgaacaggctcagggaactggaggaagcgaagcatcaaggccagaggaggccacatgctgaccagcctgatgaggcaagagcctgcccctgccaccgccccgacccctctcctctctgcaagagcctgcctctgccaccgccccgaccccctctcctttcagcaagggatgggcctctctgcctcgcccacccctcagccctcctcccagccatctcctcttccctaaggcctctgtctccatagctctggtttccctgggcctcagtcctccccaccctccttcctctgtctccctgtcactaatgtgaggtttctttgtgcacattaaagtcttctttcagcaaaaaaaaaaaaaaaaaaa

SEQ ID NO: 445 - DNA, 523 bp, Homo sapiens
ggcacgagctggaacactccagcccccactcagagtccagaagaagtcagaaggctacacctatgtacctccttcatggacatgctgaaggccttgttcagaacccttcaggccatgctcttgggtgtctggattctgctgcttctggcatctctggcccctctgtggctgtactgctggagaatgttcccaaccaaagggaaaagagaccagaaggaaatgttggaagtgagtggaatctagccatgcctctcctgattattagtgcctggtgcttctgcaccgggcgtccctgcatctgactgctggaagaagaaccagactgaggaaaagaggctcttcaacagccccagttatcctggccccatgaccgtggccacagccctgctccagcagcacttgcccattccttacaccccttccccatcctgctccgcttcatgtcccctcctgagtagtcatgtgataataaactctcatgttattgttcccagaaaaaaaaaaaaaaaaaaaaaaaaaaaaa

SEQ ID NO: 446 - DNA, 1927 bp, Homo sapiens
gtttggtgtgaggctgcgagccgccgcgagttctcacggtcccgccggcgccaccaccgcggtcactcaccgccgccgccgccaccactgccaccacggtcgcctgccacaggtgtctgcaattgaactccaaggtgcagaatggtttggaaagtagctgtattcctcagtgtggccctgggcattggtgccgttcctatagatgatcctgaagatggaggcaagcactgggtggtgatcgtggcaggttcaaatggctggtataattataggcaccaggcagacgcgtgccatgcctaccagatcattcaccgcaatgggattcctgacgaacagatcgttgtgatgatgtacgatgacattgcttactctgaagacaatcccactccaggaattgtgatcaacaggcccaatggcacagatgtctatcagggagtcccgaaggactacactggagaggatgttaccccacaaaatttccttgctgtgttgagaggcgatgcagaagcagtgaagggcataggatccggcaaagtcctgaagagtggcccccaggatcacgtgttcatttacttcactgaccatggatctactggaatactggtttttcccaatgaagatcttcatgtaaaggacctgaatgagaccatccattacatgtaccaaacacaaaatgtaccgaaagatggtgttctacattgaagcctgtgagtctgggtccatgatgaaccacctgccggataacatcaatgtttatgcaactactgctgccaaccccagagagtcgtcctacgcctgttactatgatgagaagaggtccacgtacctgggggactggtacagcgtcaactggatggaagactcggacgtggaagatctgactaaagagaccctgcacaagcagtaccacctggtaaaatcgcacaccaacaccagccacgtcatgcagtatggaaacaaaacaatctccaccatgaaagtgatgcagtttcagggtatgaaacgcaaagccagttctcccgtccccctacctccagtcacacaccttgacctcacccccagccctgatgtgcctctcaccatcatgaaaaggaaactgatgaacaccaatgatctggaggagtccaggcagctcaccggaggagatccagcggcatctggatgccaggcacctcattgagaagtcagtgcgtaagatcgtctccttgctggcagcgtccgaggctgaggtggagcagcttcctgtccgagagagccccgctcacggggcacagctgctacccagaggcccctgctgcacttccggacccactgcttcaactggcactcccccacggataaaattgtccatggaccacgtgtgccttggtcactactgaagagatggctgctgggaaagcttttccaagtgtgagcgccccaccgactgtgtgcttgatcagagactggaagaggtggagtgagaaagtctcccgtgttcgggcccttcctgggggagcccccggtccaagggcttcgctccaggaccttcttcacaaggatgactggttcgctgttacctgtttccccagtctttttctgaaaaaactacaaattagggtgggaaaaggtctgtattgagaagggtcatatttgctttctaggaggtttgttgttttgcctgttagttttgaggagcaggaagctcatgggggcttctgtagcccctctcaaaaggagtctttattctgagaatttgaagctgaaacctctttaaatcttcagaatgattttattgaagagggccgcaagccccaaatggaaaactgtttttagaaaatatgatgatttttgattgcttttgtatttaattctgcaggtgttcaagtcttaaaaaataaagatttataacagaacccaaaaaaaaaaaaaaaaaaaaaaaaaaaaa

SEQ ID NO: 447 - DNA, 848 bp, Homo sapiens
ggcacgaggttctagctactctgttctatataggctacacttgcaaatcaaattcctctgtcaatgaccttcaatgctatctctaagaaattcctccaggagtctgtctgtcccatgctagaagcctcagaactgtgcctctgtgtttttatcctggacacaatctgcctagaaggtcttccccaaactcgtgtcagctgaattcatacctggtatctctctcccccagcttagtgtaaacttagtgcagggactttatcttgcctcaccaatgtcttcgccacccaagaataatgcttggcacacaagagggggccaatacatttttatgaaatgaatgtagacttaggatatgtgtctgttttttgatatgtttcctgagtggtcagtgttcttccccaggattccctgactccaaaccagccctctgttagggacaaactgcccaagaaaccttcttggtgctgtccacccatcccccaagcctctttacatttctaagcccttacctaggcaccacggtgaagccagcagactttgcttatcagaccttgctgcaataagcaaaccccaattacaaaccacccacactgcacagggggaggtcatgggaaacataaacaaactttacctacaccctcctgtaataaacgtcacaaggtaatatgtagcaaaattaaccagcaaacaaccccaggatgcggccatacgaaagaactccatcaaactcccctccccaatataaacccctcattctgtaagcttggggctacttcctctctgactgttaagggagcagccagcaggttaataaaaagttacctgcctaaaaaaaaaaaaaaaaaaaa

SEQ ID NO: 448 - DNA, 1592 bp, Homo sapiens
  misc_feature (1569)..(1569): n equals a,t,g, or c
gcccaagggaaaagtgaaccagctcttcagaggakgagagcatcttaaacagacgagatggatgagctggctcttggcttgcaggctaatcttgctgatctctctcttaggaaaaacagacgacgcaaaggtgtctgagaaaggaaggctttctcctaaagcctcccaggtgaagcgctccccatcagatgcaggccggagcagtggtgacgaatccaaaaagcccctccccagcagctctaggacacctactgccaatgccaacagctttgggttcaagaagcagagtggttccgccgccggcctggccatgatcacagccagcggggtgactgtcaccagcaggtcagccacactgggcaaaatcccaaagtcatctgcactcgtcagtcggtctgctggtcggaagtcaagtatggatggggctcagaatcaggatgacgggtatctagccctaagctcccggacaaaccttcagtaccggagtttgccgaggcccagtaagtccaacagccggaacggggctgggaacaggtctagcaccagcagcatagattccaacattagcagcaagtccgcaggcctgccagtgcccaaactgagggagccttccaaaacagccctaggcagctctctaccaggtctggtcaaccaaacagacaaggagaaaggcatctcatcagacaacgagagtgtggcttcctgtaactcggtgaaagtgaatccggcagcccagcctgtgtccagtccggctcagaccagtctccagcctggagccaagtacccagatgtggcctctcccacactccgcaggtaagtgagtacataaatggtgcagagcagaaccagaatacagggaatggatttagtaatttcctgtttcttagttgaagcaccctctgtttttctccactttagtcctccagtaaagctgttttgtcagatcaggccggcagttttgcagttgactattttcccatgttgggatgaaaaacttaggcctctggaatcaatcatcttagaatcaaatcttaggtccattttaattagctgccatataaccttttttaacaattctgccttagtttcctcacctgtaaaatggggatgaagatacttttttgkcagggtttttgtaaagatacatctttgtagctgtgtctggtcgtagtatgcactcaatagaagttagctactgctgggcaccgtgctcacgcctgtaatcccagcactttgggaggccaaggcgggcagatcacgaggtcaggagttcgagaccagcctggccaatatggtgaaaccccgtctctactaaaaatacaaaaaaattagcctggcatggtggtatgcacctgagtcccagctactcaggaagctgaggcagaagaatcacttgaacccaggaggcggaggttgcagtgagccaagatcacaccactgcactccagcctgggcaacagagcgagactccatctcaaaaaaaaaaaaaaaaaaaaaagcaatcaaataataaatctattctgctaagagatcaaaaaaaaaaaaaaaaaaaactcgaggggggcccgncccaatcgccaaatagaagccaa

SEQ ID NO: 449 - DNA, 1738 bp, Homo sapiens
ggcacgaggaaaaggcaagtcactctgtatgtccctttccatctgacacactcacaggggcctgggatgctagtgtgtgcccattggttggcttctgccaggaattggagcctgggtgtgctaggtgcagagtctcctgatatcgcagagagcccctgttctcaatggaagtgcaacagagtagagtctagacagagtattagaaactttcaggataataatcatgataatagccagtggtttttgaatgctttttctgttctgggtagtgttctcagtgcttatatgcattatctcatttaactttcctatcaaccctatgatgaggcactgtgattatctgcattttatagtgaggtggctgagacacagagacgctaagtaacttgcccaaggtcacatatctgactagtagtaaagctgggttctgggcttgtttttactttcaagaattgagtcaaatgtagtcccacttcattaagctgctgggatgggaggagcaggaggggcagggcctggatgggtgaagcagccaagaggctcctatgtaacttcctatgaagaggtagttgtctccaaacatgtggaaacaaattgagaatgttctgcttgtattcaagctgaaagacattttcattcttattgggtttgcatcaaattctcattttgctagtcttatacattagagtatcaaccaatggtcccatgtagctttaacaaatgatctaataaattgagagaagcattggccagagaaagttggagtgcttggaacaggccttggctggctgtccagctccacctgggggagacgggaggtgtgagctggcactaagaggccctctgcctgtctaacttggaccagggttgcttggggctaaaagagagcccaaaatgttcatagcagcattattcacaatagtcaaaagtggaaagaactcaagcatccaccaatcaatgagtaaatgaaatgtggtgtatctatacaatggaatattattcagccataaaaaaggaatgaagtgttgacctatgctactacattgatgaacctgaaaacattatgctaaggggaaaaagccagatgcaaaggccacatattgtgagattctgttttggtgaaatgtccagaataggcaagtccatagaaagtgaaagcagatttatggtttctaggagctggaaggtggcggggagtctggagtgactactaattggtatgagggttctttttggggtgttgaaaatgttctgaaattagatagtgatgatgattgcacaactttgtgtatatacaaaaaactactgaattctacactttaaagggtgaatattatggtatatgaggtatatgaattacatctcaataaaaacaggcaaacaaacaaaaaccagaacaacagcaacaaaaaagagaacacaaagtccacactattaagacccagagcaaaacaccgtcttggccggacgcggtggctcacacctgtaatcccagcactttgaggggcggagacgggcggatcacaagatcaggagatcgagaccatcctggctaacatggtgaaaccccgcctctactaaaaatacaaaaaattagccgggcgtgttggcaggtgcctgtagtcccagagctactcgggaggctgaggcaggagaatggcgtgaacccaggaggcagagcttgcagtgagcctcgtgccgaattcgatatcaagcttatcgataccgtcgacctcga

SEQ ID NO: 450 - DNA, 359 bp, Homo sapiens
  misc_feature (273)..(273): n equals a,t,g, or c
  misc_feature (336)..(336): n equals a,t,g, or c
  misc_feature (342)..(342): n equals a,t,g, or c
gaattcggcacgagttgctcgttacctgggtgatgggatcatccgtatcccaaacctcagcatcatgcaatatacccatgtaacaaacttacacatgtacatgctaaatccaaaataaaagttgaaattatttttttcaaaaggtgagttaaaatgagttaaggattaatcaccactggaaaaggtttgttatatttactatttttactacatattatttactatttattattccctatatcctccatatatttatatacttgattaaaatgnatatgattggaattgaaaattggctagcaaacacattgtttttgtttttgttttgttttttcngttggngacaagggttttcggtc

SEQ ID NO: 451 - DNA, 1713 bp, Homo sapiens
  misc_feature (9)..(9): n equals a,t,g, or c
  misc_feature (42)..(42): n equals a,t,g, or c
  misc_feature (53)..(53): n equals a,t,g, or c
  misc_feature (918)..(918): n equals a,t,g, or c
  misc_feature (1600)..(1600): n equals a,t,g, or c
ccttacaangactttcccaccagtaaagattgttacaatgtnaggtaaggaanacagtgtggaactatgtccacgaatagttaatacagtatacagtattaagatagtttttctggtctctaaagaaatggtactttagaattcagtgtgtctcagaaataattctgaccattaagtaaacatcaaaattttaataaataacataaatgaaaaaacaaacaccttttaaaaattgcttatacctaacaaaacaatttctttgatgaagggtctggttggctttatcttggcagtgttcatttttatacaatttttgaattgcatttactccattctgatgaaattccacctctttggaatcacagaagagatgaaaccaatactgctacaatattgtgccttcctgaaatgcttctatccacttctgagccgaatgagcatcctctgctttgaatacataaataacatgtttttgtgcagtaactgaaatacttagactcggaattctcatctttaacttgaataacagtgaatcctaataaaggctgactctccaaagcggccacgtcctcacttgcagcatatgtatatagtactttattttttatgacaaaccaaaagtgtttccagggttttttattgccctttgatctgtacaagtagccactcatagaagaatcctctgtgtttgctgatacttctttgagagcagctgggatttttttctgtttcctccctgatggaatgctatgtaagactgatgataaggcacttgaaggagatttgtgatttccaggagatccaatcctaggggaktgctggtgatctaatytctgcagttcttggaaacaatgttcacatactcttgctggttgatttttcaggtaatctaagccatacttattagacgaacaagcntggcatacaatctttccacaggcccggcagtggtgtcgtctccaggtgagagtgaattcgcttgtgcagatcatacacattgtggctctggtatcaggaatccagatgggagccttcgatccaagaggactaacttcttctttattttctgagtctgcctcatcaagactcctactaggacagaaggtgattcttttcttggcatactcttctattgccctggaaatcgcttctagccattcatccctttctgtggcagaactggctgagagaatgaaggaacgttctacactttcaatctttaattcattctgataggcttcttgggtaggttttctgaccttcattccagccagtgagagcatgttgttcagtttatacatccccagactgcactggtgttgtatacagcagggcatcattaaacaggaaaaacattcgaggttgcatcactttccgagacagcttcatcagaattccttctttgagaaaaacccgaccaggctgcacaatttcatggtgtccatttaagctgtactgaatttgcataagtttctgaaagttgtctccttgcttcatggtgtcattggcgtggttggctacctctataacaacagcaagggcatcttgagtgtctctgtaatctccagcatcttctatgagattcttcaaataatctgtncagcaacagcctgtactgggggatcctctgaaccggcttgagcaggtagtgcttgagggccagatctcgtgccgaattcgatatcaagcttatcgataccgtcgacctcgtag

SEQ ID NO: 452 - DNA, 1274 bp, Homo sapiens
ttgattgccgccggaattggtctggttgtccagaacacgctgatggtgcgcatcacccagacctcctctaccattctcatcgccatgttgctgaactcactggtggggattgtgctctttgtttctattttatggtttaaacaaggcatggcggggtttggcgaactggtgtccagcgtgcgctggtggacacttatacctggcttgctgggatcgttttttgtcttcgccagtatcagcggatatcagaatgtgggagcggcgacaactattgctgtactggtcgccagtcagctgattggcggtctgatgctggatatcttccgcagtcatggcgtaccactacgggcgttgttcggcccaatttgtggcgcaattttacttgtggttggcgcctggttggtagccagacgctcattttaatcagaggatggtgccgcctttggttaactgttcgtggcgcgcttccatatcttctttatgcttgcgaccgtgatgggcgatcgctgtgcgcagacgttgctgctgggtgtagcgatcttcccgacttaactccgcgtcatcgctcagggcgattaataattcgttcatatgggcaatgacgctctcttcaatcgcggcatccacgcgcgcgatgacttcatccagatgcgacatactttctccttagccacttgtgaaatttatcgattcatccaaatgatataagtctgcgtggtgccgtcaagccagtgagtaagatttaaaacagtgaaaacaacagcgccaccgggaaactcatcggccatgttgcccccaccagaaaggcgcttaagaaacggatgcgtttcttatcgtgagaaagaaaccaggtgataagaaatgcgattgctgccataaccgcataaaaaacaagcatgtgttgatagagagacatgtacgggcgtccagccagatgaataaaacgcgcgcaaatatgcgtcattttttgacgtgcatcaagttttttcaccagtttgagaaaaaatcatcaaacagcaacttgcccttatccatcttcagaatgagtattattgcggattttcttaacccgtactatacacataggggcaatgataaaaggtggcaaaaatgaatgtttccagtagaactgtagtactgataaatttctttgctgctgttggtttgtttactcttatctctatgagatttggctggtttatttgatgtagtgattttgcacgcagcacgtactgtcagagaaattcgatatcaagcttatcgataccgtcgac

SEQ ID NO: 453 - DNA, 605 bp, Homo sapiens
gttccatgttctgcatgtagtctgtcagagacttgatcttggcttcgtgctgggagatgagcagctggcaggctgccagctcccgctcgctggcattcatcttcctgttggagtccatctgggcgctctcgagctgtttgctgcggttcaccagggacttgacctctgacttcatcttgctgatgtacaggcgggccatggtaaactcctcctcaatgactccattcacatctgccaaagttttcacatcattggtgccaataattccacctatctcccccagatctttcaacagcaaattcaggatctcagttgcccttttcttctggtggttgctaagctcttgtagctggctcagctctctctgtgtggttgtcaatgtagtcgttttctgggccagctcgtctgtcagctgctcattggcccgggtcttatcctccacttcctgtgatttctggtcataattgacagccagctcctccagggcctggagaacttctttcacctcatccttggctgcctcattttcaatctggagacgtgtcagctcctcctgtatcttctctcgtgccgaattcgatatcaagcttatcgataccgtcgac

SEQ ID NO: 454 - DNA, 685 bp, Homo sapiens
  misc_feature (29)..(29): n equals a,t,g, or c
  misc_feature (40)..(40): n equals a,t,g, or c
  misc_feature (51)..(51): n equals a,t,g, or c
  misc_feature (57)..(57): n equals a,t,g, or c
  misc_feature (62)..(62): n equals a,t,g, or c
  misc_feature (651)..(651): n equals a,t,g, or c
  misc_feature (663)..(664): n equals a,t,g, or c
  misc_feature (677)..(677): n equals a,t,g, or c
  misc_feature (685)..(685): n equals a,t,g, or c
aacacctatgaccatgaattacgcccaanctcgaaattancccctccactnaagggnaaccnaaagctggagctccaccgcggtggcggccgctctagaactagtggatcccccgggctgcaggaattcggcacgagcagccttctcagcagctgggattacaggcatgcaccgtgatacctggctaatttgttttgtatttttagtagaggtggggtttcaccatgttggccaggctggttccgaactcctgggctcaagcaatccttaggcctctgcctctcaaagtgctgggattacaggcatgagccaccacgcccggatggattttcttttatttgtctgtctttggataatgtattttcatattacaacgtgctttaattttcctgggcaacatagtgagatctctattttaaaaaaagtagaaattgaaatgcacaatagttaacgttgagaccattatttttgggtctttacaaagtttagtttcttgccatccaataacaacttattgaagttactaaattttgttttccaatttaatggcagaaggactgtgtgtgtgtgtgtgtgtgctcgtgccgaattcgatatcaagcttatcgataccgtcgacctcgagggggggcccggtacccaattcgcccnatagtgagtcanngacatcaaagggncttcaaan

SEQ ID NO: 455 - DNA, 2235 bp, Homo sapiens
  misc_feature (1255)..(1255): n equals a,t,g, or c
ggaatctctggcaggtctgtgtgttctgtcacttgctcgcccgagcagtggctttgctggtcatcccggtcgtcctgtacttactgttcttctacgtccacttgattctagtcttccgctctgggccccacgaccaaatcatgtccagtgccttccaggccagcttagagggaggactagctcggatcacccagggtcagccactggaggtggcctttgggtcccaggtcactctgaggaacgtctttgggaaacctgtgccctgctggcttcattcccaccaggacacctaccccatgatatatgagaacggccgaggcagctcccaccagcaacaggtgacctgttaccccttcaaagacgtcaataactggtggattgtaaaggatcccaggaggcaccagctggtggtgagcagccctccgagacctgtgaggcacggggacatggtgcagctggtccacggcatgaccacccgctccctgaacacgcatgatgttgcagcccccctgagcccccattcacaggaggtctcctgctacattgactataacatctccatgcccgcccagaacctctggagactggaaattgtgaacagaggatctgacacagacgtctggaagaccatcctctcagaggtccgctttgtgcacgtgaacacttccgctgtcttaaagctgagcggggctcacctccctgactgggggtatcggcaactggagatcgtcggggagaagctgtcccggggctaccacgggagcacggtgtggaacgtggaggagcaccgatacggcgcgagcaggagcagagggagcgggaacgggagctgcactcacctgcgcaggtggacgtcagcaggaacctcagcttcatggcgagattctcggagctgcagtggaggatgctggcgctgagaagtgatgactcggaacacaagtacagctccagcccactggagtgggtcaccctgggacaccaatattgcctactggctgcaccccaggaccagcgctcagatccacctacttggaaacatagtgatctgggtttcgggcagcctcgctctggccatctacgccctgctgtccttgtggtacctgctccgacggcgaagaaatgtccatgacctccctcaggatgcctggctgcgctgggtgctggctggggcgctgtgtgccggtggctgggcagtgaactacctcccgttcttcctgatggagaagacactcttcctctaccactacctgcccgnactcaccttccaaatccttctgctccctgtggtcctgcagcacatcagcgaccacctgtgcaggtcccagctccagaggagcatcttcagcgccctggtggtggcctggtactcctccgcgtgccacgtgtccaacacgctgcgcccactcacctacggggacaagtcactctcgccacatgaactcaaggcccttcgctggaaagacagctgggacatcttgatccgaaaacactagaacaagagtgtggcaaagaacacccgtgctggggtcgggacgaggttgaagggtcttggtcaatgtacgtaatgagcagggtgggccccacgctgggaggacacgggctgggctgagcagggcctctagtggaacacatgggggtctcattgaaaagctctctgatgagcacctccttttgtgcaaagttaattttttctcgacaataaagatattccgtgtcttcacccctgaactaagacacagggagtatttcagaggccagcgtaggagtcatcgacaacgaaaagccgagaacccagggccagcagtggagcctcagcagaccagggcctggtccttgctaattgctgcagggtggagtttgatctggcagacccgatcctccttcatgaacacccagcaacctgagcaagtcccggccctgccctcagcgagcccggcaggcgtcccgggacagctcagtgttggagggccacctgaaccacgagccagggctggggcttgcatgtcattgtctatgacagcgtcaagactggcccttggcaccgtgctgtgtggaaaccctcccctctgagactccactgagacgtggctgagtgaaatcttcctcgtcagtggtcaaggtgtgtcatccatacagctccatgcctttgtcttttttaaatgtaattaaaaaaggaaccaactggmaaaaaaaaaaaaaaaaaaaaaaaaaaaaaaaaaaaaaaagggcggccgc

SEQ ID NO: 456 - DNA, 1096 bp, Homo sapiens
aaaaatatcggttcatcaaagggagtcgtcatgcatttacgtcatctgttttcatcgcgcctgcgtggttcattactgttaggttcattgcttgttgtttcatcattcagtacgcaggccgcagaagaaatgctgcgtaaagcggtaggtaaaggtgcctacgaaatggcttatagccagcaagaaaacgcgctgtggctcgccacttcgcaaagccgcaaactggataaaggtggcgtggtttatcgtcttgatccggtcactctggaagtgacgcagcgatccataacgatctcaagccgtttggtgccaccatcaataacacgactcagacgttgtggtttggtaacaccgtaaacagcgcgtcacggcgatagatgccaaaacgggcgaagtgaaaggccgtctggtgctggatgatcgtaagcgcacggaagaggtgcgcccgctgcaaccgcgtgagctggtagctgacgatgccacgaacaccgtttacatcagtggtattggtaaagagagcggatttgggtcgttgatggcgggaatatcaaactgaaaaccgccatccagaacaccggtaaaatgagtaccggtctggcgctggatagcgaaggcaaacgtctttacaccactaacgctgacggcgaattgattaccatcgacaccgccgacaataaaatcctcagccgtaaaaagctgctggatgacggcaaagagcacttctttatcaacattagccttgataccgccaggcagcgtgcatttatcaccgattctaaagccgcagaagtgttagtggtcgatacccgtaatggcaatattctggcgaaggttgcggcaccggaatcactggctgtgctgtttaaccccgcgcgtaatgaagcctacgtaacgcatcgtcaggcaggtaaagtcagtgtgattgacgcgaaaagctataaagtggtgaaaacgttcgatacgccgactcatccaaacagcctggcgctgtctgccgatggcaaaacgctgtatgtcagtgtgaaacaaaaatccactaaacagcaggaagctacccagccagacgatgtgattcgtattgcgctgtaatagatat

SEQ ID NO: 457 - DNA, 953 bp, Homo sapiens
  misc_feature (3)..(4): n equals a,t,g, or c
  misc_feature (937)..(937): n equals a,t,g, or c
  misc_feature (944)..(944): n equals a,t,g, or c
cgnnctactttttctacatgctttttttacgctatcccttgaaaaaatggtggaaagtacgtgtcgaacgtgtaggtatcccgatgttaacagccatccccctactgacattaccgcaatttattatgctgcaatatgtcaaaggaaaagcggaaagttggcctgggctgtcattgtatgacaaatataatacgttggcctgggaattaatatcacacctgtggtttttactggtgttagtggtcatgacgacgctgtgcgtatggatatttaagcgcatcagaaataatttagaaaattctgataaamcgaataaaaaattctcgatggtaaaactatcggtgatttttttatgcctcggcatcggttatgcggtaataagaagarcgatttttattgtgtatccgcccattctgagtaatggcatgttcaattttattgtcatgcaaacgctgttttatttgccgttctttatcctcggcgcactggctttcattttccctcatcttaaagccttgtttaccacgccgtctcgtggctgtacccttgcagcagcattggcgtttgtcgcttatttactcaaccagcgctatggcagtggcgatgcctggatgtacgaaaccgagtcggtgatcaccatggtcctcggtctgtggatggtgaatgtggtcttctcctttggccaccgtttgcttaacttccagtcagcgcgggtgacttattttgttaacgcatcgctgtttatctatctggttcaccacccgttaacgctgtttttcggcgcatacattacaccgcacatcacctccaactggcttggttttctctgtggcctgatatttgtagtagggattgcgataattctgtatgaaattcatttgcgcatcccgttactgaagtttttgttctctggtaaaccggtacccaattcgccctnatagtgnagtcgtgcc

SEQ ID NO: 458 - DNA, 2216 bp, Homo sapiens
  misc_feature (537)..(537): n equals a,t,g, or c
  misc_feature (1327)..(1327): n equals a,t,g, or c
tttctttgccggtatccgcgatatcgttggcggacgttccggtgcgtatgaaaaagaactgcgtaaagcacgggagatcgcctttgaggaattaggctcccaggcgcgggcgctgggggccgatgccgtcgtcggtattgatatcgactacgaaacggtcgggcaaaacggcagtatgctgatggttagcgtcagcggtacggcggtgaaaacgcgtcgatgagaagattcttctggctggtcgctgccgctctgttattggcagggtgtgcaggcgaaaaaggcattgtcgagaaagagggatatcagcttgatacccgacgccaggcgcaggcggcgtatccgcgcattaaagtgctggtgatccactacaccgcagatgattttgatagctcgctggcgacactgaccgataagcaggtcagctcgcattatctggtccctgcggtaccaccgcgatacaacggtaaaccgcgcatctggcaactggtgccggaacaagaactggcctggcatgcggggattagcgcctggcgnggggcaacgcgcyttaacgacacytctattggcattgagctggaaaaccgtggctggcaaaaatcggccggagtgaaatattttgccccgtttgaaccggcacagattcaggcgcttattccactggcgaaagatattattgcccgttatcacatcaagccggaaaacgtagtggcacatgcggatatcgcaccgcagcgcaaagacgatccggggccattatttccctggcagcaactggcgcagcaggggattggtgcctggccggatgcgcagcgggttaacttttaccttgccgggcgcgcgccgcacacaccggtagataccgcgtcattgctggagcttttggcgcgctacggttatgacgttaaacctgatatgacaccgcgcgagcagcggcgcgtgattatggcattccagatgcatttccgcccgacgttatataacggcgaagcggatgcagaaactcaggcgattgccgaagcattgctggagaaatacgggcaggattagcgcggcagttttccgtggtcgcgtagccaggcggcagttttctcgataccttcatccagggtgatgaccggctgataacctaactcttcctgcgcacgcgtaatatccagcgtaaagtcaaaattcaacttggagacgccgtagtgggtcagcggcggctcttttgctgacttgcggcctaaacgctccatgctgcgggcgatcatatccagcatcgggtaggggacggaacgaatacgacagtcaatattcaactcgtcgatcagcttctgcacgnatgctgcgcagtgtgcgatgctcgccgttggtgatgttgtacacacgcccggaaggtagcttatcgcaggcttcctggcttgccagccacattgcgtgcacggcattttcatagtaggtcatatcgaccagcgcactgccgccatgcggtaacagaatactgccgtagtggtgcatcatatgcgccagacggggaataaagactttatcgtgcggtccgaacagactttgtgggcgcagaatagtaaagcgcgtttgtggattcgcctgcgaaagcatattgatcacttcttcgctggctgctttgctgcgggcaaactcgttggcgaagcggtgagggcgaaaatcttctttaatatcgcgatggtggtgataatcgaagtacagggagggggaagagatatgaataaagttacgcacaccccaggcgacagccattcacccaggcggcgagtggcgcgaacgttagccagatcgaaagcctgttgtgtcccccagggtgaggtaaagctggagcagtgccacagcgtatcaatgcccgcgagcatcactttagcttgtgatgaaaccagctcggtcagatccgccggaacaaactctgcgcccattttttccagcaatttgcccattgcctcgttgcgaccggtcgctcgcacgctgatgcctttctggcataaaaactctaccgcgtttcgacctaagccgctggtggcgccggtaaccagtaccttcatatcaatccactgttgttgagaaaataacgtgcgcattcttccgtgatttcccccatgatgcawggggaaacatgaaagawtaacgcagkttttgtcgattaatctgtgstttgttctgccagtctggcgatttgttttgccattccgcgaaaaata

SEQ ID NO: 459 - DNA, 384 bp, Homo sapiens
acggtcggtgcactttaggtgaaaaaggttgagtcgcaaagcggaatgcatctagcataaagccttattattgatgaggctatcatgcgcgtactgctatttttacttctttcccttttcatgttgccggcattttcggctgataacctgttgcgctggcatgatgcgcacatttcacggtgcaagcctctacgccgcttaaagccaaacgcgcatggaaactgtgcgcgctttatcccagcctgaaagattcatattggttatcgttgaactatggtatgcaggaggctgctcgccgctacggtgtggatttaaaagtgctggaggcaggcggctacagccagttggctacccagcaagcacaaatcgaccagtgtaaacagt

SEQ ID NO: 460 - DNA, 2118 bp, Homo sapiens
  misc_feature (1518)..(1518): n equals a,t,g, or c
  misc_feature (1646)..(1646): n equals a,t,g, or c
ggcacgagggaaaggggactgcgtactccgcagatggtgttagtttttgcctatctgtgtgttctattaattgtttgttgggtaacttcaaaaaccagcttggctcttaagtacactgtttataaaaattttaaaagacttatttggaataaatctattctgatcatcacattaacaccctaatcagaaataagagaggtgtgttattgtcaccagggtggtgagctgcctagctctgattggcacatattgggaagttgagtttgagactgaacacattaagttcaaagtacagatttcgtggggagacccagacccccaccagcattaggagtaaaataaaataggcaatataaagaagggactggcaaatagatcactagctagaataatggcaagggagatttattatatctttattaagacactgctgacttgatgatgagtaaaagctcatcatccttgagggctgtgccatctcactctcaggccatctccttccttcccccaccatttctcctctttgtttccaccacatgcctggggcctccaggagttccgtgccactgggtcacctgccaggactcagctctcagataaaatcccctggacacacagaatggggtccctgagacgtttgatctcccatattccagggcgtctgggctgcctgctcatcctccttgccccaggagccatgctaaggatgggactgctccttggctgtcactgcccgcagccacagcctcaatgcccacaatgactgatctgggcatgtctgtgccaacttcacctttaaaaaggttagaaaacagcattccactgttgggttgacagacaatacttgatgttttgtttttaagaaagcatgcaaagaatctgaacatgtggaactaaatttaaatgcacatctaatatgtgcttttcctaaatgcaaagatttaccaatgtaatgattttatattcttttgtcttatgaaaaatgaagaaaaataagacaaatttatttaaatatctagttggagtccaaatctggaaagaaaagtacattctctatgagaaacatattcatatctgacaagaaatgtttttccccaatcccacccatccactgctgccaagtcagtctacctgaacctcacattacccagctcaaaaatctgtgttatgggttgaattgtgtcccttcgaaattcctgtattgaagccttaacccctagaactcagcatgtgatggtatttagaaatggagtctttaaagaagtgaccaagttaaaatgaggctgtgagagtcggtcttaatccaatatgactggtgcccttatatcagaggagattaggacacagacacagaggaagaccacatgaagatatgaggagaaggtggccaccgataagccaaggagagaggtctggaatggatccttcactcatggctctcagaaggaatcaaccatgctgagaacttgattttggacttccagcctccagaactatgagaaaataaatttctgctgntttaagccacccagcctgtggtactttggtatggcagtctgagccaattaatataatatgtgatcattctgcaagtcctaccaattaaattcagacacagagccccagcagactcctgtctcctctgncccatgtgtatcctgtgttttagccactgtggacttgtcctcagtgttctctgcacctgtgtgtaggtaacaaccatcttcaaagcatggtgaggccatgggtgctggacagtcccacagttcccatccctgaacctacaggggctatcttggcaccccaggtgtggtcccactcccctcagcccactttccctttttctgctcagcccctttgagggtctctgacttgggactatcatttgcatctgtctctgatgtgggtcctggttaccaactttgggtctcttttgtcttcatgctctgtagatcatgggacaggggaccccaactcaaaattccagctcgaatttgagccattccctccatgtgaatgcctttgtcctctttgctacttttcaaaaaattatacaatgtcttccaggaagcattccaatcagctcgtgccgaattcgatatcaagcttatcgatacc

SEQ ID NO: 461 - DNA, 1336 bp, Homo sapiens
aaaaatgcacattctttgtgaaactaatgtgtacccactgcttcttaattttgtgctgtggattttatagtctgagattttgttacagttgtccacaaggcgtccttcctccatgtgattttagttaagcacatcttttgtcatgatgtcctcggttgtgtattgtgtgtcttcgtgccttcgcgtactacaaaatgtataagaagttcctgctcctcccaagttgctttcagcatgtggaattttatacatatatcatttgtttacttccaaaactttttagttgcctgtgcttcagttacgccagcatatcctctatttctttcgtattggcacagttctctatgtaagcaatttgagagggaagcaaaggggaaaagtttgagttagctgttctttgtcctagaatttccctgcattaatcttgccttgaaaatatatataatactggtcccttaaactccatgaggctttgtctcattatgtattgttcttttggtaccctttcccacttaacttaccttttgctcctaagtcctataaaataccccttggatctggattttttatacccgattttctccactgtgtataaaaggtatattgtgactgtaaatttttgtatatcatgttctgagagcttcttactttctgatctcatagcactattcctgatcagagaactccagttgcttcaacacacagtatcagtagtgcagccaccccagatcgaatccgcttcccaagaggcactgccagtcgtagcactttccacggccagccccgggaacggcgaaccgcaacatataatggccctcctgcctctcccagcctgtcccatgaagccacaccattgtcccagactcgaagccgaggctccactaatctctttagtaaattaacttcaaaactcacaaggagtcgcaatgtatctgctgagcaaaaagatgaaaacaaagaagcaaagcctcgatccctacgcttcacctggagcatgaaaaccactagttcaatggatcccggggacatgatgcgggaaatccgcaaagtgttggacgccaataactgcgactatgagcagagggagcgcttcttgctcttctgcgtccacggagatgggcacgcggagaacctcgtgcagtgggaaatggaagtgtgcaagctgccaagactgtctctgaacggggtccggtttaagcggatatcggggacatccatagccttcaaaaatattgcttccaaaattgccaatgagctaaagctataacccagtgattatgatgtaaattaagtagcaattaaagtgttttcctgaaaaaaaaaaaaaaaaaaaaaa

SEQ ID NO: 462 - DNA, 398 bp, Homo sapiens
gacasagggacagaggcacggaacccccagaaatgtccctcctcagaaacaggctccaggccctgcctgccctgtgcctctgcgtgctggtcctggcctgcattggggcatgccagccagaggcccaggaaggaacccygagccccccaccaaagctaaagatgagtcgctggagcctggtgaggggcaggatgaaggagctgctggagacagtggtgaacaggaccagagacgggtggcaatggttctggagcccgagcaccttccggggcttcatgcagacctactatgacgaccacctgagggacctgggtccgckcaccaaggcctggttcctcgaatccaaagacagcctcttgaagaagacccacagctgtgccccaggttgtctgtgggga

SEQ ID NO: 463 - DNA, 1720 bp, Homo sapiens
ccgggtcgacccacgcgtccggaacagcgctcccgaggccgcgggagcctgcagagaggacagccggcctgcgccgggacatgcggccccaggagctccccaggctcgcgttcccgttgctgctgttgctgttgctgctgctgccgccgccgccgtgccctgcccacagcgccacgcgcttcgaccccacctgggagtccctggacgcccgccagctgcccgcgtggtttgaccaggccaagttcggcatcttcatccactggggagtgttttccgtgcccagcttcggtagcgagtggttctggtggtattggcaaaaggaaaagataccgaagtatgtggaatttatgaaagataattaccctcctagtttcaaatatgaagattttggaccactatttacagcaaaattttttaatgccaaccagtgggcagatatttttcaggcctctggtgccaaatacattgtcttaacttccaaacatcatgaaggctttaccttgtgggggtcagaatattcgtggaactggaatgccatagatgaggggcccaagagggacattgtcaaggaacttgaggtagccattaggaacagaactgacctgcgttttggactgtactattccctttttgaatggtttcatccgctcttccttgaggatgaatccagttcattccataagcggcaatttccagtttctaagacattgccagagctctatgagttagtgaacaactatcagcctgaggttctgtggtcggatggtgacggaggagcaccggatcaatactggaacagcacaggcttcttggcctggttatataatgaaagcccagttcggggcacagtagtcaccaatgatcgttggggagctggtagcatctgtaagcatggtggcttctatacctgcagtgatcgttataacccaggacatcttttgccacataaatgggaaaactgcatgacaatagacaaactgtcctggggctataggagggaagctggaatctctgactatcttacaattgaagaattggtgaagcaacttgtagagacagtttcatgtggaggaaatcttttgatgaatattgggcccacactagatggcaccatttctgtagtttttgaggagcgactgaggcaaatggggtcctggctaaaagtcaatggagaagctatttatgaaacccatacctggcgatcccagaatgacactgtcaccccagatgtgtggtacacatccaagcctaaagaaaaattagtctatgccatttttcttaaatggcccacatcaggacagctgttccttggccatcccaaagctattctgggggcaacagaggtgaaactactgggccatggacagccacttaactggatttctttggagcaaaatggcattatggtagaactgccacagctaaccattcatcagatgccgtgtaaatggggctgggctctagccctgactaatgtgatctaaagtgcagcagagtggctgatgctgcaagttatgtctaaggctaggaactatcaggtgtctataattgtagcacatggagaaagcaaatgtaaaactggataagaaaattattttggcagttcagccctttccctttttcccactaaattttttcttaaattacccatgtaaccattttaactctccagtgcactttgccattaaagtctcttcacattgaaaaaaaaaaaaaaaaa

SEQ ID NO: 464 - DNA, 1681 bp, Homo sapiens
aattcccgggtcgacccacgcgtccgctcaacttctaccagttcctcggggtgcagcaggatgcatcatctgcagacatcagaaaagcatatcgtaagctttcactaactttacatccagacaagaataaagatgaaaatgcagaaactcagtttagacaattggtggccatttatgaagttttaaaggatgatgaacgaaggcagaggtatgatgatattctgatcaatggacttccagattggcgacagcctgtattctactacaggcgggtgagaaaaatgagcaatgctgagctggcattactcttgttcattattctcacagtgggtcattatgctgtggtttggtcaatctacctgggaaaaacaactggatgaactactaagtttgaaaaaagagagaaaagaaaaaaaagactggcagcaagagtgtggatgtatcaaaactcggtgcttcagaaaaaaatgaaagattgctgatgaaaccacagtggcatgatttgcttccatgcaaactggggatttggttttgccttacactaaaagcattacctcacctcatccaggatgctgggcagttttatgctaaatataaagaaacaagattgaaggaaaaggaagatgcactgactagaactgaacttgaaacacttcaaaaacagaagaaagttaaaaaaccaaaacctgaatttcctgtatacacacctttagaaactacatatattcagtcttatgatcatggaacttccatagaagaaattgaggaacaaatggatgattggttggaaaacaggaaccgaacacagaaaaaacaggcacctgaatggacagaagaggacctcagccaactgacaagaagtatggttaagttcccaggagggactccaggtcgatgggaaaagattgcccacgaattgggtcgatctgtgacagatgtgacaaccaaagccaagcaactgaaggattcagtgacctgctccccaggaatggttagactctccgaactcaaatcgacaggttcagaattccaggccatcaaaacggccaccaccttggcccgatgacatgatcacccagcgagaggacgcagagggggtggcagcggaggaggagcaggagggagactccggtgagcaggagaccggggccactgatgcccggcctcggaggcggaagccagccaggctgctggaggctacagcgaagccggagccagaggagaagtccagagccaagcggcagaaggactttgacatagcagaacaaaacgagtccagcgacgaggagagcctgagaaaagagagagctcggtctgcagaggagccgtggactcaaaatcaacagaaacttctggaactggcgttgcagcagtacccaaggggatcctctgaccgctgggacaaaatagccagatgtgtcccgtccaagagcaaggaagactgtatcgctaggtacaagttgctggttgaactggtccaaaagaaaaaacaagctaaaagctgaatattctgggagatgatgttcaccttcattttccaaaatgaatatcttaaaaatcttatgcagaaatttgcattttgtacctcaatatttctacgtcatgtgccttagtaaaaaaaaataataaataaataaaagataaaaaaaaaaaaaaaagggcggccgctctagaggatccc

SEQ ID NO: 465 - DNA, 1074 bp, Homo sapiens
  misc_feature (1045)..(1045): n equals a,t,g, or c
  misc_feature (1053)..(1053): n equals a,t,g, or c
  misc_feature (1058)..(1058): n equals a,t,g, or c
  misc_feature (1061)..(1061): n equals a,t,g, or c
ctctagcccgggcggatcccccgggctgcaggccggttcgcgcgggcgtcgtscrcgcggttgtagctgcccggcggcggcagaagcggcgctcgcgccaagggacgtgtttctgcgctcgcgtggtcatggaggcgctgccgctgctagccgcgacaactccggaccacggccgccaccgaaggctgcttctgctgccgctactgctgttcctgctgccggctggagctgtgcagggctgggagacagaggagaggccccggactcgcgaagaggagtgccacttctacgcgggtggacaagtgtacccgggagaggcatcccgggtatcggtcgccgaccactccctgcacctaagcaaagcgaagatttccaagccagcgccctactgggaaggaacagctgtgatcgatggagaatttaaggagctgaagttaactgattatcgtgggaaatacttggttttcttcttctacccacttgatttcacatttgtgtgtccaactgaaattatcgcttttggcgacagacttgaagaattcagatctataaatactgaagtggtagcatgctctgttgattcacagtttacccatttggcctggattaatacccctcgaagacaaggaggacttgggccaataaggattccacttctttcagatttgacccatcagatctcaaaggactatggtgtatacctagaggactcaggccacactcttagaggtctcttcattattgatgacaaaggaatcctaagacaaattactctgaatgatcttcctgtgggtagatcagtggatgagacactacgtttggttcaagcattccagtacactgacaaacacggagaagtctgccctgctggctggaaacctggtagtgaaacaataatcccagatccagctggaaagctgaagtatttcgataaactgaattgagaaatacttcttcaagttatgatgcttgaaagttctcaataaagttcacggtttcattaccaaaaaaaaaaaaaaaaaaaaaaacccggggggggccggtnccaattcncccanagngggccgtttaagc

SEQ ID NO: 466 - DNA, 1250 bp, Homo sapiens
  misc_feature (22)..(22): n equals a,t,g, or c
  misc_feature (1194)..(1194): n equals a,t,g, or c
  misc_feature (1206)..(1206): n equals a,t,g, or c
  misc_feature (1225)..(1225): n equals a,t,g, or c
  misc_feature (1238)..(1238): n equals a,t,g, or c
tttaggtgtcactatagaaggnacgcctgcaggtaccggtccggaattcccgggtcgatgtgtgctggagggagaataaaggtctaagatgtgcgatagagggaagtcgcattgaattatgtgctgtgtagggatcgctggtatcaaatatgtgtgcccacccctggcatgagacaataaccctgataaatgcttcaataatattgaaaaaggaagagtatgagtattcaacatttccgtgtcgcccttattcccttttttgcggcattttgccttcctgtttttgctcacccagaaacgctggtgaaagtaaaagatgctgaagatcagttgggtgcacgagtgggttacatcgaactggatctcaacagcggtaagatccttgagagttttcgccccgaagaacgttttccaatgatgagcacttttaaagttctgctatgtggcgcggtattatcccgtattgacgccgggcaagagcaactcggtcgccgcatacactattctcagaatgacttggttgagtactcaccagtcacagaaaagcatcttacggatggcatgacagtaagagaattatgcagtgctgccataaccatgagtgataacactgcggccaacttacttctgacaacgatcggaggaccgaaggagctaaccgcttttttgcacaacatgggggatcatgtaactcgccttgatcgttgggaaccggagctgaatgaagccataccaaacgacgagcgtgacaccacgatgcctgtagcaatggcaacaacgttgcgcaaactattaactggcgaactacttactctagcttcccggcaacaattaatagactggatggaggcggataaagttgcaggaccacttctgcgctcggcccttccggctggctggtttattgctgataaatctggagccggtgagcgtgggtctcgcggtatcattgcagcactggggccagatggtaagccctcccgtatcgtagttatctacacgacggggagtcaggcaactatggatgaacgaaatagacagatcgctgagataggtgcctcactgattaagcattggtaactgtcagaccaaggttactcataymtactttagattgryttaaaacttcatttttaatttaaaaggatctaggtgaagatcctttttgataatcccatggccataacttcggantaatggaatgcnataccaaagttatggcatngaccaaaatcccntaacgggaggtt

SEQ ID NO: 467 - DNA, 2179 bp, Homo sapiens
ccacgcgtccgcccacgcgtccggtctactacaattttatgaagcctacacaggaaatgaatatcagcttagtctggtgcctacttgttttgtcttttgcaatcaaagttctattttcattaactacacactattttaaagtagaagatggtggtgaaagatctgtttgtgtcacctttggattttttttctttgtcaaagcaatggcagtgttgattgtaacagaaaattatctggaatttggacttgaaacagggtttacaaatttttcagacagtgcgatgcagtttcttgaaaagcaaggtttagaatctcagagtcctgtttcaaaacttactttcaaatttttcctggctattttctgttcattcattggggcttttttgacatttcctggattacgactggctcaaatgcatctggatgccctgaatttggcaacagaaaaaattacacaaactttacttcatatcaacttcttggcacctttatttatggttctgctctgggtaaaaccaatcaccaaagactacattatgaacccaccactgggcaaagaaagtatccctttaatgacagaagccacattcgatactctgcgactctggttaataatcctgctgtgtgctttgcggttggccatgatgcgtagtcacctgcaagcttatttaaatttagcccaaaaatgtgtggatcagatgaagaaagaagcggggcgaataagcacggttgagctacagaaaatggtggctcgagtcttttattatctttgtgtcattgcactgcagtatgtggcgcctctggtaatgctgcttcacacaactctgcttttgaaaacactaggtaatcattcctggggtatttatccagaatctatctctaccttaccagtggataatagtctactgtccaattctgtttactctgaattaccatcagctgaagggaaaatgaaggtaactgttacacaaataacagtggcactgagcagcttaaaaaatatttttactcctcttctttttcgaggacttctgtcttttctgacctggtggattgctgcttgcctcttttctacaagcctttttgggcttttctatcaccagtatctgactgtggcatgaatctcagttaacaaaaaagcatatccaaatcaccctttaaattaaaatatctgtgcccttaaagggctgatgaaaaccagaagaaagcaaatacaatgggaaaaaaaaaacatatcagaatgtcttgtattaaatgtttcctctgtattctcagggtgaattaatgtagtaatatttaaaattacaaaatagattgttaactgttacactgtggcattggaattttaactctttgtatttactggtatgagagggctatctacaagggtaatatttctgattaccctggtttacagaaacctccagcagtctttgaaacatctcacatgactctagttattgattgcttttaatggttttatggtactgttgatagtcatagtggctgcctatagaacaatcttcaaactgagccatgctttaggggagggaaaggggctaaagtctcttctgttggtaatttattagttactcttgaaacaataaaatccaacagaaaggaagagatagctactgtatattacagtaaagaaagctgcatagttattttaaatttaatggagatgaatatggttaaaatatataactactgctgcttgagaatagcaagagtattgttttaaaacatattccacccaacttgagagttcttttaaaatgattggccatatgaacatttgtaatcttgccattaggtttggacctgccatattttgttttattctgtgatcctaactagttccttttaataggctaaaatatttatcaatactgatcagactttaaagaaattactttgtaaacctgctgactacctgtatgtattgtatatatattatatattaaatatataatatattgagattataaaagatgaaaatattgaatccttataatattttaagttgcagaatgtatgttaaaaagtgacttgaatgagatgtatttgtatctagaaattttatttctttttggaatgagattaaaatacattttgaaagttaaaaaaaaaaaaaaaaaaaaaaaaaaaaaaaaaaaaaaaaaaaaaaaaaaaaaaa

SEQ ID NO: 468 - DNA, 1721 bp, Homo sapiens
gctccctcagcaaggacagcagaggaccagctaagagggagagaagcaactacagaccccccctgaaaacaaccctcagacgccacatcccctgacaagctgccaggcaggttctcttcctctcacatactgacccacggctccaccctctctcccctggaaaggacaccatgagcactgaaagcatgatccgggacgtggagctggccgaggaggcgctccccaagaagacaggggggccccagggctccaggcggtgcttgttcctcagcctcttctccttcctgatcgtggcaggcgccaccacgctcttctgcctgctgcactttggagtgatcggcccccagagggaagagttccccagggacctctctctaatcagccctctggcccaggcagtcagatcatcttctcgaaccccgagtgacaagcctgtagcccatgttgtagcaaaccctcaagctgaggggcagctccagtggctgaaccgccgggccaatgccctcctggccaatggcgtggagctgagagataaccagctggtggtgccatcagagggcctgtacctcatctactcccaggtcctcttcaagggccaaggctgcccctccacccatgtgctcctcacccacaccatcagccgcatcgccgtctcctaccagaccaaggtcaacctcctctctgccatcaagagcccctgccagagggagaccccagagggggctgaggccaagccctggtatgagcccatctatctgggaggggtcttccagctggagaagggtgaccgactcagcgctgagatcaatcggcccgactatctcgactttgccgagtctgggcaggtctactttgggatcattgccctgtgaggaggacgaacatccaaccttcccaaacgcctcccctgccccaatccctttattaccccctccttcagacaccctcaacctcttctggctcaaaaagagaattgggggcttagggtcggaacccaagcttagaactttaagcaacaagaccaccacttcgaaacctgggattcaggaatgtgtggcctgcacagtgaagtgctggcaaccactaagaattcaaactggggcctccagaactcactggggcctacagctttgatccctgacatctggaatctggagaccagggagcctttggttctggccagaatgctgcaggacttgagaagacctcacctagaaattgacacaagtggaccttaggccttcctctctccagatgtttccagacttccttgagacacggagcccagccctccccatggagccagctccctctatttatgtttgcacttgtgattatttattatttatttattatttatttatttacagatgaatgtatttatttgggagaccggggtatcctgggggacccaatgtaggagctgccttggctcagacatgttttccgtgaaaacggagctgaacaataggctgttcccatgtagccccctggcctctgtgccttcttttgattatgttttttaaaatatttatctgattaagttgtctaaacaatgctgatttggtgaccaactgtcactcattgctgagcctctgctccccaggggagttgtgtctgtaatcgccctactattcagtggcgagaaataaagtttgcttagaaaagaaaaaaaaaaaaaaaaaaactcgagggggggcccgtacccaaataccctattg

SEQ ID NO: 469 - DNA, 2888 bp, Homo sapiens
  misc_feature (10)..(10): n equals a,t,g, or c
  misc_feature (12)..(12): n equals a,t,g, or c
  misc_feature (2741)..(2741): n equals a,t,g, or c
  misc_feature (2762)..(2762): n equals a,t,g, or c
  misc_feature (2785)..(2785): n equals a,t,g, or c
  misc_feature (2794)..(2794): n equals a,t,g, or c
  misc_feature (2822)..(2822): n equals a,t,g, or c
  misc_feature (2837)..(2837): n equals a,t,g, or c
  misc_feature (2851)..(2851): n equals a,t,g, or c
  misc_feature (2866)..(2866): n equals a,t,g, or c
ttctggcgtnangaatttgaagaagatctatagtgcactatwgaaggtacgcctgcaggtaccggtccggaattcccgggatcgctggtatcaaatatgtgtgcccacccctggcatgagacaataaccctgataaatgcttcaataatattgaaaaaggaagagtatgagtattcaacatttccgtgtcgcccttattcccttttttgcggcattttgccttcctgtttttgctcacccagaaacgctggtgaaagtaaaagatgctgaagatcagttgggtgcacgagtgggttacatcgaactggatctcaacagcggtaagatccttgagagttttcgccccgaagaacgttttccaatgatgagcacttttaaagttctgctatgtggcgcggtattatcccgtattgacgccgggcaagagcaactcggtcgccgcatacactattctcagaatgacttggttgagtactcaccagtcacagaaaagcatcttacggatggcatgacagtaagagaattatgcagtgctgccataaccatgagtgataacactgcggccaacttacttctgacaacgatcggaggaccgaaggagctaaccgcttttttgcacaacatgggggatcatgtaactcgccttgatcgttgggaaccggagctgaatgaagccataccaaacgacgagcgtgacaccacgatgcctgtagcaatggcaacaacgttgcgcaaactattaactggcgaactacttactctagcttcccggcaacaattaatagactggatggaggcggataaagttgcaggaccacttctgcgctcggcccttccggctggctggtttattgctgataaatctggagccggtgagcgtgggtctcgcggtatcattgcagcactggggccagatggtaagccctcccgtatcgtagttatctacacgacggggagtcaggcaactatggatgaacgaaatagacagatcgctgagataggtgcctcactgattaagcattggtaactgtcagaccaagtttactcatatatactttagattgatttaaaacttcatttttaatttaaaaggatctaggtgaagatcctttttgataatctcatgccataacttcgtataatgtatgctatacgaagttatggcatgaccaaaatcccttaacgtgagttttcgttccactgagcgtcagaccccgtagaaaagatcaaaggatcttcttgagatcctttttttctgcgcgtaatctgctgcttgcaaacaaaaaaaccaccgctaccagcggtggtttgtttgccggatcaagagctaccaactctttttccgaaggtaactggcttcagcagagcgcagataccaaatactgttcttctagtgtagccgtagttaggccaccacttcaagaactctgtagcaccgcctacatacctcgctctgctaatcctgttaccagtggctgctgccagtggcgataagtcgtgtcttaccgggttggactcaagacgatagttaccggataaggcgcagcggtcgggctgaacggggggttcgtgcacacagcccagcttggagcgaacgacctacaccgaactgagatacctacagcgtgagctatgagaaagcgccacgcttcccgaagggagaaaggcggacaggtatccggtaagcggcagggtcggaacaggagagcgcacgagggagcttccagggggaaacgcctggtatctttatagtcctgtcgggtttcgccacctctgacttgagcgtcgatttttgtgatgctcgtcaggggggcggagcctatggaaaaacgccagcaacgcggcctttttacggttcctggccttttgctggccttttgctcacatgttctttcctgcgttatcccctgattctgtggataaccgtattaccgcctttgagtgagctgataccgctcgccgcagccgaacgaccgagcgcagcgagtcagtgagcgaggaagcggaagagcgcccaatacgcaaaccgcctctccccgcgcgttggccgattcattaatgcagagcttgcaattcgcgctttttcaatattattgaagcatttatcagggttattgkctcatgagcggatacatatttgaatgtatttagaaaaataaacmaataggggttccgcgcacatttccccgaaaagtgccacctgacgtctaagaaaccattattatcatgacattaacctataaaaataggcgtattacgaggccctttcacgcattagatgcatgtcgttacataacttacggtaaatggcccgcctggctgaccgcccaacgacccccgcccattgacgtcaataatgacgtatgttcccatagtaacgccaatagggactttccattgacgtcaatgggtggagtatttacggtaaactgcccacttggcagtacatcaagtgtatcatatgccaagtacgccccctattgacgtcaatgacggtaaatggcccgcctggcattatgcccagtacatgaccttatgggactttcctacttggcagtacatctacgtattaagtcatcgctattaccatggtgatgcggttttggcagtacatcaatgggcgtggatagcgggttgactcacggggatttccaagtctccaccccattgacgtcaatgggagtttgtttttgggcaccaaaaatcaacgggacttttccaaaatggtcgtaaccaacttncggccccatttggactccaanatggggccgggtaagggccgttntaccgggtnggggaaagggcttattataaggcaggangcttcggttttaagnggaaacccgttcangaatcggccctgggnagaaccgcccatttccaacggc

SEQ ID NO: 470 - DNA, 566 bp, Homo sapiens
gaagaaaagaaaaaaaaaagaaattatgtggatgccaaagaagaccatgaaagaacacatcaaatggtcttactgagaaagctttgtctgccaatgttgtgttttctgcttcatacgatattgcacagtactggtcagtatcaggaatgcctacagttagcagatatggtatcctctgagcgccacaaactgtacctggtattttctaaggaagagctaaggaagttgctgcagaagctcagagagtcctctctaatgctcctagaccagggacttgacccattagggtatgaaattcagttatagtttaatctttgtaatctcactaattttcatgataaatgaagtttttaataaaatatacttgttattagtaattttttcttttgcattaccatgtaaaatttagacatttgaattttgtacttttcagaatattatcgtgacactttcaacatgtagggatatcagcgtttctctgtgtgcttgttaataaaactatataaaaattaaaattttctgtttttmcaaaaaaaaaaaaaaaaaaaaaaaaaaagggcggccgc

SEQ ID NO: 471 - DNA, 915 bp, Homo sapiens
ctggcacgagctcaaccacagactacacttgctgaactggctcctggggccatgaggctgtcactgccactgctgctgctgctgctgggagcctgggccatcccagggggcctcggggacagggcgccactcacagccacagccccacaactggatgatgaggagatgtactcagcccacatgcccgctcacctgcgctgtgatgcctgcagagctgtggcttaccagtccctccttgttccagatgtggcaaaatctggcaaaggcagagaccaaacttcatacctcaaactctggggggcggcgggagctgagcgagttggtctacacggatgtcctggaccggagctgctcccggaactggcaggactacggattcgagaagtggaccaagtgaaacttctcacaggcccaggacttagcgaggggccagagccaagcatcagcgtgatggtcacagggggcccctggcctaccaggctctccaggacatgtttgcactacttgggggagtttggagaagaccagatctatgaagcccaccaacaaggccgaggggctctggaggcattgctatgtgggggaccccagggggcctgcttagagaaggtgtcagccacaagagaagagctctagtcctggactctaccctcctctgaaagaagctggggcttgctctgacggtctccactcccgtctgcaggcagccaggagggcaggaagcccttgctctgacctgccatcctgcctccctcctccagcctcagggcactcgggcctgggtgggagtcaacgccttcccctctggactcaaataaaacccagtgacctcaaaaaaaaaaaaaaaaaaaaaaaaaaaaaaaaaaaaaaaaaaaaaaaaaaaaaaaaaaaaaaaaaaaaaaaaaaaaaaaaaaa

SEQ ID NO: 472 - DNA, 1442 bp, Homo sapiens
ggagcgtccgggcccaggggctccgcacagcaggtgaggctctcctgccccatctccttgggctgcccgtgcttcgtgctttggactaccgcccmgcagtgtcctgccctctgcctgggcctcggtccctcctgcacctgctgcctggatccccggcctgcctgggcctgggccttggttctccccatgacaccacctgaacgtctcttcctcccaagggtgygtggcaccaccctacacctcctccttctggggctgctgctggttctgctgcctggggcccaggggctccctggtgttggcctcacaccttcagctgcccagactgcccgtcagcaccccaagatgcatcttgcccacagcaccctcaaacctgctgctcacctcattggagaccccagcaagcagaactcactgctctggagagcaaacacggaccgtgccttcctccaggatggtttctccttgagcaacaattctctcctggtccccaccagtggcatctacttcgtctactcccaggtggtcttctctgggaaagcctactctyccaaggccacctcctccccactctacctggcccatgaggtccagctcttctcctcccagtaccccttccatgtgcctctcctcagctcccagaagatggtgtatccagggctgcaggaaccctggctgcactcgatgtaccacggggctgcgttccagctcacccagggagaccagctatccacccacacagatggcatcccccacctagtcctcagccctagtactgtcttctttggagccttcgctctgtagaacttggaaaaatccagaaagaaaaaataattgatttcaagaccttctccccattctgcctccattctgaccatttcaggggtcgtcaccacctctcctttggccattccaacagctcaagtcttccctgatcaagtcaccggagctttcaaagaaggaattctaggcatcccaggggaccacacctccctgaaccatccctgatgtctgtctggctgaggatttcaagcctgcctaggaattcccagcccaaagctgttggtctgtcccaccagctaggtggggcctagatccacacacagaggaagagcaggcacatggaggagcttgggggatgactagaggcagggaggggactatttatgaaggcaaaaaaattaaattatttatttatggaggatggagagaggggaataatagaagaacatccaaggagaaacagagacaggcccaagagatgaagagtgagagggcatgcgcacaaggctgaccaagagagaaagaagtaggcatgagggatcacagggccccagaaggcagggaaaggctctgaaagccagctgccgaccagagccccacacggaggcatctgcaccctcgatgaagcccaataaacctcttttctctgaaaaaaaaaa

SEQ ID NO: 473 - DNA, 476 bp, Homo sapiens
  misc_feature (21)..(21): n equals a,t,g, or c
aattcccgggtcgacccgggnaattcggaccgtacctgataaatgcttcaataatattgaaaaaggaagagtatgagtattcaacatttccgtgtcgcccttattcccttttttgcggcattttgccttcctgtttttgctcacccagaaacgctggtgaaagtaaaagatgctgaagatcagttgggtgcacgagtgggttacatcgaactggatctcaacagcggtaagatccttgagagttttcgccccgaagaacgttttccaatgatgagcacttttaaagttctgctatgtggcgcggtattatcccgtawtgacgccgggcaagagcaactcggtcgccgcatacactattctcagaatgacttggttgagtactcaccagtcacagaaaagcatcttacggaggcatgacagtaagagaattatgcagtgctgccataaccatgagtgataacactgcggccaactta

SEQ ID NO: 474 - DNA, 1209 bp, Homo sapiens
aattccccgggtgaagatcagctattagaagagaaagatcagttaagtcctttggacctgatcagcttgatacaagaactactgatttcaacttctttggcttaattctctcggaaacgatgaaatatacaagttatatcttggcttttcagctctgcatcgttttgggttctcttggctgttactgccaggacccatatgtaaaagaagcagaaaaccttaagaaatattttaatgcaggtcattcagatgtagcggataatggaactcttttcttaggcattttgaagaattggaaagaggagagtgacagaaaaataatgcagagccaaattgtctccttttacttcaaactttttaaaaactttaaagatgaccagagcatccaaaagagtgtggagaccatcaaggaagacatgaatgtcaagtttttcaatagcaacaaaaagaaacgagatgacttcgaaaagctgactaattattcggtaactgacttgaatgtccaacgcaaagcaatacatgaactcatccaagtgatggctgaactgtcgccagcagctaaaacagggaagcgaaaaaggagtcagatgctgtttcgaggtcgaagagcatcccagtaatggttgtcctgcctgcaatatttgaattttaaatctaaatctatttattaatatttaacattatttatatggggaatatatttttagactcatcaatcaaataagtatttataatagcaacttttgtgtaatgaaaatgaatatctattaatatatgtattatttataattcctatatcctgtgactgtctcacttaatcctttgttttctgactaattaggcaaggctatgtgattacaaggctttatctcaggggccaactaggcagccaacctaagcaagatcccatgggttgtgtgtttatttcacttgatgatacaatgaacacttataagtgaagtgatactatccagttactgccggtttgaaaatatgcctgcaatctgagccagtgctttaatggcatgtcagacagaacttgaatgtgtcaggtgaccctgatgaaaacatagcatctcaggagatttcatgcctggtgcttccaaatattgttgacaactgtgactgtacccaaatggaaagtaactcatttgttaaaattatcaatatctaatatatatgaataaagtgtaagttcacaactaaaaa

SEQ ID NO: 475 - DNA, 801 bp, Homo sapiens
  misc_feature (118)..(118): n equals a,t,g, or c
  misc_feature (498)..(498): n equals a,t,g, or c
caataaagaggattcgtacatctgtgrggcttgactcaaaacgcacctkatagacggcgkttgccaccatgcacacgracwtcacktagaagatgggttaktcaagctgcaggttccnttgaatggacaagacaagcattcccagccmmggccttgatgtcaccatgtcatggagccaaktaacgccaccagrgaagaatcacgacatgttgttggcgttcttctccttgtagaagtagagcagcaagcagaacagaatgatctccaccagcatgtacaaaaggaaaggccagctcacgaggtgcctggtgacattctcgcctgtcatcttctcgtgactgttgggtgcgaatgtcaccarcaggtagtacccacgacagccaaaccgcagccaacaaaggacaagacgtagcgcctcagaaagtctttcggtttccacttttccttgatgaatatgattcctatgatggcactagctattcacagaaaatgcgctgnaggggcacgatgagtgaacagcggcscgaaggcgtaggaggcgaacacacccagctcgcccagaagcattcaggaacaggcccagccaccatgtcttggtcttgaaatagscccggggatccttggagcctgccaggcggatgtggcagtacttctggaggttaagtgcaatgctgaccacgaggtgcccgaagatcgccaagagggcgccaatcaggttttccggcggcgtctcctctaaggcccacctatcaaaaccttctgagaaatgactcggactcttcgtgcaacccggaggcacag

SEQ ID NO: 476 - DNA, 1367 bp, Homo sapiens
  misc_feature (11)..(11): n equals a,t,g, or c
  misc_feature (73)..(73): n equals a,t,g, or c
aagcgcctttngattaatatccccttcagattgatttaaaacttcatttttaatttaaaaggatctaggtgantatcctttttgataatctcatgccataacttcgtataatgtatgctatacgaagttatggcatgaccaaaatcccttaacgtgagttttcgttccactgagcgtcagaccccgtagaaaagatcaaaggatcttcttgagatcctttttttctgcgcgtaatctgctgcttgcaaacaaaaaaaccaccgctaccagcggtggtttgtttgccggatcaagagctaccaactctttttccgaaggtaactggcttcagcagagcgcagataccaaatactgttcttctagtgtagccgtagttaggccaccacttcaagaactctgtagcaccgcctacatacctcgctctgctaatcctgttaccagtggctgctgccagtggcgataagtygkgtcttaccgsgttggactcaagacgatagttaccggataaggcgcagcggtcgggctgaacggkgggttcgtgcacacagcccagcttggagcgaacgacctacaccgaactgagatacctacagcgtgagctatgagaaagcgccacgcttcccgaagggagaaaggcggacaggtatccggtaagcggcagggtcggaacaggagagcgcacgagggagcttccagggggaaacgcctggtatctttatagtcctgtcgggtttcgccacctctgacttgagcgtcgatttttgtgatgctcgtcaggggggcggagcctatggaaaaacgccagcaacgcggcctttttacggttcctggccttttgctggccttttgctcacatgttctttcctgcgttatcccctgattctgtggataaccgtattaccgcctttgagtgagctgataccgctcgccgcagccgaacgaccgagcgcagcgagtcagtgagcgaggaagcggaagagcgcccaatacgcaaaccgcctctccccgcgcgttggccgattcattaatgcagagcttgcaattcgcgctttttcaatattattgaagcatttatcagggttattgtctcatgagcggatacatatttgaatgtatttagaaaaataaacmaataggggttccgcgcacatttycccgaaaagtgccacctgacgtctaagaaaccattattatcatgacattaacctataaaaataggcgtattacgaggccctttcacgcattagatgcatgtcgktacataacttacggtaaatggcccggctggcttgaccggcccaacggaccccggcccaattgacgtccaattaatggaccgaatgggttcccaataagtaaaccgccca

SEQ ID NO: 477 - DNA, 265 bp, Homo sapiens
  misc_feature (24)..(24): n equals a,t,g, or c
  misc_feature (239)..(239): n equals a,t,g, or c
gactatataggtgacactatagangtagcctgcaggtaccggtccggaattcccgggccctggcatgagacaataaccctgataaatgcttcaataatattgaaaaaggaagagtatgagtattcaacatttccgtgtcgcccttattcccttttttgcggcattttgccttcctgtttttgctcacccagtaaacgctggtgtaaagtaaaagatgctgarkatcagttgggtgcacnagtgggttacatcgaactggatctca

SEQ ID NO: 478 - DNA, 797 bp, Homo sapiens
aagctggactcgcgcgcttgcaggtcgacactagtggatccmaaagaattcggcacgagcaaggacccagaagtagggttttggcctaggtaacggggcagagatgtggttcgagattctccccggactctccgtcatgggcgtgtgcttgttgattccaggactggctactgcgtacatccacaggttcactaacgggggcaaggaaaaaagggttgctcattttgggtatcactggagtctgatggaaagagataggcgcatctctggagttgatcgttactatgtgtcaaagggtttggagaacattgattaaggaagcattttcctgattgatgaaaaaaataactcagttatggccatctacccctgctagaaggttacagtgtattatgtagcatgcaatgtgttatgtagtgcttaataaaaataaaatgaaaaaaaaaaaaaaaaaaaaaaaaaaaaaaaaaaaaaaaaaaaaaaaaaaaaaaaaaaaaaaaaaaaaaaaaaaaaaaaaaaaaaaaaaaaaaaaaaaaaaaaaaaaaaaaaaaaaaaaaaaaaaaaaaaaaaaaatataaaaatttagtctatatcaacaaatacctaacttcatatatcacatattcttctatattgcaacaagctttattatctattatcttctctctaaatatatatctctcatatcaatatatatcacattttttcttaatcctcgtatacatcgcaataacctctgtatctctaacataatctactatatggatataccttactccagtatttgtatatttact

SEQ ID NO: 479 - DNA, 1183 bp, Homo sapiens
acgcgtccgggtcatggcgccccgaagcctcctcctgctgctctcaggggccctggccctgaccgatacttgggcaggctcccactccttgaggtatttcagcaccgctgtgtcgcggcccggccgcggggagccccgctacatcgccgtggagtacgtagacgacacgcaattcctgcggttcgacagcgacgccgcgattccgaggatggagccgcgggagccgtgggtggagcaagaggggccgcagtattgggagtggaccacagggtacgccaaggccaacgcacagactgaccgagtggccctgaggaacctgctccgccgctacaaccagagcgaggctgggtctcacaccctccagggaatgaatggctgcgacatggggcccgacggacgcctcctccgcgggtatcaccagcacgcgtacgacggcaaggattacatctccctgaacgaggacctgcgctcctggaccgcggcggacaccgtggctcagatcacccagcgcttctatgaggcagaggaatatgcagaggagttcaggacctacctggagggcgagtgcctggagttgctccgcagatacttggagaatgggaaggagacgctacagcgcgcagatcctccaaaggcacacgttgcccaccaccccatctctgaccatgaggccaccctgctgctgggccctgggcttctaccctgcggagatcacgctgacctggcagcgggatggggaggaacagacccaggacacagagcttgtggagaccaggcctgcaggggatggaaccttccagaagtgggccgctgtggtggtgccttctggagaggaacagagatacacatgccatgtgcagcacgaggggctgccccagcccctcatcctgagatgggagcagtctccccagcccaccatccccatcgtgggcatcgttgctggccttgttgtccttggagctgtggtcactggagctgtggtcgctgctgtgatgtggaggaagaagagctcagatagaaacagagggagctactctcaggctgcagtgtgagacagcttccttgtgtgggactgagaagcaagatatcaatgtagcagaattgcacttgtgcctcacgaacatacataaattttaaaaataaagaataaaaatatatctttttatagaaaaaaaaaaaaaaa

SEQ ID NO: 480 - DNA, 2866 bp, Homo sapiens
  misc_feature (12)..(13): n equals a,t,g, or c
  misc_feature (2337)..(2337): n equals a,t,g, or c
  misc_feature (2837)..(2837): n equals a,t,g, or c
  misc_feature (2843)..(2843): n equals a,t,g, or c
  misc_feature (2846)..(2846): n equals a,t,g, or c
  misc_feature (2854)..(2854): n equals a,t,g, or c
  misc_feature (2865)..(2865): n equals a,t,g, or c
atggaagtaagnnatttaggtgacactatagaaggtacgcctgcaggtaccggtccggaattcccggggagaataaaggtctaagatgtgcgatagagggaagtcgcattgaattatgtgctgtgtagggatcgctggtatcaaatatgtgtgcccacccctggcatgagacaataaccctgataaatgcttcaataatattgaaaaaggaagagtatgagtattcaacatttccgtgtcgcccttattcccttttttgcggcattttgccttcctgtttttgctcacccagaaacgctggtgaaagtaaaagatgctgaagatcagttgggtgcacgagtgggttacatcgaactggatctcaacagcggtaagatccttgagagttttcgccccgaagaacgttttccaatgatgagcacttttaaagttctgctatgtggcgcggtattatcccgtattgacgccgggcaagagcaactcggtcgccgcatacactattctcagaatgacttggttgagtactcaccagtcacagaaaagcatcttacggatggcatgacagtaagagaattatgcagtgctgccataaccatgagtgataacactgcggccaacttacttctgacaacgatcggaggaccgaaggagctaaccgcttttttgccaacatgggggatcatgtaactcgccttgatcgttgggaaccggagctgaatgaagccataccaaacgacgagcgtgacaccacgatgcctgtagcaatggcaacaacgttgcgcaaactattaactggcgaactacttactctagcttcccggcaacaattaatagactggatggaggcggataaagttgcaggaccacttctgcgctcggcccttccggctggctggtttattgctgataaatctggagccggtgagcgtgggtctcgcggtatcattgcagcactggggccagatggtaagccctcccgtatcgkagktatctacacgacggggagtcaggcaactatggatgaacgaaatagacagatcgctgagataggtgcctcactgattaagcattggtaactgtcagaccaagtttactcatatatactttagattgatttaaaacttcatttttaatttaaaaggatctaggtgaagatcctttttgataatctcatgccataacttcgtataatgtatgctatacgaagttatggcatgaccaaaatcccttaacgtgagttttcgttccactgagcgtcagaccccgtagaaaagatcaaaggatcttcttgagatcctttttttctgcgcgtaatctgctgcttgcaaacaaaaaaaccaccgctaccagcggtggtttgkttgccggatcaagagctaccaactctttttccgaaggtaactggcttcagcagagcgcagataccaaatactgktcttctagtgtagccgtarttaggccaccacttcaagaactctgtagcaccgsctacatacctcgctctgctaatcctgttaccagtggctgctgccagtggcgataagtcgtgtcttaccgggttggactcaagacgatagttaccggataaggcgcagcggtcgggctgaacggggggttcgtgcacacagcccagcttggagcgaacgacctacaccgaactgagatacctacagcgtgagctatgagaaagcgccacgcttcccgaagggagaaaggcggacaggtatccggtaagcggcagggtcggaacaggagagcgcacgagggagcttcagggggaaacgcctggtatctttatagtcctgtcgggtttcgccacctctgacttgagcgtcgatttttgtgatgctcgtcaggggggcggagcctatggaaaaacgccagcaacgcggcctttttacggttcctggccttttgctggccttttgctcacatgttctttcctgcgttatcccctgattctgtggataaccgtattaccgcctttgagtgagctgataccgctcgccgcagccgaacgaccgagcgcagcgagtcagtgagcgaggaagcggaagagcgcccaatacgcaaaccgcctctccccgcgcgttggccgattcattaatgcagagcttgcaattcgcgctttktcmatattattgaagcatttatcagggttattgtctcatgagcggatacatatttgaatgtatttagaaaaataaacaaataggggttccgcgcacatttccccgaaaagtgccacctgacgtctaagaaaccattattatcatgacattaacctataaaaataggcgtattacgaggccctttcacgcattagatgcatgtcgntacataacttacggtaaatggcccgcctggctgaccgcccaacgacccccgcccattgacgtcaataatgacgtatgttcccatagtaacgccaatagggactttccattgacgtcaatgggtggagtatttacggtaaactgcccacttggcagtacatcaagtgtatcatatgccaagtacgccccctattgacgtcaatgacggtaaatggcccgcctggcattatgcccaggacatgaccttatgggactttcctacttggcagtacatctacgtattagtcatcgctattaccatggtgatgcggttttggcagtacatcaatgggcgtggatagcggtttgactcacggggatttccaagtctccaccccattgacgtcaatgggagtttgttttggcaccaaaatcaacgggactttccaaaatgtcgtaacaactccgccccattgacgcaaatgggcgggtaagcgtgtacggtgggaaggtctatattangcaganctnggtttaanggaaccggtcna

SEQ ID NO: 481 - DNA, 2717 bp, Homo sapiens
agctggagctcgcgcgcctgcaggtcgacactagtggatccaaagaattcggcacgagcggccgcagtttttyyttttttcttctgccgtcgccttctctgcctcttctcatcctttctcgctctgctgctctgcagtgtgacgagtccgaatcctcttcccacccagcccgcgcctttcttcttttgcctgcgctgttctatttctccttcggccgccgccgccactgctgcacacagctggtgtcggtgccgcgcttttacccccaagtcgttcccgcagcctatggcccaggccgccttgggtatttctgctcaaggtaaccacatccctctttaaaaattccgccgaaaaagagaagacgctttacccgactctttgggccgttatctcacggcgaactttctgaccaagtatacaactacccagagggcctaggagaagtgctgtatagagagcagttcgacttcaacgctgagccaccttgggaacctagctgatgataggggggttccatctcccaacttgtccatggaggtcttcacttcagaaatccaagactcatattcatccagcttggtgtcaagtgggctgttgctgccagaattatcttgtgattatttgagagatgtatcagtttcttctgaagtacaatcaactgtagaagcctttgtagcagtttgttgcatattctaaggacccagacataggcttggtggcccgtctcttgtctttcctggtttatgactttcggctttgtggaatacggctgagatgaaaggatttattgatgatgcaaactactccgttggcctgttggatgaaggaacaaaccttggaaatgttattgataactatgtttatgaacataccctgacagggaaaaatgcattttttgtgggagatcttggaaagattgtgaagaaacacagtcaatggcagaatgtagtggctcagataaagccattctacacagtgaagtgcaactctgctccagctgtacttgagattttggcagctcttggaaccggatttgcttgttccagtaaaaatgaaatggctttagtgcaagagttgggtgtacctccagaaaacattatttacataagtccttgcaagcaagtgtctcagataaagtatgcagcaaaagttggagtgaatatcctgacatgtgacaatgaaattgaattgaagaaaattgcacgtaatcacccaaatgccaaggtcttactacatattgcaacagaagataatattggaggtgaagagggtaacatgaagtttggcactaccctgaagaactgtaggcatctcttggaatgtgctaaggaacttgatgtccaaataattggggttaaatttcatgtttcgagtgcttgcaaagaatctcaagtatatgtacatgctctatctgatgctcgatgtgtgtttgacatggctggagaaattggctttacgatgaacatgttagacattggtggaggattcacgggaactgaatttcaattggaagaggttaatcatgttatcagccctctgttggatatctactttcctgaaggatctggtgttaagataatttcagaacccggaagctactatgtgtcttctgcatttacactcgcagttaatatcatagcaaagaaagttgttgaaaatgataaatttccctctggagtagaaaaaaccggaagtgatgaaccagccttcatgtattatatgaatgatggtgtttatggttcttttgcaagtaaactgtctgaggacttaaataccattccagaggttcacaagaaatacaaggaagatgagcctctgtttacaagcagcctttggggtccatcctgtgatgagcttgatcaaattgtggaaagctgtcttcttcctgagctgaatgtgggagattggcttatctttgataacatgggagcagattctttccatgaaccatctgcttttaatgattttcagaggccagccatttattacatgatgtcattcagtgattggtatgagatgcaagatgctggaattacttcagactcaatgatgaagaacttcttctttgtgccttcttgcattcagctgagccaagaagacagcttttccgctgaagcttaaacaggcattaacgcttctttagatctgaagttgcaggttaagcttgtctggtcaacattccagtgtggaaaaataatttaaacaatcttattctcttaattcttttggcaacaaaaactattagtaatagctatttgggaccagacaaaatcagctttcatctataattcattggggataatgggagatttagataatgtatccagatttaaacctaccagtttgtcctaccccttaagcgtttaaaataaaatatgcaacaaaatggatgacttagtggagatggaagcccattaattgggttccccattaaatcgtttacatacaagaacacagtttttatactaaggatttgtgtttaaagtcttgtaaagttcatgtctttcacccagatatatcaaatgttagaagaccagtgtgacttcattagataacgtttagtgtatttagaatgtgtaaatttgtgctttgaactgtagtttaataaatgtaaaattgcatcatagtatttgttgacctaatgtaacccttgtatgattgcaataaaattttgtgtagattttaaaaaaaaaaaaaaaaaaaaaaagggcggccgc

SEQ ID NO: 482 - DNA, 884 bp, Homo sapiens
tcgacccacgcgtccgcgcttaggtaccagttagcgtcaggggagctgggtcaggcggtcgccgggacaccccgtgtgtggcaggcggcgaacgctctggagaatcccggacagccctgctccctgcagccaggtggagcgaccccattacgctaaagatgaaaggctggggttggctggccctgcttctgggggccctgctgggaaccgcctgggctcggaggagccaggatctccactgtggagcatgcagggctctggtggatgaactagaatgggaaattgcccaggtggaccccaagaagaccattcagatgggatctttccggatcaatccagatggcagccagtcagtggtggaggtgccttatgcccgctcagaggcccacctcacagagctgctggaggagatatgtgaccggatgaaggagtatggggaacagattgatccttccacccatcgcaagaactacgtacgtgtagtgggccggaatggagaatccagttaatggactacaaggcatccgaatcgactcagatattagcggcaccctcaattttgcgtgtgagagcattgtggaggaatacgaggatgaactcattgaattcttttcccgagaggctgacaatgttaaagacaaactttgcagtaagcgaacagatctttgtgaccatgccctgcacatatcgcatgatgagctatgaaccactggagcagcccacactggcttgatggatcacccccaggaggggaaaatggtggcaatgccttttatatattatgtttttactgaaattaactgaaaaaatatgaaaccaaaagtaaaaaaaaaaaaaaaaaaaaaaaaaaaaaaaaaaaaaaaaaaaaaaaaaaaaaaaaaaaa

SEQ ID NO: 483 - DNA, 1419 bp, Homo sapiens
ggcggctataaggggcacgagggctgggcggcgttgctctgggctctgcggctgacggcgcttttgtctccggtgagttttgtggcgggaagcttctgcgctggtgcttagtaaccgactttcctccggactcctgcacgacctgctcctacagccggcgatccactcccggctgttcccccggagggtccagaggcctttcagaaggagaaggcagctctgtttctctgcagaggagtagggtcctttcagccatgaagcatgtgttgaacctctacctgttaggtgtggtactgaccctactctccatcttcgttagagtgatggagtccctagagggcttactagagagcccatcgcctgggacctcctggaccaccagaagccaactagccaacacagagcccaccaagggccttccagaccatccatccagaagcatgtgataagacctccttccatactggccatattttggaacactgacctagacatgtccagatgggagtcccattcctagcagacaagctgagcaccgttgtaaccagagaactattactaggccttgaaaaacctgtctaactggatgctcattgcctgggcaaggcctgtttaggccggttgcggtggctcatgcctgtaatcctagcactttgggaggctgatgtgggtggatcacctgaggtcaggagttcgagaccagcctcgccaacatggcgaaaccccatctctactaaaaatacaaaagttagctgggtgtggtggcagaggcctgtaatcccagctccttgggaggctgaggcgggagaattgcttgaacccggggacggaggttgcagtgagccgagatcgcactgctgtacccagcctgggccacagtgcaagactccatctcaaaaaaaaaagaaaagaaaaagcctgtttaatgcacaggtgtgagtggattgcttatggctatgagataggttgatctcgcccttaccccggggtctggtgtatgctgtgctttcctcagcagtatggctctgacatctcttagatgtcccaacttcagctgttgggagatggtgatattttcaaccctacttcctaaacatctgtctggggttcctttagtcttgaatgtcttatgctcaattatttggtgttgagcctctcttccacaagagctcctccatgtttggatagcagttgaagaggtgtgtgggtgggctgttgggagtgaggatggagtgttcagtgcccatttctcattttacattttaaagtcgttcctccaacatagtgtgtattggtctgaagggggtggtgggatgccaaagcctgctcaagttatggacattgtggccaccatgtggcttaaatgattttttctaactaataaagtgggatatatatttaaaaaaaaaaaaaaaaaaa

SEQ ID NO: 484 - DNA, 5176 bp, Homo sapiens
ccacgcgtccgaagaaagaaagaaaagagaaacataagctagactgaaacataggggcaacactttcactgtgcttttcaatccaaaataattttcctaagagcccactatgtaccacacactattgagcacttgggattaaaaaaaagttctccagaggctttccagtctagtgccatgtgtctcagtcttggtgctactggtattcggggcttcagaattatttgttggggattggtggggtggggagctttcctgtgcttcgtaggaggttcagcaacacctctggcttctaccaaatagataccagtaagcacatgcaccctcacagccagatgggacaatcagcaatgtcttcagccattgccaggggacagaatcatcctcgattgaaagcatctggtctaaggggaaagaccagtgtggaagtcagacaggaagtcactggcaggctagtatcctttggatgaacagtttacttactataagttgtcctggtcaaggcagctgggcagaaggcactggtggggagggtgaaggggttcttagtaattctgcttctttagtctgtacctgaaacacagtcattgattttacccactgagtggcctttaggggaagtgtatcatttccctctccttcctctctccctctggcatatggctcagcatttcctcacccgtttcacatgagcagatttgacacgttgctctgtccccagacttgcataacagcaaaaagctttatgcagtctggatggattcacaaaattaagccagtgggcagcagagtaataatccgtcagcttaggtgatataaaaggtcttgattagcccaggataatatatagtacatgctgaaggccctcttattccacggtatttatttgccattgcaagtatcttcctactacttcattctagaatagacaagcaatgtttaatgtatgagtctgcatttcacaagatcagtgtaataaacttaaccacattttgtctttttacagatgaacacagtatagagcatgaatttttttcatcttctctggcgacagttttccttctcatctgtgattccctcctgctactctgttccttcacatcctgtgtttctagggaaatgaaagaaaggccagcaaattcgctgcaacctgttgatagcaagtgaatttttctctaactcagaaacatcagttactctgaagggcatcatgcatcttactgaaggtaaaattgaaaggcattctctgaagagtgggtttcacaagtgaaaaacatccagatacacccaaagtatcaggacgagaatgagggtcctttgggaaaggagaagttaagcaacatctagcaaatgttatgcataaagtcagtgcccaactgttataggttgttggataaatcagtggttatttagggaactgcttgacgtaggaacggtaaatttctgtgggagaattcttacatgttttctttgctttaagtgtaactggcagttttccattggtttacctgtgaaatagttcaaagccaagtttatatacaattatatcagtcctctttcaaaggtagccatcatggatctggtagggggaaaatgtgtattttattacatctttcacattggctatttaaagacaaagacaaattctgtttcttgagaagagaatattagctttactgtttgttatggcttaatgacactagctaatatcaatagaaggatgtacatttccaaattcacaagttgtgtttgatatccaaagctgaatacattctgctttcatcttggtcacatacaattatttttacagttctcccaagggagttaggctattcacaaccactcattcaaaagttgaaattaaccatagatgtagataaactcagaaatttaattcatgtttcttaaatgggctactttgtcctttttgttattagggtggtatttagtctattagccacaaaattgggaaaggagtagaaaaagcagtaactgacaacttgaataatacaccagagataatatgagaatcagatcatttcaaaactcatttcctatgtaactgcattgagaactgcatatgtttcgctgatatatgtgtttttcacatttgcgaatggttccattctctctcctgtactttttccagacacttttttgagtggatgatgtttcgtgaagtatactgtatttttacctttttccttccttatcactgacacaaaaagtagattaagagatgggtttgacaaggttcttcccttttacatactgctgtctatgtggctgtatcttggttttccactactgctaccacaactatattatcatgcaaatgctgtattcttctttggtggagataaagatttcttgagttttgttttaaaattaaagctaaagtatctgtattgcattaaatataatatgcacacagtgctttccgtggcactgcatacaatctgaggcctcctctctcagtttttatatagatggcgagaacctaagtttcagttgattttacaattgaaatgactaaaaaacaaagaagacaacattaaaacaatattgtttctaattgctgaggtttagctgtcagttctttttgccctttgggaattcggcatggtttcattttactgcactagccaagagactttacttttaagaagtattaaaattctaaaattctattaatctctcattaatagtatttaatataaagattcttaaaattactgacgttatgaattggtttgatgcttttctcatgtacctcaatccttattttaaaataagatcaataacactattttcctaaatgttgtccttacctgccctacacatattcagaattgctatggcagattaagacatgtcaatggaagaggtcagaggagtaatattattggaaacagctgtaataggtgccataaaaagcaaacaaacaaaagtattttggttctttgcgaccacagctgtccccaaatatacagatgattcagcacttattttaaaatgaatctgggtattgctaatacccccaaattagcagtttttaattttaaaatacatgagaaatgggactttgtcttgtctccaaagcagtcatctaaaatctacacccccacgattagatgagttattactgagaagttattgcacccacaaaaaagctgccatttttttccaaagatgtcaaaagctagaaggccaggtcttctcaaagtaaaatacactgtgtattggggaaaaaagggtaagaggcataattaccaagttaggcatagtctgtcaagttgtatttagctattatcatggaatagtgttattccctgataatgaatgttggcatcataaccagaatgattattctcatctccatatcttcgtatttacatctaggaaatataaagcttatttatagtgaacactgagagtggtctctctccaaggagtaaagtaaatatgccctggctaactagtgtaagtttgtattctacataattaaccattataagaagtcactgagtagatcctaacttaagggatatttgtttgtgtttgagtatttctcgtgtggtgtttctaagtttgaaaagtgttttataagcatagagcttatgtgtgctactggggacaaatgtctcattttaaaggaaagagggttttctgagatggcatgaaatgagtgaaatctatttattgcctgaaagctaaagtggaatatgaaggcaagtctttctgaacagagcagtcctgtcactgactaacccagggaaaggacagggaaaagctagaaagtgttttgaaaactcttctgcttaccttttgaattgggacattaacaaagtaaggaccatttatgtgactggcttcctttggttagttatgattcattcattaattaattcatcagatttatatagagcacctgccatgagccaggcattatactaggtgtttgggaaacattggtaaacaaaagcaaagatccctgcttttatggaacttaagatattctgagacactggatcatacattctagtgcagtcaccttattaaaacttaagattttgtgatgcaaacaaacagccagaagctacaaataatgtaaatgttatatttaaaaaatacaatttcaaagaaatgacatttaaaccagttttaggaaagctgaagacaatactgcttttagagctttttaagatcagtttatattgctcttaaatgataatcctcagcttccaagtttttgtgaactcactttggtttatgtgtttgctacactcactgagaaattaaacaccttgcttgatttattgtaaaaaggaaaaaacaacagagccatacttaagcagtcttaaacttatttattaacgttatcttgagtctacagagaacagaaagctatctaagaggtagaaagctgtcaaatacctattatcaaactctgaattctcctataatatttcataaagctattataacaccttaataccttactgtcagtgtctgtttgcagcctttccacatttcttctacataattgaaacagtcttgatattcttttgccattgggactgcttgtcagacacacttcattgcagccttttattggctatttggaaaggaagcaaggggtacagtgggggcgcacacaggcctggagtctggttcattctccagaatagaaataaaaccccccagtctctgcctttaatgccttccatccagttgttttgctgtatctcatgcctcctttttaaaaaactgccttaattttctaatctttctcatccccaaacacatataatctagtgaatcacatcatttccttgcataactataaaagattatcctttcccaaaaagcctttttataagtgccacctaacacattcatgggctgcttccctgggccatctggtatatgatttatgaatttactcattttactatgaggattattagcaagtaaaattaggaaggttatcccaactcctaaaaaagttatacaaaaataaaatgatcttgtatcaagaataaaaataactattcactatttaggattattcacacacacacacaccctctatacaccactaaagcctcccattaatcccatagaagacttaaagagctaaaagaggctataatataaaaaaaaaaaaaaaaaa

SEQ ID NO: 485 - DNA, 982 bp, Homo sapiens
ggaaatggtgttcctcagttctgaccaaaccgtttcactgtcttgtctggtgtctagtattaatgttgccagtaagcacctctctccctttttttttttttattattttaatttgagaactcctgtgtccagtttagaagtgagagacttccatttttagttcctttacactcaccaccctagcaagtgccctgcacagagtaataagtaaattgatttcctaatcacaattctatgtgacttatggtcaaaagagcagttttaataactttaaaagtacttcagatagacgcagaaaattggtgagtggttgaccaagaacactgcacaaatataaaaaaagttctggaaatgcagaatggcgttagatttatatttggtttgttaattttatatcactgtttttcactgtttytgtggacaaataatggttgctttgctgaagtgttcttcctcaatcttgattgccctgtacctacccaaaagctgtagtcacacrtcctaaaggccaagcaaacccaccgggatggtggggggtcttggagccaagctcttaggttcctcttatttggggcagtaccagtccataccagctgcgatttgtgagtggacctgtggtaagaagaatagaaaaggctctcagagataaggttttttacatgtgtaacaatcccaagatttcctagattaaaatcttaattgattttgaaattggatttttatttagaatcaaaattaggacaagaacagataacttcttcagatacatttgtgtaactttacagaatgtcatcaagctttggggctctgtggggcacatgatttatccataaaggagatgcagtatgcttacttaaattaataaatttaaaatcttttaaaaaaaaaaaaaaaaaaaaaaaaaaaaaaaaaaaaaaaaaaaaaaaacaaaaaaaaaaaaaaaaaaaaaaaaaaaaaaaaaaaaaaaaaaaagggggggcgg

SEQ ID NO: 486 - DNA, 823 bp, Homo sapiens
  misc_feature (676)..(676): n equals a,t,g, or c
  misc_feature (678)..(678): n equals a,t,g, or c
  misc_feature (692)..(692): n equals a,t,g, or c
  misc_feature (756)..(756): n equals a,t,g, or c
  misc_feature (758)..(758): n equals a,t,g, or c
  misc_feature (774)..(774): n equals a,t,g, or c
  misc_feature (783)..(783): n equals a,t,g, or c
  misc_feature (803)..(803): n equals a,t,g, or c
gaaaaactcacaaaactggatttctactccctaccgtttccatgatcacgtgccaatcctactttagatgataacttcagattaaatgcccacacacatacacgcacatgcacacacacacacctgttaatctgaatttgttctaattttcaaatcaatttattatttcctatggaatttataacgggaatttcaataatgctggtgctagttttgtcacgcccttctgtacaaactcaaaatgtatccattttttactttaatcttcaactggtggtaatgagttctatgcacatcatataaaaaatacatttgctgagttttgctgaaatgagcattttttttcttgtcatggggataaaatgaccttttgaatttttatcttttaggacaagcatttgggtaatacattagaaaaggaaaagcaaaggaaagggaattctggaactttttcattttggttaaattcttgtgctaatttcttagtgccttttgctatgcatgtgaactatgaccatatacgaaaatggtctgttttaggtcatgactgtgggcagagattaattggtgaaaaatggggcctgtttgtggggatttaccacaccagtaagggttctcatctggcctgggaaaaatgtggaattagctccttgagaaatgccagtccgggtcatgnangttgaagcgagaancttagggaagggaaaccaccaggttcacctcctctaaagggcaggttaatgaatttgggttagnanttcccaggagccagtnccccttttnggggggtaagttaaaaggtncctttttcccttcccccggc

SEQ ID NO: 487 - DNA, 874 bp, Homo sapiens
  misc_feature (152)..(152): n equals a,t,g, or c
  misc_feature (828)..(863): n equals a,t,g, or c
gccaggtaagaagaggccgctcttcctggggttgtttctccgtgtgacgtgtggcctttgagatcaactctcctgtaccagcgtaggccgcatgagtggggggcgggctcccgcggtcctgctcggcggagtggtgagtgaccggccccgcnccgccccttccggtcctcgaagcctcgaccgctacccgcaccctaaatcccagaggttggccccctgaggtgcctctctgctcctgtcttttgtttggatgccggcgctgctgcctgtggcctcccgccttttgttgctaccccgagtcttgctgaccatggcctctggaagccctccgacccagccctcgccggcctcggattccggctctggctacgttccgggctcggtctctgcagcctttgttacttgccccaacgagaaggtcgccaaggagatcgccagggccgtggtggagaagcgcctagcagcctgcgtcaacctcatccctcagattacatccatctatgagtggaaagggaagatcgaggaagacagtgaggtgctgatgatgattaaaacccaaagttccttggtcccagctttgacagattttgttcgttctgtgcacccttacgaagtggccgaggtaattgcattgcctgtggaacaggggaactttccgtacctgcagtgggtgcgccaggtcacagagtcagtttctgactctatcacagtcctgccatgatgagccctgttcctgctcatcatgaagatccccgcgatacttcaacgccttctgacttccaggtgatgactgggcccccaataaatcccgtctttgggtcaaaaaannnnnnnnnnnnnnnnnnnnnnnnnnnnnnnnnnnnccccggggggg

SEQ ID NO: 488 - DNA, 340 bp, Homo sapiens
ccgggtcgacccacgcgtccgctggtgctcttgtcacaggtagaacagcttgtttcttttccatctattcaagtgtgtttctaattctaaaatgctgatcttctctggagtctatggtaggcaattatggtcactggaatagtttgtcttgttttcaaatattattggtgcatgtacaacagcatccaacatatctgtcttgttcctagatatatagctctgattttaggccttttgtgcataccattacaatatggtggggtaagacattctacagtagcctgtgctgaactgatctcttaaataaacttgcttctggttaactaaaaaaaaaaaaaaa

SEQ ID NO: 489 - DNA, 854 bp, Homo sapiens
gagaaaggataggttattggatagtgcaagtcccagagctggccagagaatttgaggattagcctggggtttaaagagaaagctctccctttcacagaagtgagtgggaagaaaggaaagaatgctaaagatactgctaggtttgaggtgtggtagagagcacttggagtgagagaactgactgttggggattctcttttctatgaattgcccagacgaggatatgaaagagaagatggagcaaagggaacgggcctgccaagtctcagtaaggttgtcgttgctgctgttgttgttgttaagtgcagtggaattaagagaatgagagaactaaagaaaaaagatactatagttagtgaaataatcaaaatgttgatggtgaggactaagcagttagatttaattgcctggttttccatttattttctctagatttaagtgttaaattcaatatacagtaatctgtacttcaaaagtttgtttcttgcttttctaagggcagtactaaataataataacaataataatccttgctaaaatttatgaattcttactctatgtcatgcaccatgtagatttttcacatatataatctgtttaacaaccctgggaagttcatattattatctccattttacatatggtgaaactgaggcttagagcagttaaataaattgcttaagatcatatggcttgttggtggcagatctggaattttctaactcagaaccctgcttttagctgggacatggtagtacatgcgtgtaatcccagctactcctcaggaagctgaagtgggagatccttgatcccaggagttgagacaacctaagcaaagaaaacccatcttaaaa

SEQ ID NO: 490 - DNA, 1615 bp, Homo sapiens
gcggccgcggcytcccatcccccactgcagacccccagcctgtggcggtggtccagttccgccaggaaaccgccgcctggagctgtgggtcgcgcacattaacgcatccagcggaaaaatgaaggagacccaaattcaaagttaaagtaatggtgacccgagaggtgccttgatgagaaggtttggggtcccggttactgatggttatcattcttacgagatgctggtcacctacgaagggagaaaggcacgaggagcgcctgaccaaagtggttttgccctgcttcccgcaagaggtggcacccacggctggaacgcaggagtcagacccacagtccccagctctggacgcccgcagcggggcctcgaagaggttcakggcggtgcccgcggcgctcgggccgggtctcccggkgcgtggkgcggrgggcggtgttgggcggcggccgggctccttcctcttctgcccggctcccctgctcttaacccgcgcgcgggggcgcccaggccactgggctccgcggagccagcgagaggtctgcgcggagtctgagcggcgctcgtcccgtcccaaggccgacgccagcacgccgtcatggcccccgcagcggcgacggggggcagcaccctgcccagtggcttctcggtcttcaccaccttgcccgacttgctcttcatctttgagtttatcttcgggggcctggtgtggatcctggtggcctcctccctggtgccctggcccctggtccagggctgggtgatgttcgtgtctgtgttctgcttcgtggccaccaccaccttgatcatcctgtacataattggagcccacggtggagagacttcctgggtcaccttggacgcagcctaccactgcaccgctgccctcttttacctcagcgcctcagtcctggaggccctggccaccatcacgatgcaagacggcttcacctacaggcactaccatgaaaacattgctgccgtggtgttctcctacatagccactctgctctacgtggtccatgcggtgttctctttaatcagatggaagtcttcataaagccgcagtagaacttgagctgaaaacccagatggtgttaactggccgccccactttccggcataactttttagaaaacagaaatgcccttgatggtggaaaaaagaaaacaaccacccccccactgcccaaaaaaaaaagccctgccctgttgctcgtgggtgctgtgtttactctcccgtgtgccttcgcgtccgggttgggagcttgctgtgtctaacctccaactgctgtgctgtctgctagggtcacctcctgtttgtgaaaggggaccttcttgttcgggggtgggaagtggcgaccgtgacctgagaaggaaagaaagatcctctgctgacccctggagcagctctcgagaactacctgttggtattgtccacaagctctcccgagcgccccatcttgtgccatgttttaagtcttcatggatgttctgcatgtcatggggactaaaactcacccaacagatctttccagaggtccatggtggaagacgataaccctgtgaaatactttataaaatgtcttaatgttcaaaaaaaaaaaaaaaaaaaattc

SEQ ID NO: 491 - DNA, 2463 bp, Homo sapiens
gcccaaggcgggctggcgggctggcggcagtcgctacttgcctagtagcctcagccgctgtgggctcctggggagatggaggggccggggctgggctcgcagtgcaggaatcacagccatggcccccaccctccaggatttggtcgatatggcatctgtgcacatgaaaacaaagaacttgccaatgcaagagaagctcttcctcttatagaggactctagtaactgtgacattgtcaaagctactcaatacggaatttttgaacgatgtaaagagttggtagaagcaggatatgatgtcaggcaaccagataaagaaaatgtgtcgcttcttcattgggctgctattaacaacagactggatcttgtaaggttttatatttcaaaaggtgctgttgtagatcagttgggtggagatttaaattcaactcctcttcactgggccatccgacaaggacatttacctatggtcatattattactccagcatggtgcagaccccactcttattgatggagagggattcagcagcatccacctggcagtattgtttcaacacatgcctattatagcatatctcatctcaaagggacagagtgtgaatatgacagatgtaaatgggcagacacctctcatgttatcagctcacaaagtaattgggccagaaccaactggatttcttttaaagtttaatccttctctcaatgtggttgataaaatacaccaaaacactccacttcactgggcagttgcagcaggaaatgttaatgcagttgataagcttttggaagctggttctagcctggatatccagaatgttaagggagaaacacctcttgatatggctctacaaaacaaaaatcagctcattattcatatgctaaaaacagaagccaaaatgagagccaaccaaaagttcagactttggaggtggctgcagaaatgcgagctcttcctgctgctgatgctttctgtgattaccatgtgggctattggatacatattggacttcaattcagattcttggcttttaaaaggatgtcttctagtaacactgttttttctgacatctttgtttccaaggktcttggktgggtataagaaccttgtatacttaccaacagcctttctgctaagatctgttttttggatatttatgactyggktcatcttattttttcctgatttagcaggagcccctttctatttcagwttcattttcagcatagtagcctttctatactttttctataagacttgggcaactgatccaggcttcactaaggcttctgaagaagaaaagaaagtgaatatcatcacccttgcagaaactggctctctggacttcagaacattttgtacatcatgtcttataaggaagccattaaggtcactccactgccatgtatgcaactgctgtgtggctcgatatgatcaacactgcctgtggactggacggtgcataggttttggcaaccatcactattacatattcttcttgtttttcctttccatggtatgtggctggattatatatggatctttcatctatttgtccagtcattgtgccacaacattcaaagaagatggattatggacttacctcaatcagattgtggcctgttccccttgggttttatatatcttgatgctagcaactttccatttctcatggtcaacatttttattattaaatcaactctttcagattgcctttctgggcctgacctcccatgagagaatcagcctgcagaagcagagcaagcatatgaaacagacgttgtccctcaggaagacaccatacaatcttggattcatgcagaacctggcagatttctttcagtgtggctgctttggcttggtgaagccctgtgtggtagattggacatcacagtacaccatggtctttcacccagccagggagaaggttcttcgctcagtatgaagaaaagcaacccaaaactctcaatctgatttgtttttgtttatgtcgatgccctgtagtttgaaagtgaagtaaagatttagaattcacctaagtccaaaggaaaacacgtggtttttaaagccattaggtaaaaaaagttctcaataaaggcattacaattttttaggtttagaaagatggacttttctgataaatcttggcagacatctaaaaaaaaaaccatatttttcacaagaaaatgcaagttactttttttggaaataatactcactgattatggataaaatggaatattttcagatactatattggctgtttcaaaatagtactattctttaaacttgtaatttttgctaagttatttgtctttgttgtatctataaatatgtaaaaaatatttaaatagatgtacctgttttgctttcacacttaataaaaaatttttttttgtagttgaaaaaaaaaaaaaaaaaaaaaaaaaaaaaaaaaaaaaaaaaaaaaaaaaaaaaaaaaagg

SEQ ID NO: 492 - DNA, 2049 bp, Homo sapiens
acgcgtccgcccacgcgtccggtgagaaccatgttccccttattcccgctaagttgctgctgtttactaccttagattctcatttgttttctctttctttcctctccttccacattaattattagaacataagttgatcaggaaaattaaatgagactttagtattttggcacttcctaattgacaccttgggagactgcaggaagggaaagagaatcaatgatcagttatttgtgtgtgtgtgtggtttttttttttttttggaagacagagtctcacacttttgcccaggctggagtgcagtggcgtgatctcggctcactgcaacctctgcctccagggttcaagcgattctcttgcctcagcttcccgagtagctgggattacaggcacacgccacaacgcctggctaattttaatattttaagtagagacagggtttcaccatgttggccaggctgttcttgaactcctgacataaggtaatccacccgcctcagcctcccaaagtgctgggattacaggcgtgaggcactgagcctggcctatttgtggtttttttttggttttgtttttgtttttgtttttgagacggagtcttgctctgtcgcccaggctagagtgcagtggcgcgatctcggctcactgcaacctccgcctcccagattcacaccattctcctgcctcagcctcccgagtagctgggattacaggtgcccaccaccacgcccagctaattttttgtatttttagtagagacggggtttcaccatgttagccaggacggtctccatctcctgacctcgtgatccacctgcctcggcctcccaaactatttgtgtgtttttttttttttttgagacggagtctcgctctgtcgcccaggctggagtgcagtggcgctatctcggctcactgcaagctccgcctcccgggttcacgccactctcctgcctcagcctccttagtagctgggactacaggcgcccgccaccatgcctggctaatttttttgtatttttagtagagacggggtttcaccgtgtttgacaggatggtctcgatttcctgacttcgtgatccgcccgcctcggcctcccaaagtgctgggattacaggcgtgagccaccgcgcccggcactatttgtgtttttaacaccattctcccccacttctctcctgggtgacataagagagaaataacctgtagtacagcagctaaagtattctcctttcagagaatttttttggaggtctctaatatatatttcccccttgtctctgtgatctcttatttatactatattattgtcccatgtactttctaaactgagcttggaacatttagtattcctgcaattggacttcccacttaacaattatacagactttgcttttagaaatagattaggttccaaacagaaagttcaagtgtaacaacaacaataaaaatagattatgaaacaggctataattggctcttttggatttgataggggcaagatgaaaggcaactttcttgcttttgaaatcatgttgggtaagaggtaaggaatccagctacaattttattagtgcttgaaacgggcttccttgaattctccaggccctatcattttttttttcttactaatcagaagagagctggggtagaagccccatgtttgtattccatgaaacacgtcgggttggagtaaaggcaaaaacagctagacacaccaggtgtgtctgtttgacatttataagctggcactcatcaacactcctgtttctcctttctctgggacgtgtggattaaggggtgtgagttgtgggaagaattgccctcgtacctcctggatttattatttttctcaaataccaaccagtaagatcccaaataacttgagaaaaattgtttcctgatctgtccacttctggtgtcaaagattttactcatcttcttagtacattctatgtattttatatgtataattttatacaattaaaaatagatttttgtctagtgaaaaaaaaaaaaaaaaaaaaaaaaaaaaaaaaaaaaaaaaa

SEQ ID NO: 493 - DNA, 989 bp, Homo sapiens
tctacagggagggggtgggcccgtccctgaggtatgaaagccccctgctctggctctggttcagtctcaatgggggcactggggctggagggcaggggtgggaggctccaggggaggggttccctcctgctagctgtggcaggagccacttctctggtgaccttgttgctggcggtgcctatcactgtcctggctgtgctggccttagtgccccaggatcagggaggactggtaacggagacggccgaccccggggcacaggcccagcaaggactggggtttcagaagctgccagaggaggagccagaaacagatctcagccccgggctcccagctgcccacctcataggcgctccgctgaaggggcaggggctaggctgggagacgacgaaggaacaggcgtttctgacgagcgggacgcagttctcggacgccgaggggctggcgctcccgcaggacggcctctattacctctactgtctcgtcggctaccggggccgggcgccccctggcggcggggacccccagggccgctcggtcacgctgcgcagctctctgtaccgggcggggggcgcctacgggccgggcactcccgagctgctgctcgagggcgccgagacggtgactccagtgctggacccggccaggagacaagggtacgggcctctctggtacacgagcgtggggttcggcggcctggtgcagctccggaggggcgagagggtgtacgtcaacatcagtcaccccgatatggtggacttcgcgagagggaagaccttctttggggccgtgatggtggggtgagggaatatgagtgcgtggtgcgagtgcgtgaatattgggggcccggacgcccaggaccccatggcagtgggaaaaatgtaggagactgtttggaaattgattttgaacctgatgaaaataaagaatggaaagcttcagtgctgccgataaaaaaaaaaaaaaaaaaaaaaaaaaagggcggccgc

SEQ ID NO: 494 - DNA, 1676 bp, Homo sapiens
  misc_feature (132)..(132): n equals a,t,g, or c
acggctgcgagaagacgacagaaggggagtgttagactgaagataaagtaagtgctgtttgggctaacaggatctcctcttgcagtctgcagcccaggacgctgattccagcagcgccttaccgcgcagccngaagattcactatggtgaaaatcgccttcaatacccctaccgccgtgcaaaaggaggaggcgcggcaagacgtggaggccctcctgagccgcacggtcagaactcagatactgaccggcaaggagctccgagttgccacccaggaaaaagagggctcctctgggagatgtatgcttactctcttaggcctttcattcatcttggcaggacttattgttggtggagcctgcatttacaagtacttcatgcccaagagcaccatttaccgtggagagatgtgcttttttgattctgaggatcctgcaaattcccttcgtggaggagagcctaacttcctgcctgtgactgaggaggctgacattcgtgaggatgacaacattgcaatcattgatgtgcctgtccccagtttctctgatagtgaccctgcagcaattattcatgactttgaaaagggaatgactgcttacctggacttgttgctggggaactgctatctgatgcccctcaatacttctattgttatgcctccaaaaaatctggtagagctctttggcaaactggcgagtggcagatatctgcctcaaacttatgtggttcgagaagacctagttgctgtggaggaaattcgtgatgttagtaaccttggcatctttatttaccaactttgcaataacagaaagtccttccgccttcgtcgcagagacctcttgctgggtttcaacaaacgtgccattgataaatgctggaagattagacacttccccaacgaatttattgttgagaccaagatctgtcaagagtaagaggcaacagatagagtgtccttggtaataagaagtcagagatttacaatatgactttaacattaaggtttatgggatactcaagatatttactcatgcatttactctattgcttatgctttaaaaaaaggaaaaaaaaaaaactactaaccactgcaagctcttgtcaaattttagtttaattggcattgcttgttttttgaaactgaaattacctgagtttcattttttctttgaatttatagggtttagatttctgaaagcagcatgaatatatcacctaacatcctgacaataaattccatccgttgttttttttgtttgtttgttttttcttttcctttaagtaagctctttattcatcttatggtgcagcaattttaaaatttgaaatattttaaattgtttttgaactttttgtgtaaaatatatcagatctcaacattgttggtttcttttgtttttcattttgtacaactttcttgaatttagaaattacatctttgcagttctgttaggtgctctgtaattaacctgacttatatgtgaacaattttcatgagacagtcatttttaactaatgcagtgattctttctcactactatctgtattgtggaatgcacaaaattgtgtaggtgctgaatgctgtaaggagtttaggttgtatgaattctacaaccctataataaattttactctatacaaaaaaaaaaaaaaaaaaamtcactgaactttataaa

SEQ ID NO: 495 - DNA, 1196 bp, Homo sapiens
  misc_feature (1177)..(1177): n equals a,t,g, or c
  misc_feature (1183)..(1183): n equals a,t,g, or c
  misc_feature (1196)..(1196): n equals a,t,g, or c
ccgctcagtccgggagcgcagctgggccgcggcgctccgacctccgctttcccaccgcccgcagctgaagcacatcccgcagcccggcgcggactccgatcgccgcagttgccctctggcgccatgtcgcagaacggagcgcccgggatgcaggaggagagcctgcagggctcctgggtagaactgcacttcagcaataatgggaacgggggcagcgttccagcctcggtttctatttataatggagacatggaaaaaatactgctggacgcacagcatgagtctggacggagtagctccaagagctctcactgtgacagcccacctcgctcgcagacaccacaagataccaacagagcttctgaaacagatacccatagcattggagagaaaaacagctcacagtctgaggaagatgatattgaaagaaggaaagaagttgaaagcatcttgaagaaaaactcagattggatatgggattggtcaagtcggccggaaaatattccccccaaggagttcctctttaaacacccgaagcgcacggccaccctcagcatgaggaacacgagcgtcatgaagaaagggggcatattctctgcagaatttctgaaagttttccttccatctctgctgctctctcatttgctggccatcggattggggatctatattggaaggcgtctgacaacctccaccagcaccttttgatgaagaactggagtctgacttggttcgttagtggattacttctgagcttgcaacatagctcactgaagagctgttagatcctggggtggccacgtcacttgtgtttatttgttctgtaaatgctgcgttcctaatttagtaaaataaaagaatagacactaaaatcatgttgatctataattacacctatgggatcaataagcatgtcagactgattaatgtctactgtgaaaatttggtagtaaattttcatttgatattagatataaatatctgaatataaataattttaatatactagtcatgatgtgtgttgtattttaaaaattatctgcaaccttaattcagctgaagtactttatatttcaaaagaatgaataacattgataataaaatcgctactttaaggggtttgtccaaaataaatattgtggccttatatatcaaaaaaaaaataaaaaaaaggggngccccntttaaagaacccn

SEQ ID NO: 496 - DNA, 786 bp, Homo sapiens
  misc_feature (452)..(452): n equals a,t,g, or c
ggctggctgaagtaagaccagtctgkccctgggagaccaacaggaatacagcctccttggaatgattcccctttttcttgtctccttctttgtaccttagaacagcgagctcaagttagggtctggaaacaggaaggtggtctgcatcatggtcttccttctcttcattgccttcaactttggacctgtcaggtgagaccttccttgcttcactagaaccttccaggtggagcccacgttacagcctcctagctgcctgctttggcccaggccatttccttctgcttatatacaaatggttctggtgtccttggcaccgatgatgtgtctggccagccccttcctgctccattatttgtctttttttcttggagatggacctgggcgacaaagcgagactttgtctcaaaaaaaaaaaaaaaagaaaaaagaaaaaccaaaaaatwaaaatnaaaattaattaattaattaaaaaaaaaaggccaggcacagtgctcacgcctgtaatcccagcactttggcaggccaaggcaggcggatcacaaggtcaggagatcgagaccatcctgactaacacagtgaaaccccgtctctactaaaaatacaaaaaaattagccaggcgtggtggcgtgcgtctgtagttccagctgctggggaggctgaggcaggagaatggcgtgaacccgggaggcggagcttgcagtgagccgagatcgcaccactgcactccagcctggtcgacagagcaagactgcatctcaaaaaaaaaaaaaaagggcggccgc

SEQ ID NO: 497 - DNA, 1829 bp, Homo sapiens
  misc_feature (1759)..(1759): n equals a,t,g, or c
  misc_feature (1818)..(1818): n equals a,t,g, or c
ccagcgctcgccttcctcctcctggacttcgaccctttgccgccctcaccacgccatggctcatgtccccgctcggaccwmccgggacccgggccccagctgctgctgctgctgctgccgttgtttctgctgttgctccgggatgtggccggcagccamagggcccccgcctggtccgcactgcccgcggccgccgacggcctgcagggggacagggatctccagcggcaccctggggacgcggccgccacgttgggccccagcgcccaggacatgstcgctgtccacatgcacaggctctatgagaagtacagccggcaggcgcgcggccgggagggggcaacacggtccgcagcttcagggccaggctggaagtggtcgaccagaaggccgtgtatttcttcaacctgacttccatgcaagactcggaaatgatccttacggccactttccacttctactcagagccgcctcggtggcctcgagcgctcgaggtgctatgcaagccgcgggccaagaacgcttcaggccgcccgctgcccctgggcccgcccacacgccagcacctgctcttccgcagcctctcgcagaacacggccacacaggggctactccgcggggccatggccctggcgcccccaccgcgcggcctgtggcaggccaaggacatctcccccatcgtcaaggcggcccgccgggatggcgagctgctcctctccgcccagctggattctgaggagagggacccgggggtgccccggcccagcccctatgcgccctacatcctagtctatgccaacgatctggccatctcggagcccaacagcgtggcagtgacgctgcagagatacgaccccttccctgccggagaccccgagccccgcgcagcccccaacaactcagcggacccccgcgtgcgccgagccgcgcaggccactgggcccctccaggacaacgagctgccggggctggatgagaggccgccgcgcgcccacgcacagcacttccacaagcaccagctgtggcccagccccttccgggcgctgaaaccccggccagggcgcaaagaccgcaggaagaagggccaggaggtgttcatggccgcctcgcaggtgctggactttgacgagaagacgatgcagaaagcccggaggaagcagtgggatgagccgagggtgtgctcccggaggtacctgaaggtggacttcgcagacatcggctggaatgaatggataatctcaccgaaatcttttgatgcctactactgcgcgggagcatgtgagttccccatgcctaagatcgttcgtccatccaaccatgccaccatccagagcattgtcagggctgtgggcatcatccctggcatcccagagccctgctgtgttcccgataagatgaactcccttggggtcctcttcctggatgagaatcggaatgtggttctgaaggtgtaccccaacatgtccgtggacacctgtgcctgccggtgagaccactccagggtggaaagaagccacgcccagcagagctgccttctcggagccttctgcaaccaggacttgtggtgcagctgcagacacagagcacagctcatgggcaacatcactggggcccagagagagctgtccgccagtgcatcattagggggtctttcattgctagtgactagccccttaaatgccagcctgagtacctgaaggaatytgggrattagccctggcctgaaagtggcccatcattcatacccactgttctgaangcttgaaaacaaaacatatccacaacattggcttgatgtgatcatcatctcataactgngccagaaagct

SEQ ID NO: 498 - DNA, 2651 bp, Homo sapiens
gctcgccttctgcccgggcgctcgcagccgagcgcggccggggaagggctctcctcccagcgccgagcactgggccctggcagacgccccaagattgttgtgaggagtctagccagttggtgagcgctgtaatctgaaccagctgtgtccagactgaggccccatttgcattgtttaacatacttagaaaatgaagtgttcatttttaacattcctcctccaattggtttaatgctgaattactgaagagggctaagcaaaaccaggtgcttgcgctgagggctctgcagtggctgggaggaccccggcgctctccccgtgtcctctccacgactcgctcggcccctctggaataaaacacccgcgagccccgagggcccagaggaggccgacgtgcccgagctcctccgggggtcccgcccgcgagctttcttctcgccttcgcatctcctcctcgcgcgtcttggacatgccaggaataaaaaggatactcactgttaccattctggctctctgtcttccaagccctgggaatgcacaggcacagtgcacgaatggctttgacctggatcgccagtcaggacagtgtttagatattgatgaatgccgaaccatccccgaggcctgccgaggagacatgatgtgtgttaaccaaaatggcgggtatttatgcattccccggacaaaccctgtgtatcgagggccctactcgaacccctactcgaccccctactcaggtccgtacccagcagctgccccaccactctcagctccaaactatcccacgatctccaggcctcttatatgccgctttggataccagatggatgaaagcaaccaatgtgtggatgtggacgagtgtgcaacagattcccaccagtgcaaccccacccagatctgcatcaatactgaaggcgggtacacctgctcctgcaccgacggatattggcttctggaaggccagtgcttagacattgatgaatgtcgctatggttactgccagcagctctgtgcgaatgttcctggatcctattcttgtacatgcaaccctggttttaccctcaatgaggatggaaggtcttgccaagatgtgaacgagtgtgccaccgagaacccctgcgtgcaaacctgcgtcaacacctacggctctttcatctgccgytgtgacccaggatatgaacttgaggaagatggcgttcattgcagtgatatkkwckagtgcagcttctctgagttcctctgccaacatgagtgtgtgaaccagcccggcacatacttctgctcctgccctccaggctacatcctgctggatgacaaccgaagctgccaagacatcaacgaatgtgagcacaggaaccacacgtgcaacctgcagcagacgtgctacaatttacaagggggcttcaaatgcatcgaccccatccgctgtgaggagccttatctgaggatcagtgataaccgctgtatgtgtcctgctgagaaccctggctgcagagaccagccctttaccatcttgtaccgggacatggacgtggtgtcaggacgctccgttcccgctgacatcttccaaatgcaagccacgacccgctaccctggggcctattacattttccagatcaaatctgggaatgagggcagagaattttacatgcggcaaacgggccccatcagtgccaccctggtgatgacacgccccatcaaagggccccgggaaatccagctggacttggaaatgatcactgtcaacactgtcatcaacttcagaggcagctccgtgatccgactgcggatatatgtgtcgcagtacccattctgagcctcgggctggagcctccgacgctgcctctcattggcaccaagggacaggagaagagaggaaataacagagagaatgagagcgacacagacgttaggcatttcctgctgaacgtttccccgaagagtcagccccgacttcctgactctcacctgtactattgcagacctgtcaccctgcaggacttgccacccccagttcctatgacacagttatcaaaaagtattatcattgctcccctgatagaagattgttggtgaattttcaaggccttcagtttatttccactattttcaaagaaaatagattakgtttgcgggggtctgagtctatgttcaaagactgtgaacagcttgctgtcacttyttcacctcttccactccttctctcactgtgttactgctttgcaaagacccgggagctggcggggaaccctgggagtagctagtttgctttttgcgtacacagagaaggctatgtaaacaaaccacagcaggatcgaagggtttttagagaatgtgtttcaaaaccatgcctggtattttcaaccataaaagaagtttcagttgtccttaaatttgtataacggtttaattctgtcttgttcattttgagtatttttaaaaaatatgtcgtagaattccttcgaaaggccttcagacacatgctatgttctgtcttcccaaacccagtctcctctccattttagcccagtgttttctttgaggaccccttaatcttgctttctttagaatttttacccaattggattggaatgcagaggtctccaaactgattaaatatttgaagagaaaaaaaaaaaaaaaaaaaaaaa

SEQ ID NO: 499 - DNA, 1446 bp, Homo sapiens
gcctggttccacccggggggcatctgagaactgtgtccttccattcctgagtccagcacttcccaggccagccagggtggtgcttgtgtgggaaggactttaaatccagctgccagacccctggacgggagaaggagagacggctggccaccatgcacggctcctgcagtttcctgatgcttctgctgccgctactgctactgctggtggccaccacaggccccgttggagccctcacagatgaggagaaacgtttgatggtggagctgcacaacctctaccgggcccaggtatccccgmcggcctcagacatgctgcacatgagatgggacgaggagctggccgccttcgccaaggcctacgcacggcagtgcgtgtggggccacaacaaggagcgcgggcgccgcggcgagaatctgttcgccatcacagacgagggcatggacgtgccgctggccatggaggagtggcaccacgagcgtgagcactacaacctcagcgccgccacctgcagcccaggccagatgtgcggccactacacgcaggtggtatgggccaagacagagaggatcggctgtggttcccacttctgtgagaagctccagggtgttgaggagaccaacatcgaattactggtgtgcaactatgagcctccggggaacgtgaaggggaaacggccctaccaggaggggactccgtgctcccaatgtccctctggctaccactgcaagaactccctctgtgaacccatcggaagcccggaagatgctcaggatttgccttacctggtaactgaggccccatccttccgggcgactgaagcatcagactctaggaaaatgggtgcagagggccctgacaagcctagcgtcgtgtcagggctgaactcgggccctggtcatgtgtggggccctctcctgggactactgctcctgcctcctctggtgttggctggaatcttctgaaggggataccactcaaagggtgaagaggtcagctgtcctcctgtcatcttccccaccctgtccccagcccctaaacaagatacttcttggttaaggccctccggaagggaaaggctacggggcatgtgcctcatcacaccatccatcctggaggcacaaggcctggctggctgcgagctcaggrggccgcctgaggactgcacaccgggcccacacctctcctgcccctccctcctgagtcctgggggtgggaggatttgagggagctcactgcctacctggcctggggctgtctgcccacacagcatgtgcgctctccctgagtgcctgtgtagctggggatggggattcctaggggcagatgaaggacaagccccactggagtggggttctttgagtgggggaggcagggacgagggaaggaaagyaactcctgactctccaataaaaacctgtccaacctgtgmaaaaaaaaaaaaaa

SEQ ID NO: 500 - DNA, 1073 bp, Homo sapiens
  misc_feature (15)..(15): n equals a,t,g, or c
  misc_feature (328)..(328): n equals a,t,g, or c
  misc_feature (1033)..(1033): n equals a,t,g, or c
  misc_feature (1063)..(1063): n equals a,t,g, or c
sctgrgtcgaacagncctcacttgtgttgctgtcagtgccagtagggcaggcaggaatgcagcagagaggactcgccatcgtggccttggctgtctgtgcggccctacatgcctcagaagccatacttcccattgcctccagctgttgcacggtaggtttcacatcatatttccagaaggctcctggaaagagtgaatatgtgtcgcatccagagagctgatggggattgtgacttggctgctgtcatccttcatgtcaagcgcagaagaatctgtgtcagcccgcacaaccatactgttaagcagtggaatgaaagtgcaagctgcncaagaaaaatggtaaaggaaatgtttgccacaggaagaaacaccatggcaagaggaacagtaacagggcacatcaggggaaacacgaaacatacggccataaaactccttattagagagtctacagataaatctacagagacaattcctcaagtggacttggccatgattggttagtctcactctgtcacacaggctggagggcagtggcgggatctcggttcaccccaacctttgcctcacgggttcaagggattctcgtgcctcagccttccaagtggctgggattgcaggtgtgcgccagtgcgcctggctggttttggtattttttgttacagacggggtttcaccgtgttggctgggctggtctcgaacttctgatctcaagtgatccatctgccttggcctcccagggtgctgggattacaggcatgagccactgcacctggcctacgtattaggctttatgtaagatgtacatagtactccatactcctttccttttcctctattgaaactgttcctataaactttataaaattaatcagagaagaagagagggtgagaaacataaataatccaagcttgsaccacattcagcattaatcactaggtcactttgcttgctgaccccttyctcatagtkgtttggctattgcttcagaattatgtggagctgktacaagaatatagttcccttaactgntctatagataacaagcttggaacattatgnaaaggctaaa

SEQ ID NO: 501 - DNA, 1922 bp, Homo sapiens
  misc_feature (1919)..(1920): n equals a,t,g, or c
ggcacrrgggctcacgtacagtctgcaggccactgacgcttctttgcgagggatgcaggaggtcctacagagaaaggcgcttcttgcatttcagagggcccacagcctgtcacccacagatcaccaagcagctttctacctggctctgcagcttgccatctccagacagatcccagaggctctggggtatgtccgccaagctcttcagcttcaaggtgacgatgccaactccctgcacctccttgccctcctgctgtcagcacagaagcattaccatgacgctctgaacatcatcgacatggccctgagtgaatacccagaaaatttcatactactgttttccaaagtgaagttgcagtcactctgccgaggcccggacgargcactgctgacttgtaagcacatgctgcagatatggaaatcctgctacaacctcaccaaccccagtgattctggacgtgggagcagccttttagrtagaaccatgttgacagacgacagtttattacattatttgccaattcagcgttccgagacaggttcgtccaggcacatggtagcagcctcaagwtggsagvaaggcactgtcggaagtggcttcgtctctgcagagcatgrcccctaagcagggcccgctgcacccctggatgacgctggcacagatctggctccatgcagctgaagtctatatcggcatcgggaagcctgcagaagccacagcctgtacccaagaagctgccaacctcttcccaatgtcccacaatgtcctctacatgcgcggccagattgctgagctccggggaagcatggacgaggcgcggcggtggtatgaagaggccttagccattcagccccacccacgtgaargagcatgcagcgacttggccctgattcctttcaccagttaggccgttacarttttggcggagaagattcttccgggacgsggtgcaaggtgaactytgacaagcccacggaggtytggaacgggctgggcgaggtcctccaagctcagggcaacgatgcggcggctacggagtgcttcctgacagccttggagctggaggccagcagccccgccgtgcccttcaccatcatcccccgcgtgctctgagcaggcgcctgccagcctcacctgccgctcagcctgcagaggccctgccgggcaccagggcttgtgccatcgccccaaggggatgaatctgccgcactgaggccagggacgagtgttcagtgggccacagtgaaccaaccaaaccaaccccgaatcatcgctctcgccatgtgcgtttctctttgttttttttgccagcccaatggtagtttctgaacctattgacattgttcaaaatggatcatgtgccatattttgttagttgacatctgagttttcagtaaaatgattatggaattaatcagcaaatgtagaagaatatattcaaagttaaaattcagtggcagcacagattatttttaatcagagctgtwaaagaaaacaactgtsccttttttccccaccacccctdcctgccccactttgggcccagaaaccaaatgtgaacttcctgtctcccacctcagcactagtccatgccaggacaccagctgacaatttcttggttttactgtcaataattgtaccatgtgatcaattactgtcctcacttagaacaaagcctgagtccgagaatatttatattttaccaatatatgcctgttacaagagaaggaaatatgagttatttaagtttaacttttttatgtgaattcagagtttatttatcgagggaaatatgtacaaagaagcttcaaatggaatatttaccgacattccttatacatgacagacacttggctacatgggaagatgatgttaataataaaatgatttttaaatggaaaaaaaaaaaaaaaaaaannaa

SEQ ID NO: 502 - DNA, 1566 bp, Homo sapiens
ggcagaggaggaaccatggaggagaaatagggatgcacttcttgggtttgtttattatgaaagcttaatatttagcatcttgcttcagaagaacttaaattgtaaaagcctgttctgataattcatcttttccttggaaatttagaaggtgacattaattcttgggttaatggtgaatgctttgtcttattcattgtgtagaacctagcttgcctcttctcttcctttatttctgtttcagtctttttttttttttttttttttttttggagatagagtctcgctctgtcgcctaggttggcgtgcagtggcacgatcttggcttactgcaacctctgcctcccggttcacgccactctcccacctcagcctcctgagtagctgagactacaggtgcctgctgccacgcctggctaattttgtttttgtatttttactagagacgggattccaccatattagccaggatgatctcgatctcctgacctcgtgatccgcccgccttggcctcccaaagtgctgggattataggcgtgagccactgcccctgtaataagaataacmacaaagttttgataaggcmggagtgrggacatytaatwacctacatgagcttgctgktcttggaacttgtttttcctgtttgttttggaaaacgctggacatagctttgatgtatgaccatgttcatagatctgggaatagacaactggagcagaagggaatttttgtgcttttatgggtaggtacggagagttactttaccttgamatgcatttgttaaattcattttaatatacttctgttcattgctttcttattttaaacatctgatttttgtcaggttcaccaggttgagttttgtggagcttgtgaattagtcttgcataatgaaaaccttagcacctgaaatattgccagtgaaagtatcaggttacagtaaggaaggcttttgctttccatactgtaggaggttagatgaatgraaacctktcagacagaggcagaccatctcmtactttgagagaaaagcytgggtccttttggagtaaagctgagggctaaagtagggtttgtgtttatagattttgagcatcagtaacagaatctgcatttgggtagccattttatcactacttattttctctcatttcagaagtgtatgctgacttgtaaagtgaagaagccartggtgctgcgggtgttcttttggggtagtgtctgggatccagtacgrgttgaatcattgttcaaataaggtaaaagcatggtggtaaaagaaactaataacttcactaatttgtaaaaccaatcttacgttaagaattgattatttcgagaccagcctatgcaacatggtgagatcctgtctctacaaaaaataaaaaaatttaaccaggcctggtgatacacatctgtggtcccagctacttgggaggctgaggcagaaggatagcttgagctcagtagttggagactgcagtgaaccatgttcatgccactgcactccagcctgggtgacagcaagaccctgtctcaaaaaaaaaaaaaaaaaaaaaactcgta

SEQ ID NO: 503 - DNA, 1778 bp, Homo sapiens
  misc_feature (1754)..(1754): n equals a,t,g, or c
gaggaacttgacccccagagtgtggaaagaaagaccatctccccaggctatgccatcaccatacacagtggcaccttcacctgggcccaggacctgccccccactctgcacagcctaracatccaggtcccgaaaggggcactggtggccgtggtggggcctgtgggctgtgggaagtcctccctggtgtctgccctgctgggagagatggagaagctasaaggcaaagtgcacatgaagggctccgtggcctatgtgccccagcaggcatggatccagaactgcactcttcaggaaaacgtgcttttcggcaaagccctgaaccccaagcgctaccagcagactctggaggcctgtgccttgctagctgacctggagatgctgcctggtggggatcagacagagattggagagaagggcattaacctgtctgggggccagcggcagcgggtcagtctggctcgagctgtttacagtgatgccgatattttcttgctggatgacccactgtccgcggtggactctcatgtggccaagcacatctttgaccacgtcatcgggccagaaggcgtgctggcaggcaagacgcgagtgctggtgacgcacggcattagcttcctgccccagacagacttcatcattgtgctagctgatggacaggtgtctgagatgggcccgtacccagccctgctgcagcgcaacggctcctttgccaactttctctgcaactatgcccccgatgaggaccaagggcacctggaggacagctggaccgcgttggaaggtgcagaggataaggaggcactgctgattgaagacacactcagcaaccacacggatctgacagacaatgatccagtcacctatgtggtccagaagcagtttatgagacagctgagtgccctgtcctcagatggggagggacagggtcggcctgtaccccggaggcacctgggtccatcagagaaggtgcaggtgacagaggcgaaggcagatggggcactgacccaggaggagaaagcagccattggcactgtggagctcagtgtgttctgggattatgccaaggccgtggggctctgtaccacgctggccatctgtctcctgtatgtgggtcaaagtgcggctgccattggagccaatgtgtggctcagtgcctggacaaatgatgccatggcagacagtagacagaacaacacttccctgaggctgggcgtctatgctgctttaggaattctgcaagggttcttggtgatgctggcagccatggccatggcacgrgatccaggctgcccgtgtgttgcaccaggcactgctgcacaacaagatacgctcgccacagtccttctttgacaccacaccatcaggccgcatcctgaactgcttctccaaggacatctatgtcgttgatgaggttctggcccctgtcatcctcatgctgctcaattccttcttcaacgccatctccactcttgtggtcatcatggccagcacgccgctcttcactgtggtcatcctgcccctggctgtgctctacaccttagtgcagcgcttctatgcagccacatcacggcaactgaagcggctggaatcagtcagccgctcacctatctactcccacttttcggagacagtgactggtgccagtgtcatccgggcctacaaccgcagccgggattttragatcatcagtgatactaaggtggatgccaaccagagaaagctgctacttcagaggaggacatttggtgggntttgggagctgtcccacctgcaca

SEQ ID NO: 504 - DNA, 2038 bp, Homo sapiens
ggcacgagccgtaacgaaggcctgcctctgccagcctgagaatagcagccttcatcttgcaggcagtggtgagcagtagtctgtggggctgtgagcaccaggggacgtgatggaagttctgttttaggaaaatttagttcaggagaattttcaggttacatcggataagaagagcctaagctgagcttcgtagcacgtgcctgtggtcccagctgcttgtgaggctgagcaggaaggattgattgagacccggagtttgtggccatgatcatacctgtgaatagccaccatgctccagcctgggcaacgaagccgagactctgtctcttttttttttgacgtggagtctcactgttgcccaggctggagtacagtggcatgatctcagctcactgccacccccgcctcccgggttcaagcgattctcctgcctcagcctccggagtagctgggtctacagatgtgcatcaccacacccagctagtttttatatttttagtagagacagggtttcaccatgttggccaggctggtctcgaactcctgacctcatcaggtgatccacctgcctcggcctccgaaagtgcagggattacaggcgtgagccactgcacccagccgaccctgtctctttaaaaaagagagcgagcgagtgaccgtagaaattatgagaccggttaggaagcagttttagaagcccctgcctaaggtgagagactgaaggaaataaatgacagggagaatgcaggaaaggagggcagagaaaggacctgtggcctgcagggtggggaagagcagagggaaaggtggcctcaggtcggagaggctggaaatggactggcctgcctgagagtggtgggttcccgctgggaggcttttgagggggtagcagtcttggggccatcaggcagtggtcaggagacttccggagtgctgctctgcaagggaatgggttagatggcagattgcacagagctgtggtgaggacatggagcaagactagcggcttgttaaagaagttgaagaaacagtcatggaacggaggagggaagctggacagcagctagagggaaccggttcaatgcttttgtttttccctgaaaataaagacttacacagatttgaaggcagaactggggcttgggcacagaaagaatataaataaggcccccgaggagaaggccccttcctggcataggatagaagaataactttgtgtttggagacatggtgcaggaatggtggaggagctgctctattattagctctattaacttaaggtagaaaggtgtcatttatcagggttgggtggcggcagggccagagccagcagtggaggctcatgagcgtggagaagatgtggaaaggctgaggaatttctcagagggtgacggactgccagctgccctgaggttgctcttacttgttacagtggacaagctgctttgctagcgtgcagatggagaaggcgggcccgggaggcttggagtttggcccaggagctggcaggtgcccagcagcagtttcactgcccgcttcaggcgactctccactggcttccctgggagccttccgttaggagatgctctctcaagatccccgtcaccagggctttctggttggaatgaggcaaggacctgctttacacggtgcgccccattacccaacagcgtttcctgtccttgctggccacagccatcacagtggggctgtcatcagccactttaaacaggcaaaacgtatttacctgtcagggaaaataccaagatcacaaaggtggttttcccagggcaaggttcgtccattgcactccagatgtgctgacccctgcgatttcttcatatgtggggaactgcactcacactctccccagcaatacaaataaataagtaggctgggcacagtggcccatgcctgtaagcactttgggaggccagggcagtaagattgcttgaggccaggagttgaagaccagtgtgggcaacatagcaatacctcctctctaccaaaaaaaaaaaaaaaaaaaaaaaaaaaaaaa

SEQ ID NO: 505 - DNA, 2511 bp, Homo sapiens
ggcacgagagaggatccgggttcggttgctctggcgagggctccagcatcacaggcggcggctgcgggcgcagagcggagatgcagcggcttggggccaccctgctgtgcctgctgctggcggcggcggtccccacggcccccgcgcccgctccgacggcgacctcggctccagtcaagcccggcccggctctcagctacccgcagaggaggccaccctcaatgagatgttccgcgaggttgaggaactgatggaggacacgcagcacaaattgcgcagcggtggaagagatggaggcagaagaagctgctgctaaaagcatcatcagaagtgaacctggcaaacttacctcccagctatcacaatgagaccaacacagacacgaaggttggaaataataccatccatgtgcaccgagaaattcacaagataaccaacaaccagactggacaaatggtcttttcagagacagttatcacatctgtgggagacgaagaaggcagaaggagccacgagtgcatcatcgacgaggactgtgggcccagcatgtactgccagtttgccagcttccagtacacctgccagccatgccggggccagaggatgctctgcacccgggacagtgagtgctgtggagaccagctgtgtgtctggggtcactgcaccaaaatggccaccaggggcagcaatgggaccatctgtgacaaccagagggactgccagccggggctgtgctgtgccttccagagaggcctgctgttccctgtgtgcacacccctgcccgtggagggcgagctttgccatgaccccgccagccggcttctggacctcatcacctgggagctagagcctgatggagccttggaccgatgcccttgtgccagtggcctcctctgccagccccacagccacagcctggtgtatgtgtgcaagccgaccttcgtggggagccgtgaccaagatggggagatcctgctgcccagagaggtccccgatgagtatgaagttggcagcttcatggaggaggtgcgccaggagctggaggacctggagaggagcctgactgaagagatggcgctgggggagcctgcggctgccgccgctgcactgctgggaggggaagagatttagatctggaccaggctgtgggtagatgtgcaatagaaatagctaatttatttccccaggtgtgtgctttaggcgtgggctgaccaggcttcttcctacatcttcttcccagtaagtttcccctctggcttgacagcatgaggtgttgtgcatttgttcagctcccccaggctgttctccaggcttcacagtctggtgcttgggagagtcaggcagggttaaactgcaggagcagtttggcacccctgtccagattattggctgctttgcctctaccagttggcagacagccgtttgttctacatggctttgataattgtttgaggggaggagatggaaacaatgtggagtctccctctgattggttttggggaaatgtggagaagagtgccctgctttgcaaacatcaacctggcaaaaatgcaacaaatgaattttccacgcagttctttcccatgggcataggtaagctgtgccttcagctgttgcagatgaaatgttctgttcaccctgcattacatgtgtttattcatccagcagtgttgctcagctcctacctctgtgccagggcagcattttcatatccaagatcaattccctctctcagcacagcctggggagggggtcattgttctcctcgtccatcagggatctcagaggctcagagactgcaagctgcttgcccaagtcacacagctagtgaagaccagagcagtttcatctggttgtgactctaagctcagtgctctctccactaccccacaccagccttggtgccaccaaaagtgctccccaaaaggaaggagaatgggatttttcttttgaggcatgcacatctggaattaaggtcaaactaattctcacatccctctaaaagtaaactactgttaggaacagcagtgttctcacagtgtggggcagccgtccttctaatgaagacaatgatattgacactgtccctctttggcagttgccattagtaactttgaaaggtatatgactgagcgtagcatacaggttaacctgcagaaacagtacttaggtaattgtagggcgaggattataaatgaaatttgcaaaatcacttagcagcaactgaagacaattatcaaccacgtggagaaaatcaaaccgagcagtgctgtgtgaaacatggttgtaatatgcgactgcgaacactgaactctacgccactccacaaatgatgttttcaggtgtcatggactgttgccaccatgtattcatccagagttcttaaagtttaaagttgcacatgattgtataagcatgctttctttgagttttaaattatgtataaacataagttgcatttagaaatcaagcataaatcacttcaactgctaaaaaaaaaaaaaaaaaaaa

SEQ ID NO: 506 - DNA, 2541 bp, Homo sapiens
gggagtgaaggcctggttacctctccagtgaagattagccccatagagcttactctatggggaagaacttttctgactccttcctgtctagggagtgcgtgatcagaatggtgtctggacggttctacttgtcctgcctgctgctggggtccctgggctctatgtgcatcctcttcactatctactggatgcagtactggcgtggtggctttgcctggaatggcagcatctacatgttcaactggcacccagtgcttatggttgctggcatggtggtattctatggaggtgcgtcactggtgtaccgcctgccccagtcgtgggtggggcccaaactgccctggaaactcctccatgcagcgctgcacctgatggccttcgtcctcactgttgtggggctggttgctgtctttacgtttcacaaccatggaaggactgccaacctctactcccttcacagctggctgggcatcaccactgtcttcctcttcgcctgccagtggttcctgggctttgctgtcttcctcctgccctgggcgtccatgtggctgcgcagcctcctaaaacctatccacgtcttttttggagccgccatcctctctctgtccatcgcatccgtcatttcgggcattaatgagaagcttttcttcagtttgaaaaacaccaccaggccataccacagcctgcccagtgaggcggtctttgccaacagcaccgggatgctggtggtggcctttgggctgctggtgctctacatccttctggcttcatcttggaagcgcccagagccggggatcctgaccgacagacagcccctgctgcatgatggggagtgaagcagcaggaaggggctcccaagagctcctggtggtgcagcctgtgctcccctcagaagctctgctcttcccagggctcccggctggtttcagcaggcgactttcttccaatgctgggcccagacttcttgcctgggtgctggcctgccctctccggccgcttgctgcctgtctgctttccttggtggctttgcctgggtgctgggcctgccctctccggccgcttgctgcctgtctgctttccttggtggctttgcctgggtgctgggcctgccttctctggctgcttgctgcctgtctgctttccttggtggctttggcttctgcactccttggcgtcagcctctcaggtcctccattcacacgaggtcctcctcgctctggccgctcttgctgctcctgtctgaagaaatcagactgatttcctcttaagactcctagggatgtggtgaagagctgggactcaagtgcagtccacggtgtgaaacatgagggaggtgaggtgtccgtccacttcccccataaaggtgtgcatttcagttaggctgccccgccacagagcaggcttcatctgctctgccatccagccccatctggatgtgaggtggggtggagacatcatggggtgattgcagaaagggggagtggcggcccacgcagcttctgctgaggagctgaccgctctgagctgttctgtttcgtattgctgctctgtgtctgcatgtattgtgaccgtgcggctccacctcttccagctgctgctacagctgaggcctggatcccggcctttccctgtgacttacgtgtctgtcaccggcaggcagccctacaaatcctggtgacctgctctcccaagaacagagcctgtccccagatgtcccagtagcgatgagtaacagaggtggctgtggacttcctctacttctccttgctggatcagggccttcctgcctcccgctgggcaggtctggccttgctctcttggcagggccccagcccctctgaccactctgcagctcaccatgcagctgatgccaaagttgtggtgtccagtgtgcagcagccctgggagccactgccaccttcagaggggttccttgctgagacccacattgcttcacctggccccaccatggctgcttgcctggcccaacctagcgttctgtgccatgctagagcttgagctgttgctcttcttcaggggaggaaatagggtggagagcgggaagggtcttgctcctaagtgttgctgctgtggcttttttgccttctccaaagacgcactgccaggtcccaagcttcagactgctgtgcttagtaagcaagtgagaagcctggggtttggagcccacctactctctggcagcatcagcatcctactcctggcaacatcaggccaacgtccaccccagcctcacattgccagatgttggcagaagggctaatattgaccgtcttgactggctggagccttcaaagccactgggatgtcctccaggcacctgggtcccatgaccagctccccgtctccataggggtaggcatttcactggtttatgaagctcgagtttcattaaatatgttaagaatcaaagctgtctttgttcaggctgctataacaaaaatataatagcctgggtggcttaaaaaaaaaaaaaaaaaaaaaaaaaaaaaaaaaaaaaaaaaaaaaaaaaagaggggggag

SEQ ID NO: 507 - DNA, 1681 bp, Homo sapiens
tctctgggccaatatggcagcgcccagcaacaagacagagctggcctggagtccgcggctggccgcgtgagtaggtgattgtctgacaagcagaggcatgagctgggtccaggccaccctactggcccgaggcctctgtagggcctggggaggcacctgcggggccgccctcacaggaacctccatctctcaggtccctcgccggctccctcggggcctccactgcagcgcagctgcccatagctctgaacagtccctggttcccagcccaccggaaccccggcagaggcccaccaaggctctggtgccctttgaggacctgtttgggcaggcgcctggtggggaacgggacaaggcgagcttcctgcagacggtgcagaaatttgcggagcacagcgtgcgtaagcggggccacattgacttcatctacctggccctgcgcaagatgcgggagtatggtgtcgagcgggacctggctgtgtacaaccagctgctcaacatcttccccaaggaggtcttccggcctcgcaacatcatccagcgcatcttcgtccactaccctcggcagcaggagtgtgggattgctgtcctggagcagatggagaaccacggtgtgatgcccaacaaggagacggagttcctgctgattcagatctttggacgcaaaagctaccccatgctcaagttggtgcgcctgaagctgtggttccctcgattcatgaacgtcaaccccttcccagtgccccgggacctgccccaggaccctgtggagctggccatgtttggcctgcggcacatggagcctgaccttagtgccagggtcaccatctaccaggttcctttgcccaaagactcaacaggtgcagcagatcccccccagccccacatcgtaggaatccagagtcccgatcagcaggccgccctggcccgccacaatccagcccggcctgtctttgttgagggccccttctccctgtggctccgcaacaagtgtgtgtattaccacatcctcagagctgacttgctgcccccggaggagagggaagtggaagagacgccggaggagtggaacctctactacccgatgcagctggacctggagtatgtgaggagtggctgggacaactacgagtttgacatcaatgaagtggaggaaggccctgtcttcgccatgtgcatggcgggtgctcatgaccaggcgacgatggctaagtggatccagggcctgcaggagaccaacccaaccctggcccagatccccgtggtcttccgcctcgccgggtccacccgggagctccagacatcctctgcagggctggaggagccgcccctgcccgaggaccaccaggaagaagacgacaacctgcagcgacagcagcagggccagagctagtctgagccggcgcgagggcacgggctgtggcccgaggaggcggtggactgaaggcatgagatgccctttgagtgtacagcaaatcaatgttttcctgcttggggctctcttccctcatctctagcagtatggcatcccctccccaggatctcgggctgccagcgatgggcaggcgagacccctccagaatctgcaggcgcctctggttctccgaattcaaataaaaaggggcgggagcgctgttggttgtgcgcaaaaaaaaaaaaaaaaaaaaaaaaaaaaaaaaaa

SEQ ID NO: 508 - DNA, 1937 bp, Homo sapiens; identical to SEQ ID NO: 72

SEQ ID NO: 509 - DNA, 712 bp, Homo sapiens
  misc_feature (408)..(408): n equals a,t,g, or c
  misc_feature (438)..(438): n equals a,t,g, or c
gttttttttttttttttttgagacagagtctccctctgttacccagggtggagtgcagkggggcaatctcggttcactgcaaccaccacctycctgggttcaagcgattatccttgccttagcytcctgagtagttgggatcacaggtgagckccaccayaccsagctgrttttgtatttttagtgaaaatggggtttcagcatgttggccaggctggtctccaactcctgacctcaagtgatctgcccatcttggcctcccaaagtgctgggattacaggtgtgaactaccgcatccggcctctttctatttttgtctggtgcttttgatctaatttgttttgaaattccgtaaaaagtaatcatcattacttagtaaacagaatccccaacatatttaccaatttnccttgctcatcawttaaaattttatctcantctgtctttctgggtttttctttttgctgattcacatcctttagaaatcttccagtgagtctatgaaaaaaaccttatctttgtctgaaaatgtctttattttgccccactcttaattgctacttttcctctatcagtttgraggtattattctcctgtcttctgacatcttgtgsccaatcatctttccttttaggtagcatgtcttttctgtttttcttttctttccttccctcccttccttcttttcaagatttctgttttgcctcgtgcc

SEQ ID NO: 510 - DNA, 565 bp, Homo sapiens
  misc_feature (523)..(523): n equals a,t,g, or c
cctgtctatgtgctcaaggacagtggcttccttgccaagggctgtatctgttgcaggagatgaaggagccctgtgtgcctgaggacagtggcttccttgccaagggctgtccctgtagcaggggaaagcctttcaggaccctttcttagagaaataggtctcaaagtgaatgaatatacctcctcacatactcaccaagcagcctgcagaggatacagctttccatgtggctcagggaacagttgatatcaacagtctctcaatttctttattattattatactttaagttctgggatacatgtgcagaacgtgcagcgttgttacataggtatatatgtgccatggtggtttgctgcacccatcaacctgtcatctacattgggtatttctyctaatgctatccytccccttgcccccaacctyccaacaggcaccggtgtgtgatgttcccytccctgtgtccatatgttctcawtgktcaacttccacttatgagtgagaacatgcagtgtttggttttntgttcctgtgttagtttgctgagaatgatggtttccagtgtc

SEQ ID NO: 511 - DNA, 537 bp, Homo sapiens
aggggcaatgggagaagaattatcagagtgtgtgtgctctggggattgtgcatgggggttgggagaaagacatgaaaaaggagatatgtggatcctcagtgtccccaaaggtggtctaaggtgtgtgggcatgtgtttatccagaaaaagaggacaggtttggcattttatttatatatatatactttttttttttgtgacagagttagactctgtctcaaaaagaaaaaaaaaattcagcccaaagccaggtgtggtggctcacacccagaattccagcactttgagaggctgaagtggggaggattgcttaacctcaggagttcaagaccagcctaggcaacatagcaagaccccagccctacaaaatttttttttaaattagttgggcatggtggcttgcacctgtagtaccagttacttggaagactgaggtgggaggatagcttgagcctaggaggttgaggctgcagtgatcatgcttcagctagggtgacagagtgagactgtattaaaaaaaaaaaaaaaaaactcgta

SEQ ID NO: 512 - DNA, 441 bp, Homo sapiens
gaattcggcacgagttggcctcttgaactccaaggaagaggtgaataaccaaacccctgcaaggacaggcagggatggaattgggcctcactaacccctggaagccaggatgtccatgctgccaggatcctctctctgcatctcctttctgtttttatctgctttgtcttcattctctttcacagaaaaccaggcttgctacaaacagcagccctcaggaactgagttaacatgttatgatttgctgcaggaacctagaagctcccagatctgtgagcttccttggctcaagttggtcaggggagtcttgaagggtgtccagttctamtctcaaaggcctctggggtgggtggtgargcttctgttacacaggctgaacctgargtcaktgargatttccawaatctcagacccaaggccataaagacgttggaatgtcaa

SEQ ID NO: 513 - DNA, 478 bp, Homo sapiens
ggcacgaggagaacctcatattccttagtcatctgatataactgcagggagggagtagatattggaaagccattagtcctatttattacatgaggaaaatgaaggtcaaagaagtgaaaagggattgtggggatattcgctcatgagaagcactgggctcttcttaggacaaggttagcctcacgtgtactcagctgcccgtttcaggtttttttttttgtttgtttgtttgttttttttttgacggagtttcactctttggcccaggctagagtgcaatggtgtgatctcagcccactgcaacctccgccccctgggttcaagtgattcctgcctcagcctcccagctactcgggaggctgaggcaggagaattgcttgaacccaggaggcggaggttgcaacactgcactccagcctgagtgacaagattgagactcggtctcaaaaaaaaaaaaaagaaaaaaaaaaaaaaaaaa

SEQ ID NO: 514 - DNA, 1966 bp, Homo sapiens
  misc_feature (1182)..(1182): n equals a,t,g, or c
  misc_feature (1399)..(1399): n equals a,t,g, or c
  misc_feature (1950)..(1950): n equals a,t,g, or c
ggaaggggctgcagttctccaaggattcccgcctgctcccagacccccgggagtcgtaggaacccgttcctggacgctgacgtcggctttcagggatccctcgccggacgccgcggagggacagagcctgggaagccgtcgccccgccccgtccccgcccccgcgcgcagcggcccggggcgctgagacccgcgtagagcaaagcgcaaggtcccagcgccccttggatcctcggtggcagggtccgggcaagtgtcattgcgagggttcaggaagccccggcctgtgatcgtgagcggaaacccctcctggagtttccccaaagccatggacagccctagtcttcgtgagcttcaacagcctctgctggagggcacagaatgtgagacccctgcccagaagcctggcaggcatgagctggggtcccccttaagagagatagcctttgccgagtccctgaggggtttgcagttcctgtcaccgcctcttccctccgtgagcgctggcctgggggaaccaaggccccctgatgttgaggacatgtcatccagtgacagtgactcggactgggatggaggcagccgtctttcaccatttctaccccacgaccacctcggcttggctgtcttctccatgctgtgttgtttctggcccgttggcatcgctgccttctgtctagcccagaagaccaacaaggcttgggccaagggggacatccagggggcaggggccgcctcccgccgtgccttcctgctgggggtcctcgccgtcgggctgggcgtgtgcacgtatgcggctgccctggtgaccctggctgcctaccttgcctcccgagacccgccctagttgcccctacagccctcactgtgaaccctgaggccggcagcccagcaaatctgtgggcagagagtggagaatcttggtggatgaggctgcggcggcggcaggagcatctagaaacgggagcgagctggactggaacccttccccttcctggccaccgctcttcgggcggcagcaacctgagattaaacaccagacacccttgcagccaaaaaaaaaaaaaaaaaaaaaaaaaaaaaaaaaaagggcggccgcccttttttttttttttttttttttttggtagggataarggcagttgtgagaaattgggctaggtaagctggcaaatgaccaggncactgaaattgggcaaggttgtctactgaaagtgaagaggtttgggatttgagtagagccctgaggagagtggtgaaaggtttgaaattgtgtttgaagaggctggaaagagaaccatctaatgataagtaaaaggattggagagtaatttgtagcggtacagactctgcagttgygattaccwtttttttttaactcagtgagtggtactcagccncctgaataaaggactaatgagtatattttagtattgattgaggattctgtttttgctgggtaggtgcagtagaaaatatagcagtctaagggaattgaggatgcagtgagagaataataaattgtgatggtgagtgctgaatagggaaagacaagaagccagaaaaagactgagcttcttaggaaaacattaatggatcacaaacttggagggctgtatggtttttcatttaagaaagtaattgtcgtgcaataaagttattaagccttgttyaagaatatttttattttgtacatcaagtggagttggaaatagttggtttcataatgatatatttcaaaagtatcttgaagtcatctggttcatttcactacccagggcacacattcctcctgtaacatcccaagtggttattaagcaaaacagatttattttatttagaaaaaattagtatgactgatttgctattgattttgtacttctataataaatgtgatacatgctatattcaaaaaaaaaaaaaaaaaaaaaaaaaaaaaaaaaaaaaaaanaaaaaagggcggccgc

SEQ ID NO: 515 - DNA, 2091 bp, Homo sapiens
  misc_feature (8)..(9): n equals a,t,g, or c
  misc_feature (28)..(29): n equals a,t,g, or c
  misc_feature (34)..(34): n equals a,t,g, or c
  misc_feature (40)..(41): n equals a,t,g, or c
  misc_feature (43)..(43): n equals a,t,g, or c
  misc_feature (51)..(51): n equals a,t,g, or c
  misc_feature (57)..(58): n equals a,t,g, or c
  misc_feature (61)..(61): n equals a,t,g, or c
  misc_feature (66)..(66): n equals a,t,g, or c
  misc_feature (68)..(68): n equals a,t,g, or c
  misc_feature (70)..(70): n equals a,t,g, or c
  misc_feature (72)..(72): n equals a,t,g, or c
  misc_feature (83)..(83): n equals a,t,g, or c
  misc_feature (86)..(86): n equals a,t,g, or c
  misc_feature (88)..(88): n equals a,t,g, or c
  misc_feature (95)..(95): n equals a,t,g, or c
  misc_feature (97)..(97): n equals a,t,g, or c
  misc_feature (104)..(104): n equals a,t,g, or c
  misc_feature (107)..(107): n equals a,t,g, or c
  misc_feature (109)..(109): n equals a,t,g, or c
  misc_feature (115)..(115): n equals a,t,g, or c
  misc_feature (127)..(127): n equals a,t,g, or c
  misc_feature (133)..(133): n equals a,t,g, or c
  misc_feature (157)..(157): n equals a,t,g, or c
  misc_feature (219)..(219): n equals a,t,g, or c
  misc_feature (231)..(231): n equals a,t,g, or c
  misc_feature (250)..(250): n equals a,t,g, or c
  misc_feature (263)..(263): n equals a,t,g, or c
  misc_feature (298)..(298): n equals a,t,g, or c
  misc_feature (342)..(342): n equals a,t,g, or c
cctcttannagctctctaggccacgctnnagaancggctnncngtttgacncggganncanttatngncncnacccacgcgtncgnanacagttngncctggantgntnccgaancccaatggggcnggctgncaactcacagggtgtccatgctgntcacagaggagtgtgacaaggtgcgggacctgatgcacgtgcactcgttcagctatgacttncatctgcgcctngtgcatcagcacgtgctangtgcccatctggngctgcggcacggataccacctcaccacctttctgngacactttctggcccaccaccctgacggaccccactttggccgnaatcacatggcacgagggacattggagctccccacaccactcattgctgcccaccagctatacaactacgtggctgatcacgccagctcttaccacatgaagccattgcgaatggcccggccagggggcccagaacacaacgagtatgccctggtgtcggcatggcacagttctggctcctacctggactctgagggacttcgacaccaggatgactttgatgtgtctctgcttgtctgtcactgtgctgcaccctttgaggagcaaggagaggctgagcggcacgttctgcggctacagttcttcgtggtgctcaccagccagcgagagctcttccccaggctcactgctgacatgcgccgcttccggaagccacccagactgccccctgagccagaggctcctgggagttcagctggcagccctggggaggcctcagggcttattctagcgcctggaccggctcctctgttcccaccactggctgcagaggtgggcatggcacgagcacggctggctcagctggtgcggctggctggagggcactgccgtcgggacaccctttggaagcgcctcttcttgctggagccaccggggcctgatcgactgcggctaggggggcgcctggccctggcagagctggaggaactcctagaagcagtccatgccaaatccattggggacatcgacccccagctggactgcttcctatccatgacggtctcctggtaccagagcctgatcaaagttctcctaagccgcttcccccagagctgtcgccatttccaaagcccagacttgggaactcagtacctggttgtgctgaatcagaagttcacctgactgctttgtgctagtgtttctggactcccacttaggaaagacgtcttctgacagtggttttccgagaagcccttcccagtacagccccaggacaagcgaaaagccccccctgcccaactggtctccacctaccaccacctggagtctgtcatcaacacaggcctgtttcacccttctggacccgcctcctctgaagggagtggactggaccactgaatgtcactgttccttgaatcatgggcctaccagattgcctgccagaggcaggactgaccagcccttctgggccccagggcaagccagacactgagtgacaccaaaggctttgtaactatgtcttgagggtctgctgccccagcctggcagcaggaaccgccctccccaaacacccacagccactgacccatccaggactccagagagtcaggtcaaccccgaggaccccttgggcccttctggggtactcctttcggcccccctggtagagtctcgggagttcacacagggtggcaaacaccccctagagctcctctgcctgaatcctgccccctagcctttgaccactgtcagccacctgtgtcccttgagccttcgggtcttcacttcccacttggacatcactgctggacattcccatcgagatgacacctgggttccaatcccagctctgcctttgaagcacttgcggccaccgtcaagtccctttgctctcggaccctgggtttctcatcctttaatgaggtgggttcagaagctctcccatcttcacagcaaccctggcactggcttctcaatgggagggaagtcagcagagaaactgaagtgttagacactatgtgtcccaccaccccattacagagacatatgacaatgaaaaaaaaaaaaaaaaaaaaaaaaaaaaaaaaa

SEQ ID NO: 516 - DNA, 745 bp, Homo sapiens
cggcacgagtgtaatgctaacaagaagtctgaaaaccctgccaagcgcctgtactgcttttttgcttctcttttttctgttctcgtccggggatcccgagctgtcctgcagctgtaccctgagaactcagagcagttggagctgatcacaacccaggccacaaaggcaggcttctccggtggcatggtggtagactaccctaacagtgccaaagcaaagaaattctacctctgcttgttttctgggccttcgacctttataccagaggggctgagtgaaaatcaggatgaagttgaacccagggagtctgtgttcaccaatgagaggttcccattaaggatgtcgaggcggggaatggtgaggaagagtcgggcatgggtgctggagaagaaggagcggcacaggcgccagggcagggaagtcagacctgacacccagtacaccggccgcaagcgcaagccccgcttctaagtcaccacgcggttctggaaaggcacttgcctctgcacttttctatattgttcagctgacaaagtagtattttagaaaagttctaaagttataaaaatgttttctgcagtaaaaaaaaagttctytgggccgggcgtggtggctcacacctgtaatcccagcaccttgggaggctgaggtgggaggatcatttgaggccaggagtttgagacctgcctgggcaacataatgaaacttcctttccagggagaaaaaaaaaaaaaaaaaaaaaaaa

SEQ ID NO: 517 - DNA, 4763 bp, Homo sapiens
ggcacgaggcccgaacccgcggcgcggccacgcggtgccgcccaccctggtgccgctcatgaacggctcggccacgccgctgcccaccgcgctcggcctcggcggccgcgctgccgcctccttagccgcggtgtccggaaccgcggccgccagcctgggctccgcgcagcccaccgatctgggcgcccacaagcggccggcatccgtgtcgagcagcgctgccgtggagcacgagcagcgtgaggcggcagccaaggagaaacaaccgccgccgcctgcgcaccggggcccggccgacagcctgtccaccgcggccggggccgccgagctgagcgcggaaggtgcgggcaagagccgcgggtttggagagcaggactgggtcaacaggcccaagaccgtgcgcgacacgctgctggcgctgcaccagcacggccactcggggcccttcgagagcaagtttaagaaggagccggccctgactgcaggcaggttgttgggtttcgaggccaacggggccaacgggtctaaagcaggtaggggcggctgtgaagtgagggggtctaggggagaaaaggggacggagagcagaggaagggtggttctttggattcaccattttaccccagcccagaaacaacaaacaccccacttcctgatctgcctgaggcggaaccagtgcttggtggcaacgtgttcatgtcctgaagcagcataacaaagaatgagtcagactgggctgatacgctctgacacggggttttcctttcccagcacattcttggatgggagcatgagggcaccagtcaccttttaacctattgggggacattagcagtcacatgttgagtgcaaacgagggtacttttgtgcatgtgtacaaacaggcagttacaagcgtgtcattttcagtggctccattttaaatcagtctgctgcctcagaatcccgtacgcctgaaggttttaagttgcatgtgcacctgaaactcgtatatgagtattttctgtctgtgcttttagagaggaggaattctgtaacgacttttgtttcgggttaggaagagaatgatctctttcagtgcaccgccacttatgttacctttttccttttatttctttgtgtttccagttgcaagaacagcaaggaaaaggaagccctctccagaaccagaaggtgaagtcgggccccctaagatcaacggagaggcccagccgtggctgtccacatccacagaggggctcaagatccccatgactcctacatcctcttttgtgtctccgccaccacccactgcctcacctcattccaaccggaccacaccgcctgaagcggcccagaatggccagtcccccatggcagccctgatcttagtagcagacaatgcagggggcagtcatgcctcaaaagatgccaaccaggttcactccactaccaggaggaatagcaacagtccgccctctccgtcctctatgaaccaaagaaggctgggccccagagaggtggggggccagggagcaggcaacacaggaggactggagccagtgcaccctgccagcctcccggactcctctctggcaaccagtgccccgctgtgctgcaccctctgccacgagcggctggaggacacccattttgtgcagtgcccgtccgtcccttcgcacaagttctgcttcccttgctccagacaaagcatcaaacagcagggagctagtggagaggtctattgtcccagtggggaaaaatgccctcttgtgggctccaatgtcccctgggcctttatgcaaggggaaattgcaaccatccttgctggagatgtgaaagtgaaaaaagagagagactcgtgacttttccggtttcagaaaaacccaatgattacccttaattaaaactgcttgaattgtatatatatctccatatatatatatatccaagacaagggaaatgtagacttcataaacatggctgtataattttgattttttttgaatacattgtgtttctatattttttttgacgacaaaaggtatgtacttataaagacatttttttcttttgttaacgttattagcatatctttgtgctttattatcctggtgacagttaccgttctatgtaggctgtgacttgcgctgcttttttagagcacttggcaaatcagaaatgcttctagctgtatttgtatgcacttattttaaaaagaaaaaaaaagccaaatacattttctgacattgtaagattgccttactgtctgtcattccttattgctggcccctttctcaggccggaggccaagtggtggagaaggaaaggaaatgatcgaacgggcatgttgtcaagtgggcatgccactgggaaataccaccagtttaccctgaaacattgtcctcagaggagtaggaaagtggattttgaatctctattttgctcaaaagttcagttcctgagatactgatgactgagagtgctgctgggaaattttcaggattgtgtggtcttttggggttttttgtttttttttttttaagacaaagttgaccgctgttcactgtccacgtgatcagttgtaagattacaatgctgcatgctagttggttacataagatacaattccagtgatggaaggcggttataatggatggtggtgtgtacaagatggcactgccatctttgagcagagcccagctctgcagcgccacttcatctttttaaacaccctagaggtctgtttgttgttgctgttgtcctttattttgaaagagttgcaagagaagttacagtccaggtgaacttggagattgtgggattggttttgtttctgttttgttttgtttatcatttacctgtagtgctattgctgttgatactatcacctataccctgtttctagtgagtgctgaatacagtatggtacaatgacagtaacagccgcgtggtgctgccaggactgcccttgggcatatcagtgacagcccaaatgtgggtggaggaaacctgtaatttccttcttaacatgtgtttgaaataccaagtgaataatactgttctggaaaaaaatgataaactagtggaaattaaagaaattaagggttttatataatagacaggccccacctctcaaaatatttttagaagtctttttgtaaactaatttcttttgatcactattttgcatcagtaaaatgatttttttaaaaccaataaatcatcaattattagaaatagttgtctcacagtgatactggtttttcttttgtgctgttatgatttaacattgacaggaacactattttaaatccttacgttcaggtgtttgtaacttggccttataattaggctgaattatggcttcaaggtctacaatttatgtgtatggttcacagcctagcttctatttacatttgaaaatacagatttttaccaactttggattcttttttagttatatgtttgtctttcctttttaaattgttcaaaactattttttaatggtcaagttactaacacttgaaaatcagatactgcaccaaatacagtgtttttccgtagtgtttttaatgagtgcacctattactactgtgcgagaattcatgttttaccagtcattgttatattacaaacagacttgcatgattaaccagttgttacacttactttttcaagttggagtatatatgactcagtgcagactggtctctcttatgtgaatgcacacatgcagaaatgcagagtcaattttacatgcccataaagacatttgtaaagaattcagctcttatggtctgttgtataaatgtgtatctaggcactttattataactggaatttgacctcacagatgttacaacttgatcagtcgtttgacctaatttgtggtagctatctgtatgttttgcaatcttaatacagacatgctttccaaaaagattaatacagaaccatcctgccgttttggataagtctatccagctgtggaaagggcaacctgtggtttctctgtactggtgtttaatgggggaagaatatgaacagctttaaagagctgtgtattgtggttactactattaaaaaataagatctgcacgagtctgactggcctttgggtggcctttgtggacggctcgtagctggaaagtgttgatctgggttttctggcattcttttaagttaaaaagttaacatcgggacatgggtttaatcttttgttgtacctgatgacagtgcagagattctccacagctggataaaaatgtcacaaagctacttactgtacatgggcagtatcagatttcaaatcctaatatttcagctgtgcttttaatactcaaaatattaggggatggggtgttgaagctttcccttttttgcttttaacaatttatagaatttaacagatgtactgtctttcatgtggcctcacatttaaagttatgagaacatacacatggtttacaacttttactatatacctttccttggccaccaagtattttaaaagtgtgccaccttttaacctttactttttttaagttgaaggtgatactttttctatatatgatgaaactcatgtcaactgaagtgagtgtaatctcagatatcaacattattatattttaaaatcacgctatggaaatatcacctgaattctgtcatttgtcagatttacagtacctttttttctttaacttttagcattaaataaaaataaaattgggagcactgaaaaaaaaaaaaaaaaaaaaaaaaaaaaaaaaaaaaaaaaaaaa

SEQ ID NO: 518 - DNA, 1141 bp, Homo sapiens
ggcacgaggaggccggggcctccgggcggcgccgtgtccgcgaccgcgtaccctgacacccccgcggaattccctccgcacctccaggcgggtgcgatgcggcgccgcttttggggcgtattcaactgtctgtgcgccggcgcgttcggggccctggccgccgcctccgccaagctggccttcggcagcaaggtggtaagaacgtcggggactagcctcttcccttaccagggacctaaaaccttttctccggttgggctagttcgctctcggggaagaactacacctcctacatccaccctctacctctcattttaagtcctttgtgcctgagcatttctctccacgtgactcttaaggtgagcatgggtttatgcgtcttaggcattattgtgatggcgagcaccaattctctgatgtggaccttctttagccggggcctcagtttctccatgtcttcagccattgcatctgtcacagtgactttttcaaatatcctcagctcggccttcctgggctatgtgctgtatggagagtgccaggaggtcttgtggtggggaggagtgttccttattctctgcggactcaccctaatccacaggaagctcccacccacctggaagccccttccacacaagcagcagtagcaccacttggctagacggaccagctggaaagatcatgatggtggcccagccttgggatgtcatgtgggactgtgtcctagggcgatccagttgtgcagccttctgaccatcagccaagggaagcaggcctctgatggagcaggctctggctctgtaaggagaggtgcagctgcagcagtgttctaccggaagtgttttgatcatctgtacagtgctttggattcttcctcccaggcctaccccagtgagccttcgcagatgctggagatcctggggttggtctgctttgtgtatggtacttgaaaccacgctgtaattattgtcctgttgccaaacaaaagccagtcatgtaactctagaagcagtgactggtggggctttctgacagttccatgctgatgtatcaggccatctgtgtcatgcttatgtattatggcaagaagaggaaaactggattaataaatacgttttttggaagtaaaaaaaaaaaaaaa

SEQ ID NO: 519 - DNA, 1010 bp, Homo sapiens
ggcacgaggagttctgtagatgtctattaggtccgcttggtgcggactgagttcaattcctgggtatccttgttgactttctgtctcgttgatctgtctaatgctgacagtggggtgttaaagtctccattattaatgtgtgggaatctaagtctctctttgtaggtcactcaggagttgctttatgaatcttggtgctcctgtattgggtgcatatatatttaggatagtcagctgttcttgttgaattgatccctttaccattatgtaatggccatctttgtctcttttgatctttgttggtttaaagtctgttttatcagagagtaggtttgcaacccctgcctttttttgttttccatttgcttggtagatcttcctccatccttagattttgagcctatgtgtgtctctgaacgtaagatgggtttcctgaatacagcacagtgatgggtcttgactcttgatccaatttgcccgtctgtgtcttttaattggagcatttagtccatttacatttaaagttaatattgttatgtgtgaatttgatcctgtcattatgatgttagctggttattttgctcattagttgatgcagtttcttcctagtctcgatggtctttacgttttggcatgattttgcagtggctggtaccggtttttcctttccatatttagcgcttccttcaggagctcttttagggcaggcctggtggtgacaaaatctctcagcatttgcttgtctgtaaagtattttatttctcctttgcttatgaagcttagtttggctggatatgaaattctgggttgaaaattcttttctttaagaatgttgaatattggcccccactctcttctggcttgtagggtttctgccgagagatccgctgttagtcttatgggcttccctttgagggtaacccgacctttctctctggctgcccttaacattttttccttcatttcaactttggtgaatctgaaaattatgtgtcttggagttgctcttc

SEQ ID NO: 520 - DNA, 910 bp, Homo sapiens
tggatcccccgggctgcaggaattcggcacgaggcgaccatggcgtatcacggcctcactgtgcctctcattgtgatgagcgtgttctggggcttcgtcggcttcttggtgccttggttcatccctaagggtcctaaccggggagttatcattaccatgttggtgacctgttcagtttgctgctatctcttttggctgattgcaattctggcccaactcaaccctctctttggaccgcaattgaaaaatgaaaccatctggtatctgaagtatcattggccttgaggaagaagacatgctctacagtgctcagtctttgaggtcacgagaagagaatgccttctagatgcaaaatcacctccaaaccagaccacttttcttgacttgcctgttttggccattagctgccttaaacgttaacagcacatttgaatgccttattctacaatgcagcgtgttttcctttgccttttttgcactttggtgaattacgtgcctccataacctgaactgtgccgactccacaaaacgattatgtactcttctgagatagaagatgctgttcttctgagagatacgttactctctccttggaatctgtggatttgaagatggctcctgccttctcacgtgggaatcagtgaagtgtttagaaactgctgcaagacaaacaagactccagtggggtggtcagtaggagagcacgttcagagggaagagccatctcaacagaatcgcaccaaactatactttcaggatgaatttcttctttctgccatcttttggaataaatattttcctcctttctatggaaatctggaaaaaaaaaaaaaaaaaaaaaaaaaaaaaaaaaaaaaaaaaaaaaaaaaaaaaaaaaaaaaaaaaaaaaaaaaaaaaaaaaaaaaaaaaa

SEQ ID NO: 521 - DNA, 1442 bp, Homo sapiens
aaccctactaaagggaacaaaagctggagctccaccgcggtggcggccgctctagaactagtggatcccccgggctgcaggaattcggcacgaggggaccttaattacatctgcaaaaaccccttcacttttgtcatataatctaatcatgggagtgacatcttggcgcattctgttggttgaaagcaagtctcataggtcccactcacgctcaaagggagtgattacacctccccttggtgagaatgtggagtttgaatacacggggtggggggcattttagagtctgtgtgctatggtttccttttttatccatttcatagggttttttatcagcaattggacaccctttccccaaaatgatttttaatcatggaaggaaaaagagaacttggaattaccttgaatttgaagaagaagaaaataaacagttagcagactcaatggcttctctggcatatctagtatttgtacagggcatccatattgatcagcttccaatggtcttaagcccattgtaccttttgcagtttaatatggggcacattgaagtctttttgcaaagaacagaagagtctgttatctccaaaggattggagctgctggagaatagtttattgagaatagaagacaatagtctactttaccagtacttagaaatcaagagttttcttactgtacctcagggcttagtgaaagtaatgacactttgccccattgagacactgaggaaaaagagtttagctatgcttcagctgtatattaacaagttgattcacaaggcaaatatacattatttaggtgcttattgaatacaagtaatcactcaggtgtggaggcttttattattcaaaatatcaaaaatcaaattgacatgtcattaaagagaacacgtaacaacaaatggtttacaggaccacagttgatttcccttcttgatttggtactttttctcccagagggtgcagaaacagatttactgcaaaactcagataggattatggcttcattaaatttattgaggtatttggttatcaaagataatgaaaatgacaatcaaactggattatggacagaacttggaaatattgagaataatttcttaaagccacttcatataggacttaatatgtcaaaagcacattatgaagcagaaattaaaaatagccaagaggcccagaaatctaaagatctttgttctataactgtaagtggagaagagatccctaatatgcctcctgaaatgcagcttaaggtcctgcattcagctcttttcacatttgatttgattgaaagtgttctagctcgagtggaagaactcattgaaataaaaacaaagtctacctctgaagaaaatattgggataaagtgaaagttccatttcctaaataaaaactaataaaatataaaaaaaaaaaaaaaaaaataaaaaaaaaaaaaaa

SEQ ID NO: 522 - DNA, 566 bp, Homo sapiens
  misc_feature (425)..(425): n equals a,t,g, or c
ggcacgagcggttgtccctgtctctcacccccttatcagccttagctgttctgtcttttacgacttctgctctttaggcaggtccaaaaggcagcatcattacctgttctatttaagcaattgtggtggtcagaaagtgcctgcttgcagagagttcctgcccacccccaccccatactcagtcctggcctgttctcagagccatctgatccctacctcatgtgataccagagatggtcctgctgctgctgctgctgctgtggccgccaggagagacagcaggtggtagggccgtcagtcagtggttgtggggattcagggccctgaactgggacctaggagatccaaaaaggtcagggaagttgctggtcttggccaaatgggccgtgctgtaggcatcagtggtggctgtctcaggccgactngccacagatatgtgcartctgctctcaggatcargcamacgactttgggggtcaggtacaagagtaccamtccaaktgtgggcttkttaagaackgttttcttttgargcagggtcycctattcccartcatagctcatgg

SEQ ID NO: 523 - DNA, 2654 bp, Homo sapiens
  misc_feature (18)..(18): n equals a,t,g, or c
  misc_feature (43)..(43): n equals a,t,g, or c
  misc_feature (65)..(65): n equals a,t,g, or c
  misc_feature (85)..(85): n equals a,t,g, or c
atgatgttccatttactnggttcaccaaaaaccaccgactaangttcctttaacccatggcgggnaacattctggcgctggaaangatcaacgaacattctgcacctgcaaattagctggggtggatgggcgctggcagccggattgccgggcatcattatgctgctggtcaccccgctggtgatttacaccatgtatccaccagaaattaagaaggtggataacaaaaccatcgctaaagcgggccttgccgaactaggaccgatgaaaatccgcgaaaaaatgctgctcggtgtctttgtgctggcgctgctgggctggattttcagtaagtctctgggggttgatgaatccaccgtggcaatcgttgttatggcaaccatgctgctgctgggtatcgttacctgggaagacgtggtttaaaaataaaggcggctggaataccttaatctggtacggcggtattatcggcttaagctccttattatcgaaagttaaattcttcgaatggttagctgaagtctttaaaaataacctggcatttgatggtcacggtaacgttgactttcttcgttattattttcctcagcattatcgtgcgttatttcttctcttccggtagtgcctatatcgttgctatgttaccggtatttgccatgctggcgaacgtctccggcgcaccgttaatgttaaccgcgctggcactgttgttctccaactcctatggcggcatggttactcactatggcggcgcggcaggtccggtcatctttggcgtgggttataacgatattaaatcctggtggttggtcggtgcggtactgacgatattaaccttcctggtgcatatcaccctcggcgtgtggtggtggaatatgctgatcggctggaacatgctgtaaatattctcgtcatacttcaagttgcatgtgctgcgtctgcgttcgctcaccccagtcacttacttatgtaagctcctggggattcactcgcttgtcgccttcctgcaactcgaattatttagagtatatccatttattatctttctgcgcacttcacggtgcgcagatatctggagcatttgatgatcaagttatctgaaaaaggcgtgtttctcgccagtaataacgaaataattgccgaagaacatttcaccggcgaaattaaaaaagaagaagccaaaaaaggcactattgcctggtctattctctcttcgcataatacgtccggaaatatggataaacttaaaattaagtttgattcattagcctctcacgatattacctttgttggtattgtacagaccgctaaagcgtccggtatggaacgtttcccgctgccgtatgtgctgaccaactgccataactcactctgcgccgtcggcggcactattaacggtgatgaccatgtttttggtttatcggcggcccagcgttatggcggtatttttgtgcctccgcatattgcggtcatccatcaatatatgcgtgagatgatggcaggcggcggcaaaatgatcctcgggtcagacagccacacccgttacggtgcattagggacaatggcagtcggtgagggcggcggtgagttggtaaaacagctgcttaatgacacctgggatatcgactatccgggcgtggttgcggtgcatctgaccggaaaacctgcgccgtatgtggggccacaggatgtggcgctggctatcattggcgcggtgttcaaaaacggttacgtcaaaaacaaagtcatggagttcgttggaccgggcgttagcgcgctctctaccgatttccgtaacagcgttgacgtgatgaccactgaaacgacctgtttaagttctgtctggcaaaccgatgaagaagtccataactggctggcgctgcacggtcgcggccaggattactgccagcttaaccctcaaccgatggcgtactacgatggctgcatcagcgttgatttaagcgccatcaaaccaatgattgcgctgccgttccacccgagcaacgtgtatgaaatcgacacactgaaccagaacctgaccgacattctgcgtgagattgaaattgagtccgaacgcgtggcgcacggtaaagccaaactctcgctgctggataaagtggaaaatggtcgcctgaaagtgcagcaggggattatcgcgggctgttctggcggtaactacgaaaacgtcatcgcggcggcgaatgcactgcgcggtcaatcctgtggcaatgacaccttctcgctggcagtttacccgtcatcacagccggtgtttatggatctcgccaaaaaaggtgtggtagcagatttgattggcgcaggcgcaatcatcagaaccgcgttctgcggcccatgctttggcgcgggcgatacgccaatcaacaacggtttgagtattcgccacaccacgcgtaacttcccgaaccgcgaaggctctaagccagctaatgggcagatgtcagcggtggcgttgatggacgctcgttctatcgctgcgactgcggcaaacggtggctatttaacctctgccagcgaacttgattgctgggacaacgtgccggagtacgccttcgatgtaacgccgtataaaaaccgtgtttatcagggctttgtgaaaggggcaactcagcaaccgctgatttacgtgagtcgta

SEQ ID NO: 524 - DNA, 1311 bp, Homo sapiens
  misc_feature (103)..(103): n equals a,t,g, or c
  misc_feature (1307)..(1307): n equals a,t,g, or c
  misc_feature (1310)..(1310): n equals a,t,g, or c
gcacagccccaaaggtaccaggtgcccgcctactagcggctggcaggacagaccagggctcaaggcaccccaccaacgcaggccccagggtctccgggacctnccttgggtccttccagctcagtgccgcggacagagtaggtggccgctttggccatccggggccaagagggggtggacccgcgtgtctgggctgcccctgccaagttcccccagtccctcagcacctggccccaggactgaggtcctgagaaggggatagcactgcccaggacgtgtgtccctagcctggaatggactggcctggggaaggctttcccctcttgggccacacctgctcactctggggttgggggtccagctgccctctacgatcaggtgcaggggctgcccaggacaaagcgggggcaggggaaagacaccaccctcgccccaagactggggatcctggccactgttcccatcccatgtccctgtgggtagtgactgtctcgtttctgtcatggtggtgcgtcccgtccggagccactctccactttctctcacaggctgctagaacagcccagccctgtcagtgttgtgatcatggtccagtcttcgggtttcacctcctagtactccacaagctgctcctctctctgtggccccggcccctgcccaggtgtgggtggttctggccaggaaggcacaaggtagctgtgggccaagacaccagccctgtcctagcccttcagtaagaccttgccaggagaggagaaggatgcctgggtgccaggcaagacaagcccctcagcaggagagaggcccagaggctccagctggccaccgtgccccacaagatggcccctgtgtggttccctttaccttggcttcctggcccagtccctgcctctccacctgcaccctgcttcctggcccagtcccaggttggagtccctctgcatagctgactactcatgcattgctcaaagctggcttttcacattaagtcaacaccaaacgtggttgccacatttcatcagacagacacctccctctggagatgcagttgagtgacaaccttgttacattgtagcctagaccaattctgtgtggatatttaagtgaacatgtttacaatttttgtatatatcactctctccctctcctgaaagaccagagattgtgtattttcagtgtcccatgttccgactgcaccttctttacaataaagactgtaactgagctgaaaaaaaaaaaaaaaaaaaaaaaaaaaaaaaaaaaaaaaaaaaaaaaaaaaaaaaaaaaaaaaaaaaaaaaaaaaaaanaana

SEQ ID NO: 525 - DNA, 1104 bp, Homo sapiens
cccccgggctgcaggaattcggcacgagggaaaatggcgcctcacggcccgggtagtcttacgaccctggtgccctgggctgccgccctgctcctcgctctgggcgtggaaagggctctggcgctacccgaggtacagaagcaagtttgaggtcgggctgaagcagggtcactggccagccgtgcgtcgcgctcgccagcggctcccccttctcctcggcgggcctgcggttctgatttcgtccctgacgcttcccgaccctgcccagccagatatgcacccaatgtccagggagcgtgcaaaatttgtcaaaagtggccttttattgtaaaacgacacgagagctaatgctgcatgcccgttgctgcctgaatcagaagggcaccatcttggggctggatctccagaactgttctctggaggaccctggtccaaactttcatcaggcacataccactgtcatcatagacctgcaagcaaaccccctcaaaggtgacttggccaacaccttccgtggctttactcagctccagactctgatactgccacaacatgtcaactgtcctggaggaattaatgcctggaatactatcacctcttatatagacaaccaaatctgtcaagggcaaaagaacctttgcaataacactggggacccagaaatgtgtcctgagaatggatcttgtgtacctgatggtccaggtcttttgcagtgtgtttgtgctgatggtttccatggatacaagtgtatgcgccagggctcgttctcactgcttatgttcttcgggattctgggagccaccactctatccgtctccattctgctttgggcgacccagcgccgaaaagccaagacttcatgaactacataggtcttaccattgacctaagatcaatctgaactatcttagcccagtcagggagctctgcttcctagaaaggcatctttcgccagtggattcgcctcaaggttgaggccgccattggaagatgaaaaattgcactcccttggtgtagacaaataccagttcccattggtgttgttgcctataataaacactttttcttttttaaaaaaaaaaaaaaaaaaaactcgaggggggg

SEQ ID NO: 526 - DNA, 722 bp, Homo sapiens
gaattcggcacgagctgagacaggcaccaggaggcagcatccccacttgcacctggaaatgtaatktaaaatgcagcctctggatgggcagcggcctgcaaccattgtaggtggggatgtcaccacacagtctgcgagggcaatctctttctgctaacgctgcagctgccgtcggttaagactcgccccacatcaggctctacattggcccttcctgcggggccacttgttacattcccacaacccaagagaggttggcatgatcctcgcttaatagaagccgcctggtcagtggcttgcctggccagcaggcagcagagccaccattcggagcagcatccatgtctctgtggacaaagcacamtccaaccacagtaccgccccgtgcctctgcctctcctggctgagtmtcaccccctccactaccgcgcagagaccatcatgtaaacaggaatgtattttgagtgtgtccactcatgggcagtgaggatctttattctttccctgcagttttaccgtcagctcttccagtcatgaaaatcagtgagccagacatggcggtgcgtgcctataggcccactacttgggaggccgaggcaggaggatcccttgagcccaggaatttaaggctgcagtgagccgtgatcacaccactacacttcagtcagggcaataaagtgaaaacctgtctctaaaaaccaaaaaaaaaaaaaaaaactcga

SEQ ID NO: 527 - DNA, 1858 bp, Homo sapiens
ggaacagatatggaggccagagctcatttgggtaaacttactcctgctgagttagcaggttggtgagagaagctcccctgagctcacctgtctctctgactgccttggagtaggtggcataaccttgtgcacagagaactagaaaaggggcagaaccccggccttgcagttgtggcaggtttccactgtggtaagctagkttcattcctcatcaaggaatgtgtagcagattgttcactgtggaggagttaattatagaatgggttattgktgktattcttactcatgaagttacagattttagccagtctttgcttttatacttttgtgaaatttaatttctctctatagcaccttcctttttcgttttcagttatcaaaagtgactttgacctcataaaagagttgagaacatctctcgtgtcacatactgcaggtgcatcagttacttttgcacagattctagggggacatttttctgaataggaagacaggacaaagttaacagcttaagggctcttaattctgtgagttgaggacttaaaagtattgtagcatttgtttggatccatgaaaaatgtattcagtgggctttaaaatttccatttgcagaatttggtctctcaggctgtttgggagctcttttttttacattttttctcctttgacacctattttattggtgtttaaagtaaaggttaacatctgtagcttttccaggttttttttttttttttttgatatgaaattgtctttctccattgcagaaataagctagggaaacactaacccaaaaactttctgtagagctgttcctttggaggcagcatcacttattggcagtaaagactcagtataaaagcaccagcatccctacttgggtgatggggattaattttatagcattccattttcctagtgccacatgtgaaattggattttgatgatcttaatctatattctacccttataataaaagatcaaaagatatatctcctatgaacagattggagataggagatgaaaagttgggaggatgtctttattctaatgtgagggtagggaaaatgtggataacattactggggtgaaggaggcattgttctttagttggagttctcatttttattctccagtactgacttgtggggaaagcatactttttcactgccaggtactgaatgcagaggctcagtgaagtatatatgtgggaagtgcatgcatttcgtttattagcaaacatagctggattaagacaaagttgttggtttggaaaggggttaaagccttaagtgaacaaatctagctaacagtgaatgaactaggtaatataacttgcatatttttaatttcctttggttaaaggtcccccatacttctctgttcggagacatgagaagtatgattacttcagtgttagttttcttaattttttttttcccctatttgtcccttgtcactttgttgcaagctagaaatctgtgggttatacatagggcagctctttgtgaaagtggtttattccactggagaaaggggattgaaaatcagttagaaccaatgtatttcttgccccacggaacactattcctataagatagctgaaagaagctgctgtgaggagctcagctccaaacacaggatcagcaccttgtataggaattcccatgaattatgacttctcattctgttttatcagagtgcatatatgtcctacttcaggaaaagtaaaacagtcatttacgaaagaaagtcaatctgtatcctaagcattttaataaaaagttaaaacaaaaaaaaaaaaaaaaaactcgagggggggcccgrwacccaawwcgccggtatgatcgtaacaatc

SEQ ID NO: 528 - DNA, 302 bp, Homo sapiens
cggcacgaggtgtctctactcaataaagtacatgcctccacataatgcggtgctgtccatctcggcaaatactggccaagtccctttatgacaggcacacagaaaccatagcatggtctggctttcagaaaatgcctctcatctttcctggaaccttattttgctaaatgtctgttttcttgtgatttgttgtacctcacagcaccattgtgaccatggtgatgcctcatttgcatgatatgtaccttgtgtttaatgtgaaatacattttcattgaagagtaaaaaaaaaaaaaaaaaaaa

SEQ ID NO: 529 - DNA, 498 bp, Homo sapiens
ggcacgagctttcagcaggggacagcccgattggggacaatggcgtctcttggccacatcttggttttctgtgtgggtctcctcaccatggccaaggcagaaagtccaaaggaacacgacccgttcacttacgactaccagtccctgcagatcggaggcctcgtcatcgccgggatcctcttcatcctgggcatcctcatcgtgctgagcagaagatgccggtgcaagttcaaccagcagcagaggactggggaaccgatgaagaggagggaactttccgcagctccatccgccgtctgtccacccgcagcggtagaaacacctggagcgatggaatccggccaggactcccctggcacctgacatctcccacgctccacctgcgcgcccacgccccctccgccgccccttccccagccctgcccccgcagactccccctgccgccaagacttccaataaaacgtgcgttcctctcgaaaaaaaaaaaaataaaaaaa

SEQ ID NO: 530 - DNA, 1858 bp, Homo sapiens
  misc_feature (6)..(6): n equals a,t,g, or c
  misc_feature (8)..(8): n equals a,t,g, or c
tattgntntggaccttcccgggctttgatygwgcccgggcttttgcccgggacttcgccgcccaccgcaagaagtcgggggctctgccagtggcctggcttgaacggacgatgcggtcagtagggctggaggtctacacgcagagtttctcccggaaactgcccttcccagatgagacccacgagcgctatatggtgtcgggcaccaacgtgtacggcatcctgcgggccccgcgtgctgccagcaccgagtcgcttgtgctcaccgtgccctgtggctctgactctaccaacagccaggctgtggggctgctgctggcactggctgcccacttccgggggcagatttattgggccaaagatatcgtcttcctggtaacagaacatgaccttctgggcactgaggcttggcttgaagcctaccacgatgtcaatgtcactggcatgcagtcgtctcccctgcagggccgagctggggccattcaggcagccgtggccctggagctgagcagtgatgtggtcaccagcctcgatgtggccgtggaggggcttaacgggcagctgcccaaccttgacctgctcaatctcttccagaccttctgccagaaagggggcctgttgtgcacgcttcagggcaagctgcagcccgaggactggacatcattggatggaccgctgcagggcctgcagacactgctgctcatggttctgcggcaggcctccggccgcccccacggctcccatggcctcttcctgcgctaccgtgtggaggccctaaccctgcgtggcatcaatagcttccgccagtacaagtatgacctggtggcagtgggcaaggctttggagggcatgttccgcaagctcaaccacctcctggagcgcctgcaccagtccttcttcctctacttgctccccggcctctcccgcttcgtctccatcggcctctacatgcccgctgtcggcttcttgctcctggtccttggtctcaaggctctggaactgtggatgcagctgcatgaggctggaatgggccttgaggagcccgggggtgcccctggccccagtgtaccccttcccccatcacagggtgtggggctggcctcgctcgtggcacctctgctgatctcacaggccatgggactggccctctatgtcctgccagtgctgggccaacacgttgccacccagcacttcccagtggcagaggctgaggctgtggtgctgacactgctggcgatttatgcagctggcctggccctgccccacaatacccaccgggtggtaagcacacaggccccagacaggggctggatggcactgaagctggtagccctgatctacctagcactgcagctgggctgcatcgccctcaccaacttctcactgggcttcctgctggccaccaccatggtgcccactgctgcgcttgccaagcctcatgggccccggaccctctatgctgccctgctggtgctgaccagcccggcagccacgctccttggcagcctgttcctgtggcgggagctgcaggaggcgccactgtcactggccgagggctggcagctcttcctggcagcgctagcccagggtgtgctggagcaccacacctacggcgccctgctcttcccactgctgtccctgggcctctacccctgctggctgcttttctggaatgtgctcttctggaagtgagatctgcctgtccgggctgggacagagactccccaaggaccccattctgcctccttctggggaaataaatgagtgtctgtttcagcarmaaaaaaaaaaaaaaaaaaaaaaaaaaaawrammctcgagggggggcccgggtacccaattggccctatgaagaggcga

SEQ ID NO: 531 - DNA, 1178 bp, Homo sapiens
  misc_feature (1139)..(1139): n equals a,t,g, or c
  misc_feature (1146)..(1146): n equals a,t,g, or c
  misc_feature (1148)..(1148): n equals a,t,g, or c
ccggagcaaagtttcacttatagaagggagaggagcgaacatggcagcgcgttggcggttttggtgtgtctctgtgaccatggtggtggcgctgctcatcgtttgcgacgttccctcagcctctgcccaaagaaagaaggagatggtgttatctgaaaaggttagtcagctgatggaatggactaacaaaagacctgtaataagaatgaatggagacaagttccgtcgccttgtgaaagccccaccgagaaattactccgttatcgtcatgttcactgctctccaactgcatagacagtgtgtcgtttgcaagcaagctgatgaagaattccagatcctggcaaactcctggcgatactccagtgcattcaccaacaggatattttttgccatggtggattttgatgaaggctctgatgtatttcagatgctaaacatgaattcagctccaactttcatcaactttcctgcaaaagggaaacccaaacggggtgatacatatgagttacaggtgcggggtttttcagctgagcagattgcccggtggatcgccgacagaactgatgtcaatattagagtgattagacccccaaattatgctggtccccttatgttgggattgcttttggctgttattggtggacttgtgtatcttcgaagaagtaatatggaatttctctttaataaaactggatgggcttttgcagctttgtgttttgtgcttgctatgacatctggtcaaatgtggaaccatataagaggaccaccatatgcccataagaatccccacacgggacatgtgaattatatccatggaagcagtcaagcccagtttgtagctgaaacacacattgttcttctgtttaatggtggagttaccttaggaatggtgcttttatgtgaagctgctacctctgacatggatattggaaagcgaaagataatgtgtgtggctggtattggacttgttgtattattcttcagttggatgctctctatttttagatctaaatatcatggctacccatacagctttctgatgagttaaaaaggtcccagagatatatagacactggagtactggaaattgaaaaacgaaaatcgtgtgtgttgaaaagaagatgccacttgtaaaattnggaatancncctttttttccaaggggatttaaaatagtt

SEQ ID NO: 532 - DNA, 602 bp, Homo sapiens
ttctaaactagtgatcccccggttgcagaattcggcacgagtacacgtgcacatttttcaggattgtgtgtaggtgcacatgtgggcacatgtatggtccagaaccatgtccacgcttggtatttcatgctgctttccctgccctccactggggatgctaccacttctccgtgtatctccagggcatcgatcgctcacactcctgggtgaattccgcttatgctccaggaggcagtaaggctgtgctgcggcgggcgcccccttattgtggggccgaccccagacagctgcttcacgaggagctggctctgcagtgggtggtcagcagcagtgccgtacgcgaggccatcctccagcacgcctggttcttcttccagctcatggtgagaccccctcctccctgcctggtggcaagagacccccagtggagccccttccttttttaaagagagaagccccctggccaggcatagtggctcacacctgtaatcccaacactttgggaggccgaggcgggcggatcacgaggtcaggagatcgagaccatcctggctaacacggtgaaaccccgtctctactaaaaaaaaaaaaaaaaaactcga

SEQ ID NO: 533 - DNA, 3545 bp, Homo sapiens
  misc_feature (2120)..(2120): n equals a,t,g, or c
  misc_feature (2658)..(2658): n equals a,t,g, or c
  misc_feature (2660)..(2660): n equals a,t,g, or c
  misc_feature (2662)..(2662): n equals a,t,g, or c
  misc_feature (2667)..(2667): n equals a,t,g, or c
  misc_feature (2669)..(2669): n equals a,t,g, or c
  misc_feature (3541)..(3541): n equals a,t,g, or c
gctatttaggtgacactatagaaggtacgcctgcaggtaccggtccggaattcccgggtcgacccacgcgtccgcggctgcagcccgggtagggccaggagacccggtccacgtttgcaaacgcagccgaacgcccaggccgacccgtgccgcccgagcgccgcgctgcgtccgcgccactcttctcgccgccccgatggcgttccggggctggaggcccccgccgccaccgctgctcctgctgctgctctgggtgaccgggcaggcagcgcccgtggcgggcctgggctccgacgcggagctgcagatcgagcggcgcttcgtgcccgacgagtgcccgcgcaccgtgcgcasggcgacttcgtgcgctaccactacgtggggacgttccccgacggccagaagttcgactccagctatgacagagactccactttcaatgtgtttgtgggaaaaggacagctgatcacagggatggaccaggctcttgttgggatgtgcgtaaacgagagacgtttcgtgaagattcccccaaagcttgcctacggaaatgaaggagtttctggtgtgatcccccccaattcagtgcttcattttgatgtacttctgatggatatttggaattctgaagaccaggttcagattcacacctatttcaagcccccgagttgccctcggaccatccaggtgtctgattttgtgaggtaccactacaacgggacgttcctggacggaactctgtttgattcgagtcacaatcgcatgaaaacatatgacacgtatgtgggaattggctggctgattcctggaatggataaagggctgctggggatgtgtgtgggtgaraagcgcatcatcaccattcctccttttctggcctatggagaggatggagatgggaaagacattcccggtcaggcatctctggtgtttgatgttgcattattggacctccataaccccaaggacagcatttccattgagaacaaggtagtacctgaaaactgtgagcggataagtcaaagtggggactttctcaggtatcattacaatggcacgcttctggatggcaccctctttgattccagctactctcggaaccgcacgtttgacacgtacattgggcagggctacgtgattcctgggatggatgaaggtctacttggtgtttgcattggagaaaagcgaaggattgtggtcccgcctcacctggggtatggagaggaaggaagagggaatatccccggctcggctgtgctggtgtttgacatccatgtgatcgacttccacaacccttcggactccatcagcatcacctcccactacaaaccccctgactgctcagtgctgagtaagaagggagattacctcaaatatcactacaatgcctcacttctggatgggaccctgctggactccacgtggaatttaggcaaaacttacaatattgttctgggatctgggcaagttgtgttggggatggacatgggtctcagagagatgtgcgttggcgagaaacggacagtgatcattccgcctcacctgggctatggggaagctggcgtggatggagaagtgcccggcagtgccgtattagtgtttgacattgagctgctggagctggtggctggccttcctgaggggtacatgttcatatggaatggtgaggtgtcacccaacctctttgaagaaattgacaaggatggcaacggagaagtcctcctggaagagttctcagagtacattcacgcccaggtggcatctggcaaagggaaactcgctcctggctttgatgctgagctgattgtgaagaatatgttcaccaaccaggaccggaatggagatgggaaggtcacagccgaggaatttaaactcaaagaccaggaagccaaacacgatgaactctaaacctggcatgaaccagatggtgccagggagtacgtgacaccaagccacctgtgtggcaagacgtgcagtgagggtgcaagggtctctcagaagttgcatcattagccagtagtaggtgggtcacatagtacctggtgtacacatcggggtgggttgatatatggggtgagaagtttgggctgatcgccagtgatagtaaacaaaatctgtgncagagggccttagcatgggatgtgtccagtattcgacccacgcgtccgctgccaaccatgatttgtgagccttctgggaaattttgttattaaaggaatatatagtgtcagacggaagttataatcatcttggaggaaccataagaaaaggtgtccagggtatctatataaagagggttaaatttttttttaacttgctggttaaaacattttagaaatattctwgagatgggcaggagagtcaaagggcttgcttgccccagcagagttcccagcagacagccatggctcttcccagcagcctgtgcaaattctgatgatggccccacccccgcacacgcacacgcacatcatgcttttccagctcatcacaccccgccccactatgggcctaccattaatagtgtataacttggaggttaaaagagccttttggacagaaaactgggccaggaaaaggcatctcagaccacaaatagagaatttgattcctcatttgccacataagtcatctgcttagcttttcctttccttttanananatttnanttttttctggaggcagagtctccctttgtcgccaggctggagtgcagtggtgccatctcggctcactgcagcactgtctcggctcactgcagcktccgcctcccgtattcaagcgattctcctgtctcagcctcctgagtagctgggactacaggtgtgcaccaccacgcccggctaatttttgtatttttagtagagacggggtttcactgtgttggccaggatggtctcaatctcgacytcgtgatccgcccaccttggcctcccaaagtgttgggattacaggcgtgactcaccatgcccagccacttagttttttcttattcccacctttctatcccatagaacactcttttttatcttccctgaaccatattgatgagataaatagggctgggggctgggccccgctggtcactcaacagagtatttcccttggccgagatggaagttttgtcccaatagatgagctgctgagyatcaacaaggtgacatttttctgctgcccatttgtgtcctggagacggtggtaccctgaaggcagaggccagctgccgcaagacagcaatgacagtccacctgccgacctgattcctgcatcatggaataaccacatggctaccttctatcctctgttcccaaatggtggtggcacttatcctgaagtcgtcaatgatttccctttgaaactactttattttactaatttaaactattttgtactgatgtagccctgaggtagttcatgaaaatgctgtgcactcattccatggaataaatgttggaaagctgatcttttctgatataaaatgttgaatgataaaaaaaaaaaaaaaaaaaaaaaaaaaaaaaaaaaaaaaaaaaaaaaaaanaaaa

SEQ ID NO: 534 - DNA, 1130 bp, Homo sapiens
ctctacctgtttcagctgcacatgaagttgtacatggttccctggccactggtgttaatgatctttaacatcagcgccaccgttctctacatcaccgccttcatcgcctgctctgcggcagttgacctgacatccctgaggggcacccggccttataaccagcgcgcggctgcctcgttctttgcgtgtttggtgatgatcgcctatggagtgagtgccttcttcagctaccaggcctggcgaggagtaggcagcaatgcggccaccagtcagatggctggcggctatgcctaaaccacctgtgccacggccccctctggggctgaagccgccgctgggtcacagagcagggtcaccctgcaagcctgaagctggggagccctgcgtggagtcagcccaacagggactgcatttgctcctctctgcccgtcagacataagctctcacagcgctaaggaagcaggcccaggctggcaggcatctcggcttgcaggaggccaactgctgagacctcttctccatcccccttattcagtggaagatgacgggggatctgaggctgtgtctctgccttgtctttagaggacttcagcgtccaagactggggcccacccttctcaccagcactaaatgcactaacaaggactccagacctgcagccccagacccgccgtagtataagcctaacaagcaacacgtagcaccttagtctttgttccaggagagctgagcaagctggtgaaaccactctccttcctttaaacaccgtttcaaccaacctctccctggagccaacctgtaaaaagtgggttgattgctgacagcatggtcttccctccctgcatttcagacataccagttactgaaagcaaatcagttttaagtgatttctcagtgctgaaaagcctgtccaggtttccttccctttcccaagcctctctctgtaatactccctttgggcgaagctaacatcggtgcctccccgaccttgctgactaggcacatgggacgcaaaggagggagggaagcaaggccttgcctggcgagttgtcatgtggttggtggtgactgttttattttttttaataaaaataaagatgagagaaattaaaaaaaaaaaaaaaaaaaaa

SEQ ID NO: 535 - DNA, 860 bp, Homo sapiens
gacacgggggagatgacatacaaaaagggcaggacctgagaaagattaagctgcaggctccctgcccataaaacagggtgtgaaaggcatctcagcggctgccccaccatggctacctgggccctcctgctccttgcagccatgctcctgggcaacccaggtctggtcttctctcgtctgagccctgagtactacgacctggcaagagcccacctgcgtgatgaggagaaatcctgcccgtgcctggcccaggagggcccccagggtgacctgttgaccaaaacacaggagctgggccgtgactacaggacctgtctgacgatagtccaaaaactgaagaagatggtggataagcccacccagagaagtgtttccaatgctgcgacccgggtgtgtaggacggggaggtcacgatggcgcgacgtctgcagaaatttcatgaggaggtatcagtctagagttacccagggcctcgtggccggagaaactgcccagcagatctgtgaggacctcaggttgtgtataccttctacaggtcccctctgagccctctcaccttgtcctgtggaagaagcacaggctcctgtcctcagatcccgggaacctcagcaacctctgccggctcctcgcttcctcgatccagaatccactctccagtctccctcccctgactccctctgctgtcctcccctctcacgagaataaagtgtcaagcaagattttagcccgcagctgcttcttctttggtggatttgaggggtgggtgtcagtggcatgctggggtgagctgtgtagtccttcaataaatgtctgtcgtgtgtcccataaaaaaaaaaaaaaaaaaaaaaaaaaaaactcga

SEQ ID NO: 536 - DNA, 3147 bp, Homo sapiens
  misc_feature (1222)..(1222): n equals a,t,g, or c
  misc_feature (2150)..(2151): n equals a,t,g, or c
  misc_feature (2154)..(2154): n equals a,t,g, or c
  misc_feature (2176)..(2176): n equals a,t,g, or c
ccacgcgtccgagaggttgtgtgggacaagctgctcccgacagaaggatgtcgctgctgagcctgccctggctgggcctcagaccggtggcaatgtccccatggctactcctgctgctggttgtgggctcctggctactcgcccgcatcctggcttggacctatgccttctataacaactgccgccggctccagtgtttcccacagcccccaaaacggaactggttttggggtcacctgggcctgatcactcctacagaggagggcttgaaggactcgacccagatgtcggccacctattcccagggctttacggttcctgaagccctggctgggagaagggatactgctgagtggcggtgacaagtggagccgccaccgtcggatgctgacgcccgccttccatttcaacatcctgaagtcctatataacgatcttcaacaagagtgcaaacatcatgcttgacaagtggcagcacctggcctcagagggcagcagttgtctggacatgtttgagcacatcagcctcatgaccttggacagtctacagaaatgcatcttcagctttgacagccattgtcaggagaggcccagtgaatatattgccaccatcttggagctcagtgcccttgtagagaaaagaagccagcatatcctccagcacatggactttctgtattacctctcccatgacgggcggcgcttccacagggcctgccgcctggtgcatgacttcacagacgctgtcatccgggagcggcgtcgcaccctccccactcagggtattgatgattttttcaaagacaaagccaagtccaagactttggatttcattgatgtgcttctgctgagcaaggatgaagatgggaaggcattgtcagatgaggatataagagcagaggctgacaccttcatgtttggaggccatgacaccacggccagtggcctctcctgggtcctgtacaaccttgcgaggcacccagaataccaggagcgctgccgacaggaggtgcaagagcttctgaaggaccgcgatcctaaagagattgaatggtgagtgcaagttcttctggcctgttcctgagcccatcattggttctgctccccaagtgaggaggggtggaggagttgttttgtggattcttccactattgcttagtgggtataaaagcagaggaccacaggcagggcttgataccaagcctggctgtcaggggaaaagntgcaggcctttaggaccgaaagacccgggctgctaagagaattggtgacaatgtgtgaggacagataatgctactttgcacatgttcagcaaatgaacttcccctccactctgtttctgttctcccagaaatatcagttttttcgaaaatcctcacttcttgaatgtttgctcaggtgggaagggagaagttgtttttgtcaattcttccattattgcttagtagtactaggagcagagcacagaggcagaacttggtatccaacctggctagcaggggaaagttttcagacttttgggacagagagtcctagcccgctgagagaactaaggacaatatatgaaggcagacgatgacatctagacatgttcagtcaatgaattttcccttcactcctttcttgtttactctgaattatcatatttttttcaaacatctttacttcctgaatgtttactcttctgttccctaattcctaccctccggtccagtccagggagtcctaagggagacctgggggtaaaagtcatctatcttttgtctagaacacctgcatcgttcatccattcagtcttcattcagcaaactcttccacatgcctttccattgccagttctgttcccacacctttctgttctctggagacctggaaagaaccctgcctatggatgtgttttccaggtactcccagcctagtaggaacagtcccccacaagacattcccagtccacataggcaaggatggagttgagagcaagagaagcatggctgggagtacagaaagtgtgatagaaagtgtttcaagccagatctggtggctgtcgcttgtgataccaagtaccgaggaggctgaagtgggataatcacttgaggtcaggtttaagatcaacctgggcaatatagaaagaacccatttctaaaaaagtanntanccaaaataataaagtgcctcanctgaaaccctgaatggtgatcagtaggtgtttggatgcagtagtgccctaggtcaaaaagaaagtctgggcaaaaatgcaaaaagagggagcaggagagagggagaagagggaaagagaggtttgtgtgtcagggaaggagatggttataaagggagggagaagtaagagggaggaaaagtgagggagagcaagataaagagaggagggaagacagaaggagacagagagagaatgagagagaaaaggaactgagttgtgatgagataataactatggtagtgaaagcagagtctggctgtggaaaatatgggaaaatggtaatggcttccattttaacccaaaggcaatgggaagccataacaagtggttgagcaggggaggggcaggtcatatctgggcaccagaaagatcttttcagagctactatggagagaggaccagctgtagaatgaagtcccagtgaagacattctgggacctgagccagggcaggggctggggatggagaggaggcaatggactggacatgtgttttggaggccgtgtcctcccgtccaagcctttgctcagcacagcagtcctaaaaggtggcaacactttttatgcttttaaaaaccaagatatcaagtaatactgtgcactttgtaaacaaaaaaaagtgtctaaaacatttataaaaatgagctttcctcatgcctgtaatcccagcactttggaaggccgaggcgggcggatcacgaggtcaggagatcgagaccatcctggctaacacggtgaaaccccgtctctactaaaagtataaaaaattagccgggcgtgatggcaggtgcctgtagtcccagctactctggaggctgaggcaggagaatggcgtgaacccgggtggcggagcttgcagtgagctgagttggcaccattgcactccagcctgggcaacagagtgagactctttctcaaaaaaaaaaaaaaa

SEQ ID NO: 537 - DNA, 1162 bp, Homo sapiens
tcgacccacgcgtccggttgttcccctggccaactccacaggtttgaacctggcattctggacaccagctatgcctcctccatttctcagaaaacctttgatcttgtgtgtctttcttcctactgaagggaattgtgggggcagttctttggccttcttgctgaactttgctggaaatagcccacaatttttatcagaggttagaactgtacattatcagagagactggacactttatcccctagcaaagtgggagaagattttaccagctcattccactccaccctggccttcccccaccccccatccccagcagcatttccatggaaatccagatggtcgtgtagtgttatggctctcttgtgatagactggccttcatattggagagctagggagagcccctgggagggagagagataaggcgctatctgccttcaatcagaaccttcggtttaaaatcatctaagagtctatacttgtgtgtacatacgtatttatttttatttatttttatacaattccattggcatggtccttcaccgaccctatgatttgcactttttatttctatgtgtgccacacacaatgcagtattaatggcaaccaggtaaatattgatttattttttaaagcttttcttcagtgttttgtcaaccatttcaaagtgtctcccaaaaaaggatgctgaagagcaattgctcccttaagcaacagattcatatttaccctgggttaatacaacaaaaggcctgtataattgtcttttcattgttaacacccaaaatagcatctatctagacagtatccccaaagaatttggaaaatctgatggtgtgagcagcagccgttagtatcagggtttcccattcttggacagtccgaggctgtgacctgttagataattagattatacttgaactggaccagagtttgttttttgaatttatgagaaaaaccaaaacactaagttaagtttgaacttgtaaagtattgaaatttgttgagtgtcctataaattgtcactacttttcctgatctgtataactgactgcaaagtgtttgtttttacaaaagagaaaagaaaagatttttaataaagagaatttgaaagctgaaaaaaaaaaaaaaaaaaaaaaaaaaaaaaaaaaaaaaaaaaaaaa

SEQ ID NO: 538 - DNA, 1602 bp, Homo sapiens
  misc_feature (1230)..(1230): n equals a,t,g, or c
gatcatttattcctcgatgtctgctttaaaaagcaaagtcatatttatgtcttccaatgtctattgcaaagaaaagtaaacacgaagaagaattttgcttgagtccatgctttgccgctaatttattgagtgataaaagtaaattctctcactcttagtttcttatttgaataataggtataaataatgtctcccctcgtctctcaacagattttctttattagatttagaaattatatggcatatgtcaaaatcatgtacacagcatacatctttaaaatcaatgacaatatttagttccagtggcatgatagatgtctcagtaaggtaatgaaacccttgctgaagtgatgctctctgcaactgcagctctagcttccccatcggatgagtcggtggaatgcaggggatcacagaaagcaggtagcacgcttcccacacaggtgctactgagctacacmgtaggaaatccaatgagacacaggatgggcatcctgacacacagtctatgtgatggaatgcaactttgtcttgatcaaaaattgtataaaaagattttctaataaaccaatttgtgaggaaaaatttaatcaggatatatttactcttacaaagaattctcagtcttttccacgttcctgtatttgtcgygaaattttcctgtactagaactctgtggtgccatatgtgataatcccattctaatttccagcatagagtatattaggactctcatgtttcaaaggctaaatggtctgagctttaactcagtgcctcatcttcattttacctcaagactaatgaaagacagtgaaagasmgaatgacagaaaattccctcataatttctggcttcgactttcaacttacaggactgaaaattactggcaatctttgctaaactcaaaaggtatgtaatcaacctttgattacttaacaatagagggtgccaagaaactatatatctctgtgcatagttattatgaatctgatcccttatcagaaggctcgttgagtcagacatctgttttctttcgtatttagtcattccatgcatgtggacagtggcattgatatgagaaataaactacctaattgacattttkgkttggttttggtttcactggaaatttcagagaggaaatttttaggtaaccatttgtaaattttggggtaaagttgktgaaggccttgggaagatttcatagtgaaaacarattatamcaaaggntaatatgagccattgataggcagtgctatctccattgrgctcagaaaaataragcaacmtwgatctcaatcaatgcctcaataagcacaaatrgatcatggcagtttaatgactaacatattcattttcttttctttttggagaaatattataaatgaaagtaggaatgtcttaatacagtctgtacccatttaaaaataatctgcacagcaggatgtctcctgtccccgctttttgatactgacttggatggcacctttgactgatatattaagggaacatgaaaaattaaaagtatccaagtgaggtgaaaatgagwtcaggaaatgaatattacatatgkaagcaccctattggtatcagataaagaag

SEQ ID NO: 539 - DNA, 799 bp, Homo sapiens
cccccgggctgcaggaattcggcacgagctgcaagacctggggctccgaattgtggaaataggagacgagaacgcgacgctggatggcactgacgttctcttcaccggccgggagtttttcgtaggcctctccaaatggaccaatcaccgaggagctgagatcgtggcggacacgttccgggacttcgccgtctccactgtgccagtctcgggtccctcccacctgcgcggtctctgcggcatggggggacctcgcactgttgtggcaggcagcagcgacgctgcccaaaaggctgtccgggcaatggcagtgctgacagatcacccatatgcctccctgaccctcccagatgacgcagctgctgactgtctctttcttcgtcctgggttgcctggtgtgccccctttcctcctgcaccgtggaggtggggatctgcccaacagccaggaggcactgcagaagctctctgatgtcaccctggtacctgtgtcctgctcagaactggagaaggctggcgccgggctcagctccctctgcttggtgctcagcacacgcccccacagctgagggcctggccttggggtactgctggccaggggtaggatagtataggaagtagaaggggaaggagggttagatagagaatgctgaataggcagtagttgggagagagcctcaatattgggggaggggagagtgtagggaaaaggatccactgggtgaatcctccctctcagaaccaataaaatagaattgaccttttaaaaaaaaaaaaaaaaaaaactcgagggggggccc

SEQ ID NO: 540 - DNA, 2412 bp, Homo sapiens
ggcacgagcttaatctcgctgcgtgctgatctctggcctttccctttagtctgtccgagtctccccttttgggacatcattcttcttctgatgctgccaggagacgctctgtctcttccttcccagtcccccaggacaatgtggatgctcatcctggttctggtaaagaagtgagggtaccagctactgccttgtgtgtcttcgatgcacatgatggggaagtcaacgctgtgcagttcagtccaggttcccggttactggccactggaggcatggaccgcaggtttaagctttgggaagtatttggagaaaaatgtgagttcaagggttccctatctggcagtaatgcaggaattacaagcattgaatttgatagtgctggatcttacctcttagcagcttcaaatgattttgcaagccgaatctggactgtggatgattatcgattacggcacacactcacgggacacagtgggaaagtgctgtctgctaagttcctgctggacaatgcgcggattgtctcaggaagtcacgaccggactctcaaactctgggatctacgcagcaaagtctgcataaagacagtgtttgcaggatccagttgcaatgatattgtctgcacagagcaatgtgtaatgagtggacattttgacaagaaaattcgtttctgggacattcgatcagagagcatagttcgagagatggagctgttgggaaagattactgccctggacttaaacccagaaaggactgagctcctgagctgctcccgtgatgacttgctaaaagttattgatctccgaacaaatgctatcaagcagacattcagtgcacctgggttcaagtgcggctctgactggaccagagttgtcttcagccctgatggcagttacgtggcggcaggctctgctgagggctctctgtatatctggagtgtgctcacagggaaagtggaaaaggttctttcaaagcagcacagctcatccatcaatgcggtggcgtggtcgccctctggctcgcacgttgtcagtgtggacaaaggatgcaaagctgtgctgtgggcacagtactgacggggctctcagggctgggaggaccccagtgccctcctcagaagaagcacatgggctcctgcagccctgtcctggcaggtgatgtgctgggtatagcatggacctcccagagaagctcaagctatgtggcactgtagctttgccgtgaatgggatttctgaagatttgactgaggtctctcttggcctggaagaataacactgaaaaaacctgacgctgcggtcacttagcagaggctcaggttcttgccttgggaaacactactagctctgaccttccatacctcacttgggggagcacagggccccgctgggcctcctcaccaacggcagtgccaaaatcagcccccacatcaaggtggtgttctctgtgctttctctcgtccttccaaagtcggttctggcctaacgcatgtcccaacaccttgggttcatttgcccggtgaactcactttaagcattggattaacggaaactcccgaactacagacccctccctggtgggttgcatgaatgtgtctcattactgctgaaatgtcctcacatctctttcactgttcttcagagctttctggctctctttcccccacaaaattcgacatatttaaaaatctccgtgtggctttaaaaaatggttttttgtttttttgtttttttgaggtgggagaggatgtgtgaaaatcttttccagggaaatgggttcgctgcagaggtaaggatgtgttcctgtatcgatctgcagacacccagaaggtgggtgcacactgcatgcttgggggtgccaagggattcgagacctccaacatacttgtctgaaggtggtgattctggccatggcccctctgccaagcctgtgtgcgatgcccttggtgctttagtgcaagaagcctaggctcagaagcacagcagcgccatctttccgtttcaggggttgtgatgaaggccaaggaaaaacatttatctttactattttacctacgtataaagttttagttcattgggtgtgcgaaacaccctttttatcacttttaaatttgcactttattttttttcttccatgcttgttctctggacatttggggatgtgagtgttagagctggtgagagaggagtcaggtggccttcccaccgatggtcctggcctccacctgccctctcttccctgcctgatcaccgctttccaatttgcccttcagagaacttaagtcaaggagagttgaaattcacaggccagggcacatcttttatttatttcattatgttggccaacagaacttgattgtaaataataataaagaaatctgttatatacttttcaaaaaaaaaaaaaaaaaaaaaaa

SEQ ID NO: 541 - DNA, 1453 bp, Homo sapiens
  misc_feature (14)..(14): n equals a,t,g, or c
  misc_feature (32)..(32): n equals a,t,g, or c
  misc_feature (121)..(121): n equals a,t,g, or c
  misc_feature (125)..(125): n equals a,t,g, or c
  misc_feature (1425)..(1426): n equals a,t,g, or c
  misc_feature (1428)..(1428): n equals a,t,g, or c
actcaattggcttnggccaaggcccgaagccnagttttggtgggccttcccagggtttttgcaccgaagggaagcttacagcgagtcccaacccttgttactggcccaatgcttacggaanccgnttgcttgcccaccgactggcctttcctgcaactgatttcgccttctaccaccgggcttcagacaccccctcgggactctctcccacagacaccatgggcacagccatgcgggtcctgcagtgggtgctagttttggagagctggcgcccccaggctctctgggctgtgccccctgctgcccgcctggcacggctcatgtgtgtgttcctggtggacagtgagctgttccgggagtccccagtacagcatctggtggcagccctcctcgcccagctctgtcagcctcaagtcttgccaaacctcaacctggactgccgactccctggcctgacgtctttccctgacctctatgccaacttcctggatcattttgaggctgtctcttttggggaccacctctttggggccctggtcctcctgcccctgcagcgtcggttcagtgtcaccttgcgccttgccctctttggggaacacgtgggagccttgcgagctctgagcctgcctctgacccagttgcctgtgtccctggagtgttacacagtgcctcctgaagacaacctggccctccttcagctctacttccggaccctggttactggtgcgctccgcccacgttggtgccccgtgctctatgctgtggctgtggctcatgtcaatagcttcatcttctctcaggacccacagagctcagatgaggtcaaagctgcccgcaggagtatgctgcagaaaacatggctgctggcagatgagggtctccggcagcacctcctgcactataagcttcccaattccacgctcccagagggctttgagctctattctcagttgccccctctgcgtcagcactacctccagagactgacttcaacagtgctccaaaatggggtatcagagacctaggatagttgatatagatggaaagatgggtacgttgtcctgtatccagcctttcaacagatgtctggccagacgaagaacattgtgtcctaatggtaggcaggagaccaaggagcagaaggcttgccttcctgggagcaggttgtttgagctgttttagagcagtgagccctaccattacatcctgatatctggggcttctgaaggtctgtgctgggagtgaagagtggcttagctatttacccgctctttggggacagggcaaactaaatgcatcccttcttacctaactcccaacccctgccctgggctgaggcatatgaatgctatagttgtgcattaaaataaatgttttttatctcctggaaaaaaaaaaaaaaaaaactcgagggggggcccgganncnagtcggcgggatagtgagtcgggta

SEQ ID NO: 542 - DNA, 1107 bp, Homo sapiens
ccacgcgtccggtggacgtgatcgggtgctgatgtatggacagccgtatcgtgttaccttagagcttgagctgccagagtcccctgtgaatcaagatttgggcatgttcttggtcaccatttcctgctacaccagaggtggccgaatcatctccacttcttcgcgttcggtgatgctgcattaccgctcagacctgctccagatgctggacacactggtcttctctagcctcctgctatttggctttgcagagcagaagcagctgctggaggtggaactctacgcagactatagagagaactcgtacgtgccgaccactggagcgatcattgagatccacagcaagcgcatccagctgtatggagcctacctccgcatccacgcgcacttcactgggctcagatacctgctatacaacttcccgatgacctgcgccttcataggtgttgccagcaacttcaccttcctcagcgtcatcgtgctcttcagctacatgcagtgggtgtgggggggcatctggccccgacaccgcttctctttgcaggttaacatccgaaaaagagacaattcccggaaggaagtccaacgaaggatctctgctcatcagccagggcctgaaggccaggaggagtcaactccgcaatcagatgttacagaggatggtgagagccctgaggatccctcagggacagagggtcagctgtccgaggaggagaaaccagatcagcagcccctgagcggagaagaggagctagagcctgaggccagtgatggttcaggctcctgggaagatgcagctttgctgacggaggccaacctgcctgctcctgctcctgcttctgcttctgcccctgtcctagagactctgggcagctctgaacctgctgggggtgctctccgacagcgccccacctgctctagttcctgaagaaaaggggcagactcctcacattccagcactttcccacctgactcctctcccctcgtttttccttcaataaactattttgtgtcagcttcaaaaaaaaaaaaaaaaaaaaaaaaaaaaaaaaaaaaaaaaaaaaaaaaaaaaaaaaaaaaaaaaaaaaaaaaaaaaaaaaaaaaaaa

SEQ ID NO: 543 - DNA, 3287 bp, Homo sapiens
  misc_feature (70)..(70): n equals a,t,g, or c
  misc_feature (134)..(134): n equals a,t,g, or c
  misc_feature (197)..(197): n equals a,t,g, or c
  misc_feature (288)..(288): n equals a,t,g, or c
  misc_feature (464)..(464): n equals a,t,g, or c
  misc_feature (3231)..(3231): n equals a,t,g, or c
  misc_feature (3240)..(3240): n equals a,t,g, or c
  misc_feature (3251)..(3251): n equals a,t,g, or c
agaacattcaatggggcgtggatagcggtttgaattcacggggattttccaagttttccaccccattgangttcaatggggagtttgttttggcacccaaaatcaacgggacttttccaaaatgttgtaacaantccgccccattgacgcaaatgggcggtaggcgtgtacggtgggaggttctatataagcagagntcgtttagtgaaccgtcagatcgcctggagacgccatccacgctgttttgaccttccatagaagacaccgggaccgatccagcttccggantytagcctaggccgcgggacggataacaatttcacacaggaaacagytatgaccactaggcttttgcaaaaagctatttaggtgacactatagaaggtacgcctgcaggtaccggtccggaattcccgggtcgacccacgcgtccgcggacgcgtgggcggacgcgtggggttctncagtgtacactggcctcatctacaacgactgcttttcaaagtcagtcaacctgttcggctctgggtggaacgtgtcggccatgtacagctccagccacccacccgcagagcataagaagatggtgctttggaatgacagcgtcgttagacacaacagcattttgcagctggatccaagcattcctggagtgttccgaggcccttatccccttggcattgatcctatttggaacttggccacaaatcgcctcacttttctaaactctttcaaaatgaaaatgtccgtgattttaggaatcattcatatgacttttggagtcattctgggaatatttaaccacttgcacttcaggaagaagttcaacatttacctggtttccatcccggaacttctcttcatgctctgtatctttggataccttatatttatgattttctacaagtggctggttttttcagcagaaacctccagagttgctcccagcattctgattgaatttattaacatgtttttattcccagccagtaaaacaagtggcctttacacagggcaggagtatgtccagagagtgctgctggttgtcacagcattgtctgtccctgtcctcttcttgggaaagccactgtttttgttgtggcttcacaatgggcgtagttgcttcggggtgaaccggagtggctacacacttataaggaaagatagtgaggaagaagtttcattgctgggaagccaagatatagaagagggaaatcaccaggtggaagatggatgtagagaaatggcgtgtgaagagtttaattttggagaaatattaatgacccaagtaatccattccatcgagtactgtctgggatgcatctccaacaccgcctcctacctgaggctctgggcgcttagcctggctcacgcacagttgtctgatgtcctgtgggccatgctgatgcgcgtgggcctccgcgttgacaccacctatggcgtcttgctactgctcccggttatcgcgctctttgcagttttgaccattttcatccttctgatcatggaagggctttctgcgtttcttcacgccatacgcctccactgggtagaatttcagaacaaattctacgttggtgcaggcaccaaatttgttcctttctcattcagtctactttcatcaaagttcaataacgacgacagtgtggcatgatcatattgctgtaaccaacaagctttcagatttatggagaatgaccatgttatagactttcacttatgtcagatttatgataggaaaaattccatcttcattactgccttatgacatagccaaataattctgtaagatatacctcttcctcatatgttaaatattttgtaaagtttaccaatttgagatataaaaatttcttttggttttttatgatgagcaaatataagttaatgccaaaaaaaaaaaaaaaaagggcggccgctctagaggatccctcgaggggcccaagcttacgcgtgcatgcgacgtcatagctctctccctatagtgagtcgtattataagctaggcactggccgtcgttttacaacgtcgtgactgggagatctgctagcttgggatctttgtgaaggaaccttacttctgtggtgtgacataattggacaaactacctacagagatttaaagctctaaggtaaatataaaatttttaagtgtataatgtgttaaactagctgcatatgcttgctgcttgagagttttgcttactgagtatgatttatgaaaatattatacacaggagctagtgattctaattgtttgtgtattttagattcacagtcccaaggstcatttcaggcccctcagtcctcacagtctgttcatgatcataatcagccataccacatttgtagaggttttacttgctttaaaaaacctcccacacctccccctgaacctgaaacataaaatgaatgcaattgttgttgttaacttgtttattgcagcttataatggttacaaataaagcaatagcatcacaaatttcacaaataaagcatttttttcactgcattctagttgtggtttgtccaaactcatcaatgtatcttatcatgtctggatcgatcctgcattaatgaatcggccaacgcgcggggagaggcggtttgcgtattggctggcgtaatagcgaagaggcccgcaccgatcgcccttcccaacagttgcgcagcctgaatggcgaatgggacgcgccctgtagcggcgcattaagcgcggcgggtgtggtggttacgcgcagcgtgaccgctacacttgccagcgccctagcgcccgctcctttcgctttcttcccttcctttctcgccacgttcgccggctttccccgtcaagctctaaatcgggggctccctttagggttccgatttagtgctttacggcacctcgaccccaaaaaacttgattagggtgatggttcacgtagtgggccatcgccctgatagacggtttttcgccctttgacgttggagtccacgttcttaatagtggactcttgttccaaactggaaacaacactcaaccctatctcggtctattcttttgatttataagggattttgccgatttcggcctattggttaaaaaatgagctgatttaacaaaaatttaacgcgaattttaacaaaatattaacgcttacaatttaaggtggcacttttcggggaaatgtgcgcggaaaccctatttgtttatttttctaaatacattcaaatatgtatccgctcatgccangtcttggantggtgaaaaanggcttgctcggcaacttcgatgtgtgctggaagggg

SEQ ID NO: 544 - DNA, 1422 bp, Homo sapiens
cagggatcgtcgggagaggccgctctggacgtgttgacacacgttgactgtgggaaactcggaaacaagctcacatcttcctgtgggaaaccttctagcaacaggatgagtctgcagtggactgcagttgccaccttcctctatgcggaggtctttgttgtgttgcttctctgcattcccttcatttctcctaaaagatggcagaagattttcaagtcccggctggtggagttgttagtgtcctatggcaacaccttctttgtggttctcattgtcatccttgtgctgttggtcatcgatgccgtgcgcgaaattcggaagtatgatgatgtgacggaaaaggtgaacctccagaacaatcccggggccatggagcacttccacatgaagcttttccgtgcccagaggaatctctacattgctggcttttccttgctgctgtccttcctgcttagacgcctggtgactctcatttcgcagcaggccacgctgctggcctccaatgaagcctttaaaaagcaggcggagagtgctagtgaggcggccaagaagtacatggaggagaatgaccagctcaagaagggagctgctgttgacggaggcaagttggatgtcgggaatgctgaggtgaagttggaggaagagaacaggagcctgaaggctgacctgcagaagctaaaggacgagctggccagcactaagcaaaaactagagaaagctgaaaaccaggttctggccatgcggaagcagtctgagggcctcaccaaggagtacgaccgcttgctggaggagcacgcaaagctgcaggctgcagtagatggtcccatggacaagaaggaagagtaagggcctccttcctcccctgcctgcagctggcttccacctggcacgtgcctgctgcttcctgagagcccggcctctccctccagtacttctgtttgtgcccttctgcttcccccattcccttccacagctcatagctcgtcatctcggcccttgtccacactctccaagcacattacaggggacctgattgctacacgttcagaatgcgtttgctgtcatcctgcttggcctggccaggcctggcacagccttggcttccacgcctgagcgtggagagcacgagttagttgtagtccggcttgcggtggggctgacttcctgttggtttgagcccctttttgttttgccctctgggtgttttctttggtcccgcaggagggtgggtggagcaggtggactggagtttctcttgagggcaataaaagttgtcatggtgtgtaaaaaaaaaaaaaaaaaaaaaaaaaaaaaacaaaaaaaaaaaaaaaaaaaaaaaaaaaaaaaaaaaaaaaaaaaaaaaaaaaaaaaaaaaaaaaaaaaaaaaacaaaaaaaacaaaaaaaaaaaaaaaaaaaaaaaa

SEQ ID NO: 545 - DNA, 1787 bp, Homo sapiens
gcccacgcgtccgcccacgcgtccggcatggacctcagtcttctctgggtacttctgcccctagtcaccatggcctggggccagtatggcgattatggatacccataccagcagtatcatgactacagcgatgatgggtgggtgaatttgaaccggcaaggcttcagctaccagtgtccccaggggcaggtgatagtggccgtgaggagcatcttcagcaagaaggaaggttctgacagacaatggaactacgcctgcatgcccacrccacagagcctcggggaacccacggagtgctggtgggaggagatcaacagggctggcatggaatggtaccagacgtgctccaacaatgggctggtggcaggattccagagccgctacttcgagtcagtgctggatcgggagtggcagttttactgttgtcgctacagcaagaggtgcccatattcctgctggctaacaacagaatatccaggtcactatggtgaggaaatggacatgatttcctacaattatgattactatatccgaggagcaacaaccactttctctgcagtggaaagggatcgccagtggaagttcataatgtgccggatgactgaatacgactgtgaatttgcaaatgtttagatttgccacataccaaatctgggtgaaaggaaaggggccggggacaggagggtgtccacatatgttaacatcagttggatctcctatagaagtttctgctgctctctttccttctccctgagctggtaactgcaatgccaacttcctgggcctttctgactagtatcacacttctaataaaatccacaattaaaccatgtttctcacttttcacatgtttcatagcaactgctttatatgactgatgatggcttccttgcacaccacatatacagtgcgcatgcttacagccgggcttctggagcaccagctgcagcctggctactgctttttactgcagaatgaactgcaagttcagcatagtggaggggagaggcagaactggaggagaggtgcagtgaaggttctctacagctaagcctgtttgaatgatacgtaggttccccaccaaaagcaggctttctgccctgagggacatcttcccactcccctgctccacatgagccatgcatgcttagcaatccaagtgcagagctctttgctccaggagtgaggagactgggaggtgaaatggggaaatggaagggtttggaggcagagctgaaaacagggttggaaggatttcctgaattagaagacaaacgttagcatacccagtaaggaaaatgagtgcaggggccaggggaacccgtgaggatcactctcaaatgagattaaaaacaaggaagcagagaatggtcagagaatgggattcagattgggaacttgtggggatgagagtgaccaggttgaactgggaagtggaaaaaggagtttgagtcactggcacctagaagcctgcccacgattcctaggaaggctggcagacaccctggaaccctggggagctactggcaaactctcctggattgggcctgatttttttggtgggaaaggctgccctggggatcaactttccttctgtgtgtggctcaggagttcttctgcagagatggcgctatctttcctcctcctgtgatgtcctgctcccaaccatttgtactcttcattacaaaagaaataaaaatattaacgttcactatgcaaaaaaaaaaaaaaaaaaaaaaaaaaaaaaaaaaaaaaaaaaaaaaaaaaaaaaaaaaaaaaaaaaaaaa

SEQ ID NO: 546 - DNA, 736 bp, Homo sapiens
  misc_feature (719)..(719): n equals a,t,g, or c
  misc_feature (724)..(724): n equals a,t,g, or c
  misc_feature (727)..(727): n equals a,t,g, or c
  misc_feature (734)..(734): n equals a,t,g, or c
gttgtacggctccgagaagacgacagaagggggagaccctgcagcaccatctgtcatggcggctgggctgtttggtttgagcgctcgccgtcttttggcggcagcggcgacgcgagggctcccggccgcccgcgtccgctgggaatctagcttctccaggactgtggtcgccccgtccgctgtggcgggaaagcggcccccagaaccgaccacaccgtggcaagaggacccagaacccgaggacgaaaacttgtatgagaagaacccagactcccatggttatgacaaggaccccgttttggacgtctggaacatgcgacttgtcttcttctttggcgtctccatcatcctggtccttggcagcacctttgtggcctatctgcctgactacaggtgcacagggtgtccaagagcgtgggatgggatgaaagagtggtcccgccgcgaagctgagaggcttgtgaaataccgagaggccaatggccttcccatcatggaatccaactgcttcgaccccagcaagatccagctgccagaggatgagtgaccagttgctaagtggggctcaagaagcaccgccttccccaccccctgcctgccattctgacctcttctcagagcacctaattaaaggggctgaaagtctgaaaaaaaaaaaaaaaaaaaaaaaaaaaaaaaaaaaaaaaaaaaaaaaaaaaaaaaaaaaaaaaaaagggcgncctanttntaaatcncg

SEQ ID NO: 547 - DNA, 2196 bp, Homo sapiens
attgttattcaggtgacactatagaaggtacgcctgcaggtaccggtccggaattcccgggtcgacccacgcgtccgcctggaggttcaaagaattgcaggagggtagaaaagcacctgggtcgggtgcagactgcggagcgggccctaccgtgtgcgcagaaagaggaggcgcttgccttcagcttgtgggaaatcccgaagatggccaaagacaactcaactgttcgttgcttccagggcctgctgatttttggaaatgtgattattggttgttgcggcattgccctgactgcggagtgcatcttctttgtatctgaccaacacagcctctacccactgcttgaagccaccgacaacgatgacatctatggggctgcctggatcggcatatttgtgggcatctgcctcttctgyctgtcygttctaggcattgtaggcatcatgaagtccarcaggaaaattcttctggcgtatttcattctgatgtttatagtatatgcctttgaagtggcatcttgtatcacagcagcaacacaacgagactttttcacacccaacctcttcctgaagcagatgctagagaggtaccaaaacaacagccctccaaacaatgatgaccagtggaaaaacaatggagtcaccaaaacctgggacaggctcatgctccaggacaattgctgtggcgtaaatggtccatcagactggcaaaaatacacatctgccttccggactgagaataatgatgctgactatccctggcctcgtcaatgctgtgttatgaacaatcttaaagaacctctcaacctggaggcttgtaaactaggcgtgcctggtttttatcacaatcagggctgctatgaactgatctctggtccaatgaaccgacacgcctggggggttgcctggtttggatttgccattctctgctggactttttgggttctcctgggtaccatgttctactggagcagaattgaatattaagcataaagtgttgccaccatacctccttccccgagtgactctggatttggtgctggaaccagctctctcctaatattccacgtttgtgccccacactaacgtgtgtgtcttacattgccaagtcagatggtacggacttcctttaggatctcaggcttctgcagttctcatgactcctacttttcatcctagtctagcattctgcaacatttatatagactgttgaaaggagaatttgaaaaatgcataataactacttccatccctgcttatttttaatttgggaaaataaatacattcgaaggaacctgtgttatcacagtaacccagagctgtatttggctagcaatctgcctgtatctctcactattatctaaaagaaaccttccaatgcttctgttgatctcagtattgtcaggggaacagagaagttgggaaaagattactgaaatataccttttgcatttctttctagagtagctcccatatatggagatgggtgattctcttgatgccaccttcagatccttttattctccagaataattcttaacagtggttcaaatttcctttcataccttgaagtatgtgtttagtagcctcaattctccattaattaaaagtgtgggctgggcgtgggggctcatgcctgtaatcccagcactttgggaggccgaggtgggcagatcacctgaggtcaggagttcaagaccagcctggccaacatggtgaaaccccgtctytacaaaaatacaaaaattagccaggcgtatggcaggtgcctgtaatcctagctacttggcaggctaacgcaggagaatcacttgaccgggagacagaggttgcagtgagctgagatcgtacctattgcactccatcctggatgaaagagccagactctgtctcaaaacaaacaaaaaagcgtggggacttctggggacagacaaggtgcctgttatatatttactcagtctttgccctgaatggtctcagcttgagaccatttcaaactggagagaagcaagccagccaatagaatggggtgatttacagggatttctgtttactgtcaaaatatttctcatctgcactatgtttccatttgtggtcctgaaggaaattcttataactcaacatttgtctggtcttataagtaaagacagctttaaaatctgaaaaaaaaaaaaaaaaaaaaaaaaagggcggccgc

SEQ ID NO: 548 - DNA, 2409 bp, Homo sapiens
cggcacgagcggctcccggcgccatgtgagggggctcgggggccgcggggggccgggcgctccccgccggagatgaggaaactgaggctcagagaggtcacatggcttgctcgaggccccccagccagtgtgaacccacatccctgcccccagggccacctgcaggacgccgacacctacccctcagcagacgccggagagaaatgagtagcaacaaagagcagcggtcagcagtgttcgtgatcctctttgccctcatcaccatcctcatcctctacagctccaacagtgccaatgaggtcttccattacggctccctgcggggccgtagccgccgacctgtcaacctcaagaagtggagcatcactgacggctatgtccccattctcggcaacaagacactgccctctcggtgccaccagtgtgtgattgtcagcagctccagccacctgctgggcaccaagctgggccctgagatcgagcgggctgagtgtacaatccgcatgaatgatgcacccaccactggctactcagctgatgtgggcaacaagaccacctaccgcgtcgtggcccattccagtgtgttccgcgtgctgaggaggccccaggagtttgtcaaccggacccctgaaaccgtgttcatcttctgggggcccccgagcaagatgcagaagccccagggcagcctcgtgcgtgtgatccagcgagcgggcctggtgttccccaacatggaagcatatgccgtctctcccggccgcatgcggcaatttgacgacctcttccggggtgagacgggcaaggacagggagaagtctcattcgtggttgagcacaggctggtttaccatggtgatcgcggtggagttgtgtgaccacgtgcatgtctatggcatggtcccccccaactactgcagccagcggccccgcctccagcgcatgccctaccactactacgagcccaaggggccggacgaatgtgtcacctacatccagaatgagcacagtcgcaagggcaaccaccaccgcttcatccgagaaaagggtcttctcatcgtgggcccagctgtatggcatcaccttctcccacccctcctggacctaggccacccagcctgtgggacctcaggagggtcagaggagaagcagcctccgcccagccgctaggccagggaccatcttctggccaatcaaggcttgctggagtgtctcccagccaatcagggccttgaggaggatgtatcctccagccaatcagggcctggggaatctgttggcgaatcagggatttgggagtctatgtggttaatcaggggtgtctttcttgtgcagtcagggtctgcgcacagtcaatcagggtagagggggtatttctgagtcaatctgaggctaaggacatgtcctttcccatgaggccttggttcagagccccaggaatggaccccccaatcactccccactctgctgggataatggggtcctgtcccaaggagctgggaacttggtgttgccccctcaatttccagcaccagaaagagagattgtgtgggggtagaagctgtctggaggcccggccagagaatttgtggggttgtggaggttgtgggggcggtggggaggtcccagaggtgggaggctggcatccaggtcttggctctgccctgagaccttggacaaacccttccccctctctgggcacccttctgcccacaccagtttccagtgcggagtctgagaccctttccacctcccctacaagtgccctcgggtctgtcctccccgtctggaccctcccagccactatcccttgctggaaggctcagctctttggggggtctggggtgacctccccacctcctggaaaactttagggtacttttgcgcaaactccttcagggttgggggactctgaaggaaacgggacaaaaccttaagctgttttcttagcccctcagccagctgccattagcttggctcttaaagggccaggcctccttttctgccctctagcagggaggttttccaactgttggaggcgcctttggggctgcccctttgtctggagtcactgggggcttccgagggtctccctcgaccctctgtcgtcctgggatggctgtcgggagctgtatcacctgggttctgtcccctggctctgtatcaggcactttattaaagctgggcctcagtggggtgtgtttgtctcctgctcttctggagcctggaaggaaagggcttcaggaggaggctgtgaggctggagggaccagatggaggaggccagcagctagccattgcacactggggtgatgggtgggggcggtgactgccccagacttggttttgtaatgatttgtacaggaataaacacacctacgctccgaaaaaaaaaaaaaaaaaaaaaaaaaaaaaaa

SEQ ID NO: 549 - DNA, 1524 bp, Homo sapiens
  misc_feature (42)..(42): n equals a,t,g, or c
  misc_feature (1511)..(1511): n equals a,t,g, or c
  misc_feature (1518)..(1518): n equals a,t,g, or c
ggcggggagaagccggccctttaggacccggctgcggcggcnagggaggaggaagaagcggaggaggcggctcccgcgctcgcagggccgtgccacctgcccgcccgcccgctcgctcgctcgcccgccgcgccgcgctgccgaccgccagcatgctgccgagagtgggctgccccgcgctgccgctgccgccgccgccgctgctgccgctgctgccgctgctgctgctgctactgggcgcgagtggcggcggcggcggggcgcgcgcggaggtgctgttccgctgcccgccctgcacacccgagcgcctggccgcctgcgggcccccgccggttgcgccgcccgccgcggtggccgcagtggccggaggcgcccgcatgccatgcgcggagctcgtccgggagccgggctgcggctgctgctcggtgtgcgcccggctggagggcgaggcgtgcggcgtctacaccccgcgctgcggccaggggctgcgctgctatccccacccgggctccgagctgcccctgcaggcgctggtcatgggcgagggcacttgtgagaagcgccgggacgccgagtatggcgccagcccggagcaggttgcagacaatggcgatgaccactcagaaggaggcctggtggagaaccacgtggacagcaccatgaacatgttgggcgggggaggcagtgctggccggaagcccctcaagtcgggtatgaaggagctggccgtgttccgggagaaggtcactgagcagcaccggcagatgggcaagggtggcaagcatcaccttggcctggaggagcccaagaagctgcgaccaccccctgccaggactccctgccaacaggaactggaccaggtcctggagcggatctccaccatgcgccttccggatgagcggggccctctggagcacctctactccctgcacatccccaactgtgacaagcatggcctgtacaacctcaaacagtgcaagatgtctctgaacgggcagcgtggggagtgctggtgtgtgaaccccaacaccgggaagctgatccagggagcccccaccatccggggggaccccgagtgtcatctcttctacaatgagcagcaggaggctcgcggggtgcacacccagcggatgcagtagaccgcagccagccggtgcctggcgcccctgccccccgcccctctccaaacaccggcagaaaacggagagtgcttgggtggtgggtgctggaggattttccagttctgacacacgtatttatatttggaaagagaccagcaccgagctcggcacctccccggcctctctcttcccagctgcagatgccacacctgctccttcttgctttccccgggggaggaagggggttgtggtcggggagctggggtacaggtttggggagggggaagagaaatttttatttttgaacccctgtgtcccttttgcataagattaaaggaaggaaaagtaaaaaaaaaaaaaaaaggggggcccccctaaaggtccaagctnacgtacncgtaat

SEQ ID NO: 550 - DNA, 550 bp, Homo sapiens
  misc_feature (5)..(5): n equals a,t,g, or c
  misc_feature (482)..(482): n equals a,t,g, or c
gcggnacgcgtgggcttggggctgtcgggaccgctgcttaaatttggcccagtccagacctcgagtcgggcccccagccaggcccacgcccaggtccaggcccaggccggtagggatcctctagggtcccagctcgcctcgatggagctcctcccgccgctgcctcagtccttcctgttgctgctgctgttgcctgccaagcccgcggcgggcgaggactggcagtgcccgcgcaccccctacgcggcctctcgcgactttgacgtgaagtacgtggtgcccagcttctccgccggagcctggtacagccatggtgacctacgagggcgacagaaatgagagtgctgtgtttgtagccatacgcaatcgcctgcatgtgcttgggcctgacctgaagtctgtccagagcctggccacgggccctgctggagaccctggctgccagacgtgtgcagcctgtggcccaggaccccacggccctnccggtgacacagacacaaagttctggtgctggattccggcgctgccttgcgcttggtcaattgttggg

SEQ ID NO: 551 - DNA, 567 bp, Homo sapiens
  misc_feature (537)..(537): n equals a,t,g, or c
  misc_feature (548)..(548): n equals a,t,g, or c
  misc_feature (558)..(558): n equals a,t,g, or c
  misc_feature (560)..(560): n equals a,t,g, or c
  misc_feature (564)..(564): n equals a,t,g, or c
gcccacgcgtccgggagatgcggctgctgctggccctgttggggatcctgctgagtgtgcctggrcctccagtcttgtccctggaggcctctgaggaagtggagcttggtatggcttctgaggtgggagagggtggcaggggtgggaagagtgggcaccaggagggggctgctgggctgagcaaagctggaaaggatccttgcccaggccctgagaaggtggcggcagggcagggctcaaccactgaaactcagtcagtgcctggcttccagcaagcattcatctatcactgtgtctgcgagagaggactggccttgcagggcgcagggccctaagctgggctgcagagctggtggtgagctccttgcctgggtgtgtgtgcgtgtgtgtgtgtgttctgtgcactgggtgtgtgacctaggaggtccaggcagcatgtgtggtataagcattatgagggtgatatgccccggtgcagcatgaccctgtatgtggcaccaacagcatgtgccttgtgtgtgtgtgtgtccgtatgtntgtgtgttatncgtgtgtgtntntatntgt

SEQ ID NO: 552 - DNA, 3665 bp, Homo sapiens
ttggcttcgcttaagcttttaggtgacactatagaaggtacgcctgcaggtaccggtccggaattcccgggtcgacccacgcgtccgcccacgcgtccggagaacctttgcacgcgcacaaactacggggacgatttctgattgatttttggcgctttcgatccaccctcctcccttctcatgggactttggggacaaagcgtcccgaccgcctcgagcgctcgagcagggcgctatccaggagccaggacagcgtcgggaaccagaccatggctcctggaccccaagatccttaagttcgtcgtcttcatcgtcgcggttctgctgccggtccgggttgactctgccaccatcccccggcaggacgaagttccccagcagacagtggccccacagcaacagaggcgcagcctcaaggaggaggagtgtccagcaggatctcatagatcagaatatactggagcctgtaacccgtgcacagagggtgtggattacaccattgcttccaacaatttgccttcttgcctgctatgtacagtttgtaaatcaggtcaaacaaataaaagttcctgtaccacgaccagagacaccgtgtgtcagtgtgaaaaaggaagcttccaggataaaaactcccctgagatgtgccggacgtgtagaacagggtgtcccagagggatggtcaaggtcagtaattgtacgccccggagtgacatcaagtgcaaaaatgaatcagctgccagttccactgggaaaaccccagcagcggaggagacagtgaccaccatcctggggatgcttgcctctccctatcactaccttatcatcatagtggttttagtcatcattttagctgtggttgtggttggcttttcatgtcggaagaaattcatttcttacctcaaaggcatctgctcaggtggtggaggaggtcccgaacgtgtgcacagagtccttttccggcggcgttcatgtccttcacgagttcctggggcggaggacaatgcccgcaacgagaccctgagtaacagatacttgcagcccacccaggtctctgagcaggaaatccaaggtcaggagctggcagagctaacaggtgtgactgtagagtcgccagaggagccacagcgtctgctggaacaggcagaagctgaagggtgtcagaggaggaggctgctggttccagtgaatgacgctgactccgctgacatcagcaccttgctggatgcctcggcaacactggaagaaggacatgcaaaggaaacaattcaggaccaactggtgggctccgaaaagctcttttatgaagaagatgaggcaggctctgctacgtcctgcctgtgaaagaatctcttcaggaaaccagagcttccctcatttaccttttctcctacaaagggaagcagcctggaagaaacagtccagtacttgacccatgccccaacaaactctactatccaatatggggcagcttaccaatggtcctagaactttgttaacgcacttggagtaatttttatgaaatactgcgtgtgataagcaaacgggagaaatttatatcagattcttggctgcatagttatacgattgtgtattaagggtcgttttaggccacatgcggtggctcatgcctgtaatcccagcactttgataggctgaggcaggtggattgctttgagctcgggagtttgagaccagcctcatcaacacagtgaaactccatctcaatttaaaaagaaaaaaaagtggttttaggatgtcattmtttgcagttcttcatcatgagacaagtctttttttctgcttcttatattgcaagctccatctctactggtgtgtgcatttaatgacatctaactacagatgccgcacagccacaatgctttgccttatagttttttaactttagaacgggattatcttgttattacctgtattttcagtttcggatatttttgacttaatgatgagattatcaagacgtagccctatgctaagtcatgagcatatggacttacgagggttcgacttagagttttgagctttaagataggattattggggcttacccccaccttaattagagaaacatttatattgcttactactgtaggctgtacatctcttttccgatttttgtataatgatgtaaacatggaaaaactttaggaaatgcacttattaggctgtttacatgggttgcctggatacaaatcagcagtcaaaaatgactaaaaatataactagtgacggagggagaaatcctccctctgtgggaggcacttactgcattccagttctccctcctgcgccctgagactggaccagggtttgatggctggcagcttctcaaggggcagcttgtcttacttgttaattttagaggtatatagccatatttatttataaataaatatttatttatttatttataagtagatgtttacatatgcccaggattttgaagagcctggtatctttgggaagccatgtgtctggtttgtcgtgctgggacagtcatgggactgcatcttccgacttgtccacagcagatgaggacagtgagaattaagttagatccgagactgcgaagagcttctctttcaagcgccattacagttgaacgttagtgaatcttgagcctcatttgggctcagggcagagcaggtgtttatctgccccggcatctgccatggcatcaagagggaagagtggacggtgcttgggaatggtgtgaaatggttgccgactcaggcatggatgggcccctctcgcttctggtggtctgtgaactgagtccctgggatgccttttagggcagagattcctgagctgcgttttagggtacagattccctgtttgaggagcttggcccctctgtaagcatctgactcatctcagagatatcaattcttaaacactgtgacaacgggatctaaaatggctgacacatttgtccttgtgtcacgttccattattttatttaaaaacctcagtaatcgttttagcttctttccagcaaactcttctccacagtagcccagtcgtggtaggataaattacggatatagtcattctaggggtttcagtcttttccatctcaaggcattgtgtgttttgttccgggactggtttggctgggacaaagttagaactgcctgaagttcgcacattcagattgttgtgtccatggagttttaggaggggatggcctttccggtcttcgcacttccatcctctcccacttccatctggcgtcccacaccttgtcccctgcacttctggatgacacagggtgctgctgcctcctagtctttgcctttgctgggccttctgtgcaggagacttggtctcaaagctcagagagagccagtccggtcccagctcctttgtcccttcctcagaggccttccttgaagatgcatctagactaccagccttatcagtgtttaagcttattcctttaacataagcttcctgacaacatgaaattgttggggttttttggcgttggttgatttgtttaggttttgctttatacccgggccaaatagcacataacacctggttatatatgaaatactcatatgtttatgaccaaaataaatatgaaacctcatattaaaaaaaaaaaaaaaaaaaaaaaaaaaaaaaaaaaaaaaaaaaaa

SEQ ID NO: 553 - DNA, 1310 bp, Homo sapiens
  misc_feature (1237)..(1237): n equals a,t,g, or c
cccacgcgtccgcggacgcgtgggctccgggccagccgcggtccagagcgcgcgaggttcggggagctcsgccaggctgctggtacctgcgtccgcccggcaggacaggctgctttggtttgtgacctccaggcaggacggccatcctctccagaatgaagatcttcttgccagtgctgctggctgcccttctgggtgtggagcgagccagctcgctgatgtgcttctcctgcttgaaccagaagagcaatctgtactgcctgaagccgaccatctgctccgaccaggacaactactgcgtgactgtgtctgctagtgccggcattgggaatctcgtgacatttggccacagcctgagcaagacctgttccccggcctgccccatcccagaaggcgtcaatgttggtgtggcttccatgggcatcagctgctgccagagctttctgtgcaatttcagtgcggccgatggcgggctgcgggcaagcgtcaccctgctgggtgccgggctgctgctgagcctgctgccggccctgctgcggtttggcccctgaccgcccagaccctgtcccccgatcccccagctcaggaaggaaagcccagccctttctggatcccacagtgtatgggagcccctgactcctcacgtgcctgatctgtgcccttggtcccaggtcaggcccaccccctgcacctccacctgccccagcccctgcctctgccccaagtggggccagctgccctcacttctggggtggatgatgtgaccttccttgggggactgcggaagggacgagggttccctggagtcttacggtccaacatcaggaccaagtcccatggacatgctgacagggtccccagggagaccgtgtcagtagggatgtgtgcctggctgtgtacgtgggtgtgcagtgcacgtgagagcacgtggcggcttctgggggccatgtttggggagggaggtgtgccagcagcctggagagcctcagtccctgtagccccctgccctggcacagctgcatgcacttcaagggcagcctttgggggttggggtttctgccacttccgggtctaggccctgccccaaatccagccagtcctgccccagcccacccccacattggagccctcctgctgctttggtgcctcaaataaatacagatgtcccccaaaaaaaaaaaaaaaaaaagggggggccgtytaraggatcaagtttacgtacccgtgcatgcgacgnatagtctttataggggacctaaattcattcctggccggcgttacacgtgggactgggaaacctggcgtaccaa

SEQ ID NO: 554 - DNA, 1017 bp, Homo sapiens
  misc_feature (13)..(13): n equals a,t,g, or c
  misc_feature (16)..(16): n equals a,t,g, or c
cttatctttatanccncatcacattcaatgagttgggaatgcttagtgaggcagctcatgtactttacacagaagaaaacacactttaggtcatcaaattgtgtcaagaataaaaggaaatctccacaacagtgataaacacggttcttgttttagttgtttttctcaaagtaatcaggggatcttaacatcttcaracattttctggttcatgggtcctgaaacaatttctcctattgtttagtttgaaataactggctgctgctcccagcagtgtcaccaccaccacggatacgatgggagacacgatttttgctaccatattgccttctggattgccatacgttgaatggtgatctccaccataagtatttccataacgagagttgggtctatagccccctcttccgtgcgtgttgtcggagttgccataactggagtagccaccgccgccacctcctgcaggcggccgtggcctgggcctgggcgggtagcgtccgtcatcacggtccacatcattgaagtaacctccactgttgccggaattgccagctggggttgagggcgtggctttggccttgggtagatatttccaccgctgtcgggattctcgggctgtgggtagtaaggtggttttggctttgggtagatatctgagtttggcttcttggtgggttcagggtcatcaagggcatctgccaaatcaaagtctctttgacctcgggcgtgcattagaaaacacaggaacgcaagacagggaagtccccaccagctctccatggtttgcttcaggatgcaagaacctcagtggactccccagccaagcggattgtgagacccggcctctccaccctcctgttgttgacttctggtctcccagcttggaaggaagggaggcgatgtcttcaagtggaaaatatgagcggaactgccagaaacaaatgggctccaagctcagatcccaaactccacagctgaaaacctgtgggaccagtgtaggcacactcagtcgtgtgc

SEQ ID NO: 555 - DNA, 856 bp, Homo sapiens
tacgcctgcaggtaccggtccggaattcccgggtcgacccacgcgtccgcccacgcgtccgggcaacatggggtccagcagcttcttggtcctcatggtgtctctcgttcttgtgaccctggtggctgtggaaggagttaaagagggtatagagaaagcaggggtttgcccagctgacaacgtacgctgcttcaagtccgatcctccccagtgtcacacagaccaggactgtctgggggaaaggaagtgttgttacctgcactgtggcttcaagtgtgtgattcctgtgaaggaactggaagaaggaggaaacaaggatgaagatgtgtcaaggccataccctgagccaggatgggaggccaagtgtccaggctcctcctctaccaggtgtcctcagaaatgatgctgggtcctttctacctctgggggtcactctcacttggcacctgcccctgagggtcctgagacttggaatatggaagaagcaatacccaaccccaccaaagaaaacctgagcttgaagtccttttccccaaaaagagggaagagtcacaaaaagtccagaccccagggacggtactttccctctctacctggtgctcctccctaatgctcatgaatggacccctcatgaatgaaaccagtgcccttataagagaccccaaagagctgccttgcccttctgcaatgtgtgatcacagctagaaggcactgtcagagaagagaaactggtcctcaccagatgctgaatctgctggtgccttgatcttggacttcccagcctctagaactgtaagaaataaatatttgctgtttataatccaaaaaaaaaaaaaaaaaaaaaaagggcggccgc

SEQ ID NO: 556 - DNA, 1052 bp, Homo sapiens
tcgacccacgcgtccgcccacgcgtccgcccacgcgtccgggcgggcgcaggacgtgcactatggctcggggctcgctgcgccggttgctgcggctcctcgtgctggggctctggctggcgttgctgcgctccgtggccggggagcaagcgccaggcaccgccccctgctcccgcggcagctcctggagcgcggacctggacaagtgcatggactgcagcacctcctgcccccttccggctgctttggcccatccttgggggcgctctgagcctgaccttcgtgctggggctgctttctggctttttggtctggagacgatgccgcagagagagaagttcaccacccccatagaggagaccggcggagagggctgcccagctgtggcgctgatccagtgacaatgtgccccctgccagccggggctcgcccactcatcattcattcatccattctagagccagtctctgcctcccagacgcggcgggagccaagctcctccaaccacaaggggggtggggggcggtgaatcacctctgaggcctgggcccagggttcaggggaaccttccaaggtgtctggttgccctgcctctggctccagaacagaaagggagcctcacgctggctcacacaaaacagctgacactgactaaggaactgcagcatttgcacaggggagggggtgccctccttcctagaggccctgggggccaggctgacttggggggcagacttgacactaggccccactcactcagatgtcctgaaattccaccacgggggtcaccctggggggttagggacctatttttaacactagggggctggcccactaggagggctggccctaagatacagacccccccaactccccaaagcggggaggagatatttattttggggagagtttggaggggagggtggggggggggaaaaaaaaataaaaaaaaaaatttttaatttttaaaaaaaaaaaaaaaaaaaaaaaaaaaaaaaaaaaaaaaaaaaaaaaaaaaaaaaaaaaaaaaaaaaaaaaaaaaaaaaaaaaaaa

SEQ ID NO: 557 - DNA, 331 bp, Homo sapiens
  misc_feature (317)..(317): n equals a,t,g, or c
  misc_feature (327)..(327): n equals a,t,g, or c
aaaaaaaaaaaaaaaaaaaacctgccaattttcaaacataccgtagagattattttcaggtgccattttatagtatagcagcagggcttttactctgtgtatgcacagatgcagtctggggcatggtttgtgtgctggactttctcatggccatcatcagtatgcttatggatttgatgacaggcatagcctgggcatatcacctcattggtaaagggctagagcctttcttttttatggcacttctttttttgagatarggtcttactctgtcaccctggctagagtacacyggtaacaatccaagggctccaatngtaaggcttnaacc

SEQ ID NO: 558 - DNA, 2471 bp, Homo sapiens
  misc_feature (454)..(454): n equals a,t,g, or c
  misc_feature (469)..(469): n equals a,t,g, or c
  misc_feature (483)..(483): n equals a,t,g, or c
  misc_feature (489)..(489): n equals a,t,g, or c
  misc_feature (515)..(515): n equals a,t,g, or c
  misc_feature (540)..(540): n equals a,t,g, or c
  misc_feature (2430)..(2430): n equals a,t,g, or c
ggcacgagtgagtggcccacgatgggaagaggggaaagcccaggggtacaggaggcctctgggtgaaggcagaggctaacatggggttcggagcgaccttggccgttggctggaccatctttgtgctgtctgtcgtcactatcatcatctgcttcacctgctcctgctgctgcctttacaagacgtgccgccgaccacgtccggttgtcaccaccaccacatccaccactgtgggtgcatgccccttatcctcagcctccaagtgtgccgcccagctaccctggaccaagctaccagggctaccacaccatgccgcctcagccaggaatgccagcagcaccctacccaatkgcartkacccaccactttacccagcccagcccatkgggcccaacccggcctaaccacraraacccttggttggaagwarmaacsgggccctaacccccgccangcaacttcccttaanaaccccggctaaantggatncccccaaaagggggccctcttaaaantcccctggcccctctttggttgcanttgktrttttygtwytctactatytkkgrgcccattgggtacgggccccccctacgagttttttttttttttttttccaaacgattgcatttattataaacaagtgtacagaccctagactcagaaacacaacagatttgagctaagacagctctggtgaaacagtaatagagggaggaggaacacgaggtattcatgtctgggccagagctgccatccagggccccacaccccacctttggtccagatggcccattggcccaggtgtccctgctgccagaacaccgtggactggggtacaggagttgttgcatattccatgaggctggtgtcgggaagcagggactcacagttgccaggttgtccatctctgagccaatttccctccacaacccaggggtttcagtctcatatcaactatcatgtttgaaacagaaaacaggcaaaatgtttggctaaaataaaatgaaaacactgcagggaagagaactgagtgtgctggtggacaggagccctgctcacctgtgggaagggcagggccagcaagggcagcagagctccctgggggcagctaggctgtgtgtgcatgtggccctccagctggtcccaggggagatgcggggacaggggacagtccaggcagacaggtacagctgagtagggctctgcctgaggtgttctggcatcaggaggctgcctgatccccaacaggcatgacaggctccagggagcaatgggacatctgcccaaaggatcaaagtccaacttggccagatccccaacttcgcctgcatcatgtccctggctctgcaacgggtacccccaactccggggacggagccatggcctcaagcagcagctggtacgctgccgaaaccaggacacatctgcatcacacagaaagctgcgccaccctggtgtgacaggccctacttggtcaccctagggtaagctggagaagaactccagatgtgccctggagaggcccccacctctcaggggccacctcacagggtgccccccaccaccccattctttgagtttggcttgagattttaggaagcataatttcaggtgaggaagagaacaaagtctggtcccagcccactctggcaaggattgttccccaccttgtcagcatcagaggaagccacatatacaggcaggacacacacagcacacatggggcgtaaggaaccgtgcctggacacacacagcacacatggggcgtaaggaaccgcgcctgcacaccactcacgcacacacacaacataaccaagtggcagccagagaggccagggaatgctcagagggccgccttcggggcatccatgtaggccgggttgtaaggaggctggctggcggggtagggcgcggctgctctccagccagggtctcgtggtaggccggtgggcccatgggctgggctgggtaaggtggtgggtactgcattgggtagggtgctgctggcatccctggctgaggcggcatggtgtggtagccctggtagcttggtccagggtagctgggcggcacacttggaggctgaggataaggggcatgcaccacagtggtggatgtggtggtggtgacaaccggacgtggtcggcggcacgtcttgtaaaggcagcagcaggagcaggtgaagcagatgatgatagtgacgacagacagcacaaagatggtcaggccaacggccaaggtcgctccgaaccccatgttagcctctgccttcacccagaggcctcctgtacccctgggctttcccctcttcccatcgtgggccactcagtttcaatttcctccccttttggagaaaaagaaagcaaatctcctccagatgacgtcagccacaggaagcacagacgcgaagccccctcgtgccaggantcggggaagaggctgagtccacgggaagccatactcgtgcc

SEQ ID NO: 559 - DNA, 810 bp, Homo sapiens
  misc_feature (631)..(631): n equals a,t,g, or c
  misc_feature (719)..(719): n equals a,t,g, or c
  misc_feature (743)..(743): n equals a,t,g, or c
  misc_feature (751)..(751): n equals a,t,g, or c
  misc_feature (758)..(758): n equals a,t,g, or c
  misc_feature (798)..(798): n equals a,t,g, or c
gaaccaccaaccgaggcgccgggcagcgacccctgcagcggagacagagactgagcggcccggccccgccatgcctgcgctctggctgggctgctgcctctgcttctcgctcctcctgcccgcagcccgggccacctccaggagggaagtctgtgattgcaatgggaagtccaggcagtgtatctttgatcgggaacttcacagacaaactggtaatggattccgctgcctcaactgcaatgacaacactgatggcattcactgcgagaagtgcaagaatggcttttaccggcacagagaaagggaccgctgtttgccctgcaattgtaactccaaaggttctcttagtgctcgatgtgacaactccggacggtgcagctgtaaaccaggtgtgacaggagccagatgcgaccgatgtctgccaggcttccacatgctcacggatgcggggtgcacccaagaccagagactgctagactccaagtgtgactgtgacccagctggcatcgcagggccctgtgacgcgggccgctgtgtctgcaagccagctgtyactggagaacgctgtgataggtgtcgatcaggttactataatctggatggggggaaccctgagggctgtacccagtgnttctgtatggcatcagccagctgccgcactctgcagaaacagtgcctaagacactctacctttatcaagatgtgatggtggaaggtgncacgaatggctctgaagtcatgtncaggctanatggtantaccacataactgcatttggtctgcaatctggatacagtncttggaacctgc

SEQ ID NO: 560 - DNA, 465 bp, Homo sapiens
  misc_feature (426)..(426): n equals a,t,g, or c
  misc_feature (435)..(435): n equals a,t,g, or c
  misc_feature (462)..(462): n equals a,t,g, or c
ttttagggtgacactatagaagggtacgcctgcaggtaccggtccggaattcccgggcatatgcttgctgcttgagagttttgcttactgagtatgatttatgaaaatattatacacaggagctagtgattctaattgtttgtgtattttagattcacagtcccaaggctcatttcaggcccctcagtcctcacagtctgttcatgatcataatcagccataccacatttgtagaggttttacttgctttaaaaaacctcccacacctccccctggaacctggaaacataaaatgaatgcaattgttgttgttaacttgtttattgcagcttataatggttacaaataaagcaatagcatcacaaatttcacaaataaagcattttttccactgccatctagttgtggtttgtccaaactcatcangtaacctanccagtccgggatcgatcccggcattangga

SEQ ID NO: 561 - DNA, 872 bp, Homo sapiens
  misc_feature (8)..(9): n equals a,t,g, or c
  misc_feature (17)..(17): n equals a,t,g, or c
  misc_feature (24)..(24): n equals a,t,g, or c
  misc_feature (43)..(43): n equals a,t,g, or c
  misc_feature (805)..(805): n equals a,t,g, or c
  misc_feature (807)..(807): n equals a,t,g, or c
  misc_feature (816)..(816): n equals a,t,g, or c
gggggggnnaaaagggnagagaancctcggaggttgataaagntgcacgaccacttctgcgctcggcccttccggctggctggtttattgctgataaatctggagccggtgagcgtgggtctcgcggtatcattgcagcactggggccagatggtaagccctcccgtatcgtagttatctacacgacggggagtcaggcaactatggatgaacgaaatagacagatcgctgagataggtgcctcactgattaagcattggtaactgtcagaccaagtttactcatatatactttagattgatttaaaacttcatttttaatttaaaaggatctaggtgaagatcctttttgataatctcatgccataacttcgtataatgtatgctatacgaagttatggcatgaccaaaatcccttaacgtgagttttcgttccactgagcgtcagaccccgtagaaaagatcaaaggatcttcttgagatcctttttttctgcgcgtaatctgctgcttgcaaacaaaaaaaccaccgctaccagcggtggtttgtttgccggatcaagagctaccaactctttttccgaaggtaactggcttcagcagagcgcagataccaaatactgttcttctagtgtagccgtagttaggccaccacttcaagaactctgtagcaccgcctacatacctcgctctgctaatcctgttaccagtggctgctgccagtggcgataagtcgtgtcttaccgggttggactcaagacgatagttaccggataaggcgcagcggtcgggctgaacggggggttngngcacacagnccagcttggagcgaacgacctacaccgaactgagatacctacagcgtgagctatga

SEQ ID NO: 562 - DNA, 675 bp, Homo sapiens
  misc_feature (629)..(629): n equals a,t,g, or c
ccgcctgcaggtaccggtccggaattcccgggtcgaccccaaaaawcttgattagggtgatggttcacgtagtgggccatcgccctgatagacggtttttcgccctttgacgttggagtccacgttcttaatagtggactcttgttccaaactggaacaacactcaaccctatctcggtctattcttttgatttataagggattttgccgatttcggcctattggttaaaaaatgagctgatttaacaaaaatttaacgcgaattttaacaaaatattaacgcttacaatttagktggcacttttcggggaaatgtgcgcggaacccctatttgtttatttttctaaatacattcaaatatgtatccgctcatgccaggtcttggactggtgagaacggcttgctcggcagcttcgatgtgtgctggagggagaataaaggtctaagatgtgcgatagagggaagtcgcattgaattatgtgctgtgtagggatcgctggtatcaaatatgtgtgcccacccctggcatgagacaataaccctgataaatgcttcaataatattgaaaaaggaagagtatgagtattcmaacatttcccgtgtcgcccttatttcccttttttgcggcnattttgcctttcctgtttttgctcacccagaaacgctggtgaaagt

SEQ ID NO: 563 - DNA, 3714 bp, Homo sapiens
  misc_feature (3662)..(3662): n equals a,t,g, or c
  misc_feature (3670)..(3670): n equals a,t,g, or c
  misc_feature (3678)..(3678): n equals a,t,g, or c
cggacgcgtggggcgagttcagggctcctgccgctctccaggagcaacctctactccggacgcacaggcattccccgcgcccctccagccctcgccgccctcgccaccgctcccggccgccgcgctccggtacacacaggatccctgctgggcaccaacagctccaccatggggctggcctggggactaggcgtcctgttcctgatgcatgtgtgtggcaccaaccgcattccagagtctggcggagacaacagcgtgtttgacatctttgaactcaccggggccgcccgcaaggggtctgggcgccgactggtgaagggccccgacccttccagcccagctttccgcatcgaggatgccaacctgatcccccctgtgcctgatgacaagttccaagacctggtggatgctgtgcgggcagaaaagggtttcctccttctggcatccctgaggcagatgaagaagacccggggcacgctgctggccctggagcggaaagaccactctggccaggtcttcagcgtggtgtccaatggcaaggcgggcaccctggacctcagcctgaccgtccaaggaaagcagcacgtggtgtctgtggaagaagctctcctggcaaccggccagtggaagagcatcaccctgtttgtgcaggaagacagggcccagctgtacatcgactgtgaaaagatggagaatgctgagttggacgtccccatccaaagcgtcttcaccagagacctggccagcatcgccagactccgcatcgcaaaggggggcgtcaatgacaatttccagggggtgctgcagaatgtgaggtttgtctttggaaccacaccagaagacatcctcaggaacaaaggctgctccagctctaccagtgtcctcctcacccttgacaacaacgtggtgaatggttccagccctgccatccgcactaactacattggccacaagacaaaggacttgcaagccatctgcggcatctcctgtgatgagctgtccagcatggtcctggaactcaggggcctgcgcaccattgtgaccacgctgcaggacagcatccgcaaagtgactgaagagaacaaagagttggccaatgagctgaggcggcctcccctatgctatcacaacggagttcagtacagaaataacgaggaatggactgttgatagctgcactgagtgtcactgtcagaactcagttaccatctgcaaaaaggtgtcctgccccatcatgccctgctccaatgccacagttcctgatggagaatgctgtcctcgctgttggcccagcgactctgcggacgatggctggtctccatggtccgagtggacctcctgttctacgagctgtggcaatggaattcagcagcgcggccgctcctgcgatagcctcaacaaccgatgtgagggctcctcggtccagacacggacctgccacattcaggagtgtgacaaragatttaaacaggatggtggctggagccactggtccccgtggtcatcttgttctgtgacatgtggtgatggtgtgatcacaaggatccggctctgcaactctcccagcccccagatgaaygggaaaccctgtgaaggcgaagcgcgggagaccaaagcctgcaagaaagacgcctgccccatcaatggaggctggggtccttggtcaccatgggacatctgttctgtcacctgtggaggaggggtacagaaacgtagtcgtctctgcaacaaccccrcaccccagtttggaggcaaggactgcgttggtgatgtaacagaaaaccagatctgcaacaagcaggactgtccaattgatggatgcctgtccaatccctgctttgccggcgtgaagtgtactagctaccctgatggcagctggaaatgtggtgcttgtccccctggttacagtggaaatggcatccagtgcacagatgttgatgagtgcaaagaagtgcctgatgcctgcttcaaccacaatggagagcaccggtgtgagaacacggaccccggctacaactgcctgccctgccccccacgcttcaccggctcacagcccttcggccagggtgtcgaacatgccacggccaacaaacaggtgtgcaagccccgtaacccctgcacggatgggacccacgactgcaacaagaacgccaagtgcaactacctgggccactatagcgaccccatgtaccgctgcgagtgcaagcctggctacgctggcaatggcatcatctgcggggaggacacagacctggatggctggcccaatgagaacctggtgtgcgtggccaatgcgacttaccactgcaaaaaggataattgccccaaccttcccaactcagggcaggaagactatgacaaggatggaattggtgatgcctgtgatgatgacgatgacaatgataaaattccagatgacagggacaactgtccattccattacaacccagctcagtatgactatgacagagatgatgtgggagaccgctgtgacaactgtccctacaaccacaacccagatcaggcagacacagacaacaatggggaaggagacgcctgtgctgcagacattgatggagacggtatcctcaatgaacgggacaactgccagtacgtctacaatgtggaccagagagacactgatatggatggggttggagatcagtgtgacaattgccccttggaacacaatccggatcagctggactctgactcagaccgcattggagatacctgtgacaacaatcaggatattgatgaagatggccaccagaacaatctggacaactgtccctatgtgcccaatgccaaccaggctgaccatgacaaagatggcaagggagatgcctgtgaccacgatgatgacaacgatggcattcctgatgacaaggacaactgcagactcgtgcccaatcccgaccagaaggactctgacggcgatggtcgaggtgatgcctgcaaagatgattttgaccatgacagtgtgccagacatcgatgacatctgtcctgagaatgttgacatcagtgagaccgatttccgccgattccagatgattcctctggaccccaaagggacatcccaaaatgaccctaactgggttgtacgccatcagggtaaagaactcgtccagactgtcaactgtgatcctggactcgctgtaggttatgatgagtttaatgctgtggacttcagtggcaccttcttcatcaacaccgaaagggacgatgactatgctggatttgtctttggctaccagtccagcagccgcttttatgttgtgatgtggaagcaagtcacccagtcctactgggacaccaaccccacgagggctcagggatactcgggcctttctgtgaaagttgtaaactccaccacagggcctggcgagcacctgcggaacgccctgtggcacacaggaaacacccctggccaggtgmgcaccctggaacagagagagagcttatgggtgcctgactagcactggggatgctgtgctttgaccaagactctgaccagggagtcttagaaagttcccagcatcaccagctgcagcattgaactctgctttgtaaaaacataatagtgttgaaaagggagcttgaccaagaattgccctgcaaatcctaaggtgccttcagccttttcaaacaaaaaaacctncttccctnctctctgnctgctttatatgtgtgctcagtggcacacaacaaat

SEQ ID NO: 564 - DNA, 1949 bp, Homo sapiens
ccacgcgtccgcgctgcgactcagacctcagctccaacatatgcattctgaagaaagatggctgagatggacagaatgctttattttggaaagaaacaatgttctaggtcaaactgagtctaccaaatgcagactttcacaatggttctagaagaaatctggacaagtcttttcatgtggtttttctacgcattgattccatgtttgctcacagatgaagtggccattctgcctgcccctcagaacctctctgtactctcaaccaacatgaagcatctcttgatgtggagcccagtgatcgcgcctggagaaacagtgtactattctgtcgaataccagggggagtacgagagcctgtacacgagccacatctggatccccagcagctggtgctcactcactgaaggtcctgagtgtgatgtcactgatgacatcacggccactgtgccatacaaccttcgtgtcagggccacattgggctcacagacctcagcctggagcatcctgaagcatccctttaatagaaactcaaccatccttacccgacctgggatggagatcaccaaagatggcttccacctggttattgagctggaggacctggggccccagtttgagttccttgtggcctactggaggagggagcctggtgccgaggaacatgtcaaaatggtgaggagtgggggtattccagtgcacctagaaaccatggagccaggggctgcatactgtgtgaaggcccagacattcgtgaaggccattgggaggtacagcgccttcagccagacagaatgtgtggaggtgcaagagaggccattcccctggtactggccctgtttgcctttgttggcttcatgctgatccttgtggtcgtgccactgttcgtctggaaaatgggccggctgctccagtactcctgttgccccgtggtggtcctcccagacaccttgaaaataaccaattcaccccagaagttaatcagctgcagaagggaggaggtggatgcctgtgccacggctgtgatgtctcctgaggaactcctcagggcctggatctcataggtttgcggaagggcccaggtgaagccgagaacctggtctgcatgacatggaaaccatgaggggacaagttgtgtttctgttttccgccacggacaagggatgagagaagtaggaagagcctgttgtctacaagtctagaagcaaccatcagaggcagggtggtttgtctaacagaacactgactgaggcttaggggatgtgacctctagactgggggctgccacttgctggctgagcaaccctgggaaaagtgacttcatcccttcggtcctaagttttctcatctgtaatgggggaattacctacacacctgctaaacacacacacacagagtctctctctatatatacacacgtacacataaatacacccagcacttgcaaggctagagggaaactggtgacactctacagtctgactgattcagtgtttctggagagcaggacataaatgtatgatgagaatgatcaaggactctacacactgggtggcttggagagcccactttcccagaataatccttgagagaaaaggaatcatgggagcaatggtgttgagttcacttcaagcccaatgccggtgcagaggggaatggcttagcgagctctacagtaggtgacctggaggaaggtcacagccacactgaaaatgggatgtgcatgaacacggaggatccatgaactactgtaaagtgttgacagtgtgtgcacactgcagacagcaggtgaaatgtatgtgtgcaatgcgacgagaatgcagaagtcagtaacatgtgcatgtttgttgtgctccttttttctgttggtaaagtacagaatttagcaaataaaaagggccaccctggccaaaagcggtcaaaaaaaaaaaaaaaaaaaaaaaaaaaaaaaa

SEQ ID NO: 565 - DNA, 1178 bp, Homo sapiens; identical to SEQ ID NO: 531
  misc_feature (1139)..(1139): n equals a,t,g, or c
  misc_feature (1146)..(1146): n equals a,t,g, or c
  misc_feature (1148)..(1148): n equals a,t,g, or c

SEQ ID NO: 566 - DNA, 2024 bp, Homo sapiens
agcgcccgccttcgcggtgaacagaattcggcacgagaccgtccgcagccgccggagccgggagccctgcccaagtcggagcggcgtcccctgctgagccccgagcgccgggccagcagccggatgcccgggcccactgggcgggccagtggccgcctgcgggatgagcagactgctgggggggacgctggagcgcgtctgcaaggctgtgctccttctctgcctgctgcacttcctcgtggccgtcatcctctactttgacgtctacgcccagcacctggccttcttcagccgcttcagtgcccgaggccctgcccatgccctccacccagctgctagcagcagcagcagcagcagcaactgctcccggcccaacgccaccgcctctagctccgggctccctgaggtccccagtgccctgcccggtcccacggctcccacgctgccaccctgtcctgactcgccacctggtcttgtgggcagactgctgatcgagttcacctcacccatgcccctggagcgggtgcagagggagaacccaggcgtgctcatgggcggccgatacacaccgcccgactgcaccccagcccagacggtggcggtcatcatcccctttagacaccgggaacaccacctgcgctactggctccactatctacaccccatcttgaggcggcagcggctgcgctacggcgtctatgtcatcaaccagcatggtgaggacaccttcaaccgggccaagctgcttaacgtgggcttcctagaggcgctgaaggaggatgccgcctatgactgcttcatcttcagcgatgtggacctggtccccatggatgaccgcaacctataccgctgcggcgaccaaccccgccactttgccattgccatggacaagtttggcttccggcttccctatgctggctactttggaggtgtgtcaggcctgagtaaggctcagtttctgagaatcaatggcttccccaatgagtactggggctggggtggcgaggatgatgacatcttcaaccggatctccctgactgggatgaagatctcacgcccagacatccgaatcggccgctaccgcatgatcaagcacgaccgcgacaagcataacgaacctaaccctcagaggtttaccaagattcaaaacacgaagctgaccatgaagcgggacggcattgggtcagtgcggtaccaggtcttggaggtgtctcggcaaccactcttcaccaatatcacagtggacattgggcggcctccgtcgtggccccctcggggctgacactaatggacagaggctctcggtgccgaagattgcctgccagaggactgaccacagcctggctggcagctgctctgtggaggacctccaggactgagactgggctctgttttccaagggtcttcactaggccccctagctacacctggaagtttcagaacccactttggggggcctcctgcctgggcaggctcttcaagtgtggccctctttggagtcaaccctccttcccgaccccctccccctagcccagccccagtcactgtcagggtcgggccagcccctgcactgcctcgcagagtggcctgggctaggtcactccacctctctgtgcctcagtttcccccccttgagtcccctagggcctggaagggtgggaggtatgtctagggggcagtgtctcttccagggggaattctcagctcttgggaacccccttgctcccaggggaggggaaacctttttcattcaacattgtagggggcaagctttggtgcgccccctgctgaggagcagccccaggaggggaccagaggggatgctgtgtcgctgcctgggatcttggggttggcctttgcatgggaggcaggtggggcttggatcagtaagtctggttcccgcctccctgtctgagagaggaggcaggagccccagggccggcttgtgtttgtacattgcacagaaacttgtgtgggtgctttagtaaaaaacgtgaatggagcaaaaaaaaaaaaaaaaaaaa

SEQ ID NO: 567 - DNA, 1553 bp, Homo sapiens
ccacgcgtccgacggccgaaaagatggcggtcttggcacctctaattgctctcgtgtattcggtgccgcgactttcacgatggctcgcccaaccttactaccttctgtcggccctgctctctgctgccttcctactcgtgaggaaactgccgccgctctgccacggtctgcccacccaacgcgaagacggtaacccgtgtgactttgactggagagaagtggagatcctgatgtttctcagtgccattgtgatgatgaagaaccgcagatccatgttcctgatgacgtgcaaaccccccctatatatgggccctgagtatatcaagtacttcaatgataaaaccattgatgaggaactagaacgggacaagagggtcacttggattgtggagttctttgccaattggtctaatgactgccaatcatttgcccctatctatgctgacctctcccttaaatacaactgtacagggctaaattttgggaaagtggatgttggacgctatactgatgttagtacgcggtacaaagtgagcacatcacccctcaccaagcaactccctaccctgatcctgttccaaggtggcaaggaggcaatgcggcggccacagattgacaagaaaggacgggctgtctcatggaccttctctgaggagaatgtgatccgagaatttaacttaaatgagctataccagcgggccaagaaactatcaaaggctggagacaatatccctgaggagcagcctgtggcttcaacccccaccacagtgtcagatggggaaaacaagaaggataaataagatcctcactttggcagtgcttcctctcctgtcaattccaggctctttccataaccacaagcctgaggctgcagccttttatttatgttttccctttggctgtgactgggtggggcagcatgcagcttctgattttaaagaggcatctagggaattgtcaggcaccctacaggaaggcctgccatgctgtggccaactgtttcactggagcaagaaagagatctcataggacggagggggaaatggtttccctccaagcttgggttagtgtgttaactgcttatcagctattcagacatctccatggtttctccatgaaactctgtggtttcatcattccttcttagttgacctgcacagcttggttagacctagatttaaccctaaggtaagatgctggggtatagaacgctaagaattttcccccaaggactcttgcttccttaagcccttctggtttgtttatggtcttcattaaaagtataagcctaactttgtcgctagtcctaaggagaaacctttaaccacaaagtttttatcattgaagacaatattgaacaaccccctattttgtggggattgagaaggggtgaatagaggcttgagactttcctttgtgtggtaggacttggaggagaaatcccctggactttcactaaccctctgacatactccccacacccagttgatggctttccgtaataaaaagattgggatttccttttgaaaaaaaaaaaaaaaaaaaaaaaaaaa

SEQ ID NO: 568 - DNA, 675 bp, Homo sapiens; identical to SEQ ID NO: 562
  misc_feature (629)..(629): n equals a,t,g, or c

SEQ ID NO: 569 - DNA, 1184 bp, Homo sapiens
ctatagaaggtacgcctgcaggtaccggtccggaattcccgggtcgacccacgcgtccggcctggacagtcagcaaggaattgtctcccagtgcattttgccctcctggctgccaacgctggctgctaaagyggctgccacctgctgcagtctacacagcttcgggaagaggaaaggaacctcagaccttccagatcgcttcctctcgcaacaaactatttgtcgcaggaataaagatggctgctgaaccagtagaagacaattgcatcaactttgtggcaatgaaatttattgacaatacgctttactttatagctgaagatgatgaaaacctggaatccgattactttggcaagcttgaatctaaattatcagtcataagaaatttgaatgaccaagttctcttcattgaccaaggaaatcggcctctatttgaagatatgactgattctgactgtagagataatgcaccccggaccatatttattataagtatgtataaagatagccagcctagaggtatggctgtaactatctctgtgaagtgtgagaaaatttcaactctctcctgtgagaacaaaattatttcctttaaggaaatgaatcctcctgataacatcaaggatacaaaaagtgacatcatattctttcagagaagtgtcccaggacatgataataagatgcaatttgaatcttcatcatacgaaggatactttctagcttgtgaaaaagagagagacctttttaaactcattttgaaaaaagaggatgaattgggggatagatctataatgttcactgttcaaaacgaagactagctattaaaatttcatgccgggcgcaktggctcacgccsyaatcccasccctttrggagrctgagrcgggcagatcaccagaggtcaggtgttcaagaccagcctgaccaacatggtgaaacctcatctctactaaaaatacaaaaaattagctgagtgtagtgacccatgccctcaatcccggctactcaagaggctgaggcaggagaatcacttgcactccggaggtggaggttgtggtgagccgagattgcaccattgcgctctagcctgggcaacaacagcaaaactccatctcaaaaaataaaataaataaataaacaaataaaaaattcaaaaaaaaaaaaaaaaaaaaaagggcggccgc

SEQ ID NO: 570 - DNA, 1407 bp, Homo sapiens
ccacgcgtccgggatccaccttgattaaatctcttgtccccagccctcctggtccccaatggcagcagccgccatcccagctttgcttctgtgcctcccgcttctgttcctgctgttcggctggtcccgggctaggcgagacgaccctcactctctttgctatgacatcaccgtcatccctaagttcagacctggaccacggtggtgtgcggttcaaggccaggtggatgaaaagacttttcttcactatgactgtggcaacaagacagtcacacccgtcagtcccctggggaagaaactaaatgtcacaatggcctggaaagcacagaacccagtactgagagaggtggtggacatacttacagagcaactgcttgacattcagctggagaattacacacccaaggaacccctcaccctgcaggcaaggatgtcttgtgagcagaaagctgaaggacacagcagtggatcttggcagttcagtatcgatggacagaccttcctactctttgactcagagaagagaatgtggacaacggttcatcctggagccagaaagatgaaagaaaagtgggagaatgacaaggatgtggccatgtccttccattacatctcaatgggagactgcataggatggcttgaggacttcttgatgggcatggacagcaccctggagccaagtgcaggagcaccactcgccatgtcctcaggcacaacccaactcagggccacagccaccaccctcatcctttgctgcctcctcatcatcctcccctgcttcatcctccctggcatctgaggagagtcctttagagtgacaggttaaagatgataccaaaaagcccctgtgagcacggtcttgatcaacctcgcccttctgtctggccagctgcccaccacctacggtgtatgtccagcagcctccagcagatgatgatgacaccatggacccaatagctcattcactgccttgattccttttgccaacaatttaaccagtgattattcctaacatattatgcaattttctcttggtgctacctgatggaattcctgcacttaaagttctggctgactaaacaagatatgtcaacattttctttcttctctttttgtttggaaaatcaagtacttctttgaatgatgatttctttctttcattactgacatgattgtcagtaaaacaatcatgttagacttcagacctccagggattctttccatgtcctgaaagagaattgtttaattatttaataagaaaaaaatttatattaatgattgtttcctttagtaatttattgctgtgtactgatatttaaataaagagttatatttcccaaaaaaaaaaaaaaaaaaaaaaaaaaaaaaaaaaaaaaaaaaaaaaaaaaaaaaaaaaaaaaaaaaaaa

SEQ ID NO: 571 - DNA, 674 bp, Homo sapiens
  misc_feature (492)..(492): n equals a,t,g, or c
  misc_feature (581)..(581): n equals a,t,g, or c
  misc_feature (596)..(596): n equals a,t,g, or c
  misc_feature (654)..(654): n equals a,t,g, or c
  misc_feature (666)..(666): n equals a,t,g, or c
  misc_feature (671)..(671): n equals a,t,g, or c
aataatattgaaaaaggaagagtatgagtattcaacatttccgtgtcgcccttattcccttttttgcggcattttgccttcctgtttttgctcacccagaaacgctggtgaaagtaaaagatgctgaagatcagttgggtgcacgagtgggttacatcgaactggatctcaacagcggtaagatccttgagagttttcgccccgaagaacgttttccaatgatgagcacttttaaagttctgctatgtggcgcggtattatcccgtattgacgccgggcaagagcaactcggtcgccgcatacactattctyagaatgacttggytgagtactcaccagtcmcagaaaagcwtyttacggatggcatgacagtaagagaattatgcagtgctgccataaccatgagtgataacactgcggccaacttacttctgacaacgatcggaggaccgaagagctaaccgcttttttgcacaacatgggggatcatgnaactcgccttgatcgttgggaaccggagctgaatgaagccataccaaacgacgagcgtgacaccacgatgcctgtagcaatgggcacancgttgcgcaaactantaactggcgaaatacttactctagcttcccggcaacaattaatagactggatggaagncggataaagttncaggncca

SEQ ID NO: 572 - DNA, 409 bp, Homo sapiens
cctttttttttttttttttttttttttttttttyttttttgaaaagaaacttattttttattgtaattttatcagccaaatctatgtacactagggaatttattgccagcatgtgaacatastttccttcagatgaaataccaacgattctcctgagatcaaatggccttcccacatcgaagggcgggttcgaggcctcaaaggatagccgccttcgaaatggctcccatattccttgagcttccaaataggctgttccaatgaccaaaagaaacagtgcactcattattcctgagatgatgatatacagagccagttcccagttaggtctgggtagggcttctgcacaggttgctaacatatggtaaggaagggatgcattcaatataaatacaaaccggacgcgtgg

SEQ ID NO: 573 - DNA, 1076 bp, Homo sapiens; identical to SEQ ID NO: 372

SEQ ID NO: 574 - DNA, 249 bp, Homo sapiens
  misc_feature (3)..(3): n equals a,t,g, or c
  misc_feature (28)..(28): n equals a,t,g, or c
tcnccacactatattaggacgcctgcangtaccggtccggaattcccgggccctgaacctgaaacataaaatgaatgcaattgttgttgttaacttgtttattgcagcttataatggttacaaataaagcaatagcatcacaaatttcacaaataaagcatttttttcactgcattctagttgtggtttgtccaaactcatcaatgtatcttatcatgtctggatcgatcctgcattaatgaataaaaa

SEQ ID NO: 575 - DNA, 1237 bp, Homo sapiens
  misc_feature (8)..(8): n equals a,t,g, or c
  misc_feature (31)..(31): n equals a,t,g, or c
attgtgcntttccctgaccccattttaggtncgcctgcccgtaccggtccggaattcccgggtcgacccacgcgtccgggattttttagcttgcaaaaaaaatgagcaccaaacctgatatgattcaaaagtgtttgtggcttgagatccttatgggtatattcattgctggcaccctatccctggactgtaacttactgaacgttcacctgagaagagtcacctggcaaaatctgagacatctgagtagtatgagcaattcatttcctgtagaatgtctacgagaaaacatagcttttgagttgccccaagagtttctgcaatacacccaacctatgaagagggacatcaagaaggccttctatgaaatgtccctacaggccttcaacatcttcagccaacacaccttcaaatattggaaagagagacacctcaaacaaatccaaataggacttgatcagcaagcagagtacctgaaccaatgcttggaggaagacgagaatgaaaatgaagacatgaaagaaatgaaagagaatgagatgaaaccctcagaagccagggtcccccagctgagcagcctggaactgaggagatatttccacaggatagacaatttcctgaaagaaaagaaatacagtgactgtgcctgggagattgtccgagtggaaatcagaagatgtttgtattacttttacaaatttacagctctattcaggaggaaataagaatcatctaccttcaagcaagaattaacagagattgtggctacgcaaatgcaccaaaaaagggtgaaatatatctgaaatgtacctggttctgcccttggaagccacttcctgctcatgccactaacagcatgctgccaaactgttcagattcaagattattccaagcgcagggcccaaatgttatagccaaagaaagtcttatgataaaagtgaggcaaatttcagccaagaagttagaagagatgtttaaaagaacaagaacaaattgtggatcatggtatatgcaggctatcagcagaaggatcagacaataaaatgagttagtgcaaaccatttagtaaaaataactatcagcagagttgttccagattaaaaatagtactacaagcttgtaaaggagttaggacatgcaagctactgagcataaaatatatacttgctatttttcatgactttctctaataaagtctttgactgttctctctaataaaaaaaaaaaaaaaaaaaaa

SEQ ID NO: 576 - DNA, 969 bp, Homo sapiens
ccacgcgtccgctggggcctcctccactgggtccgaatcagtaggtgaccccgcccctggattctggaagacctcaccatgggacgcccccgacctcgtgcggccaagacgtggatgttcctgctcttgctggggggagcctgggcaggacactccagggcacaggaggacaaggtgctggggggtcatgagtgccaaccccattcgcagccttggcaggcggccttgttccagggccagcaactactctgtggcggtgtccttgtaggtggcaactgggtccttacagctgcccactgtaaaaaaccgaaatacacagtacgcctgggagaccacagcctacagaataaagatggcccagagcaagaaatacctgtggttcagtccatcccacacccctgctacaacagcagcgatgtggaggaccacaaccatgatctgatgcttcttcaactgcgtgaccaggcatccctggggtccaaagtgaagcccatcagcctggcagatcattgcacccagcctggccagaagtgcaccgtctcaggctggggcactgtcaccagtccccgagagacagggtttcgccatgttgaccaggctggtctcgaactcctgacctcaagtgatctgcccgcctcggcctaccaaagtgctgggattacaagcatgagccaccgcccctggcctttttctccttcttgaacccaggaaacctgggccctggtcacctcttccctcagacccgggagtctaggcccttcttctcccaggacccagcagtcctagctccctcttgactctggaccccaaaatctggacctccaatgaagctgtccctttgggactccagaaaaaaaaaaaaaaaaaaaaaaaaaaaaaaaaaaaaaaaaaaaaaaaaaaaaaaaaaaaaaaaaaaaaaaaaaaaaaaaaaaaaaaaaaaaaaaaaaaaaaaaaaaaaaaaaaaaaaaa

SEQ ID NO: 577 - DNA, 401 bp, Homo sapiens
  misc_feature (1)..(2): n equals a,t,g, or c
nntgcatggccatccatctcacagaaatkggggggttaagcatcaaacattggccataartcatgggcacttccccagcttcctcccttgttgggtttggggtgtcaacaggatcccaggcatttgatgccacaagtgtcaggacaacatctcttcttccctggacactgccagtcactctggcactcaggtttcttgtatctaaggcactgggcagatttcttaggaggacagactccagctttgaaggactttccagagccttccacagcccaaggtgccagagttcccagggcaagcagcrccaggaaggggaagaggccgctggacttcatggtgaaggyaggagtgactcccccttctgtcgtcttctcgccggacgcgtgggcggacgcgtgggc

SEQ ID NO: 578 - DNA, 825 bp, Homo sapiens
  misc_feature (812)..(812): n equals a,t,g, or c
  misc_feature (816)..(816): n equals a,t,g, or c
  misc_feature (819)..(819): n equals a,t,g, or c
  misc_feature (825)..(825): n equals a,t,g, or c
ggggaaccgagaggctgagactaacccagaaacatccaattctcaaactgaagctcgcactctcgcctccagcatgaaagtctctgccgcccttctgtgcctgctgctcatagcagccaccttcattccccaagggctcgctcagccagatgcaatcaatgccccagtcacctgctgytataacttcaccaataggaagatctcagtgcagaggctcgcgagctatagaagaatcaccagcagcaagtgtcccaaagaagctgtgatcttcaagaccattgtggccaaggagatctgtgctgaccccaagcagaagtgggttcaggattccatggaccacctggacaagcaaacccaaactccgaagacttgaacactcactccacaacccaagaatctgcagctaacttattttcccctagctttccccagacaccctgttttattttattataatgaattttgtttgttgatgtgaaacattatgccttaagtaatgttaattcttatttaagttattgatgttttaagtttatctttcatggtactagtgttttttagatacagagacttggggaaattgcttttcctcttgaaccacagttctacccctgggatgttttgagggtctttgcaagaatcattaatacaaagaattttttttaacattccaatgcattgctaaaatattattgtggaaatgaatattttgtaactattacaccaaataaatatatttttgtacaaaaaaaaaaaaaaagggcggccgctctmgagmtcaacttacgtaccgccgtgcatgcgacgcatanctcnttntatagn

SEQ ID NO: 579 - DNA, 1818 bp, Homo sapiens
  misc_feature (28)..(28): n equals a,t,g, or c
  misc_feature (54)..(54): n equals a,t,g, or c
  misc_feature (66)..(66): n equals a,t,g, or c
  misc_feature (74)..(74): n equals a,t,g, or c
  misc_feature (99)..(99): n equals a,t,g, or c
  misc_feature (1775)..(1775): n equals a,t,g, or c
  misc_feature (1810)..(1810): n equals a,t,g, or c
tggggcaaaccagcggtggaccgcatgntgcaactctctcagggccaggcggtnaagggcaatcangctgttgncccgtctcactggtgaaaagaaaanccaccctggcgcccaatacgcaaaccgcctctcaccgcgcgttggccgattcattaatgcagctggcacgacaggtttcccgactggaaagcgggcagtgagcgcaacgcaattaatgtgagttagctcactcattaggcaccccaggctttacactttatgcttccggctcgtatgttgtgtggaattgtgagcggataacaatttcacacaggaaacagctatgaccatgattacgccaagctctaatacgactcactatagggaaagctggtacgcctgcaggtaccggtccggaattcccgggtcgacccacgcgtccgatttcaccctgttggccaggctggccttgaactcctgatctcgtgattcacccaccttggcctcccaaagtgctgggattacaggcatgagccaccgcgcctggcctccccttcttttatcaacagcattctcctttttctttgggaaactacctgcatgtagtcttgctaggactgctgggaaactggtacaccagtcaagactttctcccccagacctgagatcttgagaaatgacataaggtctgaaaactgaagttgatctgttccaatggtggcctaaagagatcactcccatcagtttctgctctccctacccacaggactgctctgacttctcttcttcttggagctgctgttagactgtccttttgtaaatggaacttcccctgtccttccagtaaattcctatattgcttatgtgaaccagtgtcctcatgtgttacttacgcccagagaatcctaatccatatactacctaccctaatctatacatgacctctccttcttcactgcaaaggtccacttcagactctcacttttcacctggactgttagaatgcctctccttaagtggtctcctaaattccagattctcctcttacagttactcaaaaaatatttttttgtatgttggcatttgtatagcagtttgttagagtgctaagtgctggggatctcataaaataaacaggcaaggtttaggtcctcatatagtatagagtgggaggcaggtaatgcttagataatcatgcaaaaaattatagaccatggttatgtgctacaatggaaaatacagagtgctgtgaaactaacaggggaacatggcccaatacgtggggaaaggacggtatcagtcaagggaggcttcccccatggactaaccttaacgcgaagatggggatgctagggaagggaagaagaagatggagctttccaggcagaggggatagcaagtgcaaacaccctaagatggaaggtttaaggaagtcataaaagccaagtgtggcaggaacacagaaaaaaaaaaaaaaagggcggccgctctagaggatccaagcttacgyacgcgtgcatgcgacgtcatagctcttctatagtgtcacctaaattcaattcactggccgtcgttttacaacgtcgtgactgggaaaaccctggcgttacccaacttaatcgccttgcagcacatccccctttcgccagctggcgtaatagcgaagaggcccgcaccgatcgcccttyccaacagttgcgcacctgaatggcgaatgggacgcgccctgtagcggykcattaagcgcggtgtgtggtggttackcgcacgtgaccgtacacttgccagcgccctancgcccgatcctttcgctttcttccctttctttctngccacgtt

SEQ ID NO: 580 - DNA, 824 bp, Homo sapiens
tttttttttttttttttttttttttttttttttttttggagatggagtctcactctgttgcccaggctggagtgcagtgccacgatcttggctcactgaaacctccgtctcccggattcaagcgattctcctgcctcagcctccagagtagatgggattaagggcatgcaccgccatatcccgctaatttttgtatttttttttagtaaagacagggttttgccatgtttgccaggctggtcttgaactcctgacctcaagtgatccccctgactcggcctcccaaagtgctgggatcacaggcgtaagccagcatgcctggccgatttttaaaaggttattattatttatcttcctcttctttgagctactccaagacagtgcccaagtcttactgctgtatcctctaaagtatccaacacaaagcaagacatgctgtcaaataaactaagtaaccatgacaaatgtggagccaaattttctaggaaacatcaacaaagactagaacaactgggcagcttcgaggaatgattggcaaacttgggcaaagttttatcccccaggcatctggagtcgtgcccagtgtacactgactcactgtggctgagggtcaagggcaggttctgccaacaggggaaatgatcagaaagcagaactgagacagaccagttcagggagagaaaatatggggcgagatgcctccttcatcctttcaccaggattcacactcagagacaccactcagcatgcacagcacccatttccaaaatgcagacctatttgtatggtcactcttcaatcgatgtaattgctcggacgcgtgg

SEQ ID NO: 581 - DNA, 2090 bp, Homo sapiens
ccacgcgtccggggtttcactgtgttgactaggttggtctcgaactcctgacctcaagtaatccacccgtctcggcctcccaaagtgccggagttacaggcgtgagtcaccgcgcccagcctgatatgcaaatattttaaacttctatgacgttccactttatctatttgttcttctgttgcctgtgcttttggcgccatatccaagaaatcattgccaaatgcaacgtcaggaagcttttcccctgtgttttcttctaagagttttgtggttttagctcttgagtttaggtctttgatgcaagttgagttgatttttgcatgtggtgtaagggctggtccagcctcatgctctgggctcttgattcacttctcttcttttctcacgcccagctggttccgctgggtggcggggaggagtggggaagtcccgggctgggcctgcactcgatcatcccctctcaggccagccagggagtctcagctcctgcccaggacctggctggacgtgctccctaccgggaaagcctgggccgtctttctaggctgatggcagggccagcccggggcgtcctgaggcctgccctgcggacatgccccttgttctaggtggtgtggctgcccggcctgcgtgtgagaccagctgtctgtgcttcaggccatggaggctgagtgtttccagcctgtccccttgctcggctctccctctggggaagcccctgcagcccattctctgcctccgcttctgccatctgtgcctttgtctgcttcctgtttggaggtggtcatccctggggccacccctcatgatctggacacgagtctccatcctgaagccaccacccaaacccctgtgcctcaaacccctcccacccaccacatggggttccactgtgaccaactcagcagctgatgaagcttcccttggggctctcctagcaacggggagctggctttcccggaggcctggcctctccctaagtggaagtggggcagtgagggtgtcagcctttttctgctgcctggtgctctaggttggcttgtcacccctggaagcacttgccatccttatacagcaccccacacccacctccccggctcctaccccttcttccaaggggtcatctctgcttccctccccacccaacctcacccacgtggtccgcccagcaacctttgacccccaacatgacaaaataaacctcccttgccggtcactcattcattcattcagcattgggtgctccctgtggacttggcgctggggtcccgtggaggacaaagccagacacagtccttgccctcatgggactgcacaagtgcaagaccacatcagtaaacgtgaaacacaggaagtgacaggtgtgacaaaggggaccagtggcaggacagaacctggggttcgtaggaccaggtcaggagggctgcctcggggggacaccttcgggctgagcgcagaaggatgaggggagtaaaccaggctcaaacccagcaggcagaggcgatcgctgcaggcaaccgccaatgtgttcaaaggccctggggcgcggggggctgaggccggcagcacggcaggaagtaagactggggttgaaagagactgactgtcatgttgtgaaatatacacttggttttcatctccatttcctggcacacaactcctaaaatccttggaatctccaaagtgatgtctttttggatgctcatgattgacagaccagctggcagcttcaggatggttcccagggaagaccaggtagaatcacaaggttcagcaccaccccgcaacctccaggtaggggagaggggctgaaggttaagcagatcatcagcggccaatgattgaatcaatcatgccttcgtaatgaggcctccgtgaacactcagaaggatggggttccgggagcttctggatggatgagcatgtggaggctcctggagggtggagcgcctggggagcacatggaagctctgcgtccctcccccataccttgccctacacatctcttcccctgtatcctttgtaatatcctttataataaactagtaaattccatgagccccaggaacatgtgtaaaaaaaaaaaaaaa

SEQ ID NO: 582 - DNA, 971 bp, Homo sapiens
  misc_feature (90)..(90): n equals a,t,g, or c
  misc_feature (708)..(708): n equals a,t,g, or c
  misc_feature (754)..(754): n equals a,t,g, or c
  misc_feature (894)..(894): n equals a,t,g, or c
attatagccctacagaggcttctaagtgttcaagaaagagtsccatgtcyctcactttaaatcagaagctagaaatgattaagcttagtnaggaaggcawgtcaaaagcykagacaggctgaaagctgggcatcttgcaccaacagccaacttctgaatgcaaaggaaaagttctcgaaggaaagtaagagcactattccagtgacmcmcaaatgmcaagaacgccgatacacaggaagttgagtggtggggactgattaamccaccacaacattccctttagctgcagcctaattcagagcagggccctgactctcaattccytgagggctgtgagaggtgagggagctgcggaagaaaagctggaagctggcagagagttgtttatgaggtttaagacaccgtctccacaacataaaagtacaaggtgaaacagcaagtgctgatggagaagctgcagcaagttctccagaagatccagctgagctcattggtraagatggttactytaaacamcaggttttgaatgcaaacraacagccttatattggaagaatatgctgtctagtmctttcctagctagaaaggagacatccatgccttcgaaacttcaagggacaggctgactcttgttaggggcgaatgcggctggtgactttcagctgaagtcaatgctcacttgccatttcaaaaatcccagggcccttnagaattacgctacatctcctctacctgtcctccataaatggaacancaaagcatggatgacagtacatctgatgacagcattgttgactgagtattttaagcctaccattaagacctacacctatcataatacaactggctcattgacaacgcacctgctcacctaagagctctgatggagatgtncaagatgaatgctgatttcatgcctactaacacaacatccattctgtagcccagggatcaaggagtcatttcgattt

SEQ ID NO: 583 - DNA, 1067 bp, Homo sapiens
tgagccgtggacttgggttgtaaatttatttgtggggagtgcgctccaggaagagccaccatccctgcccccgttttcccaccggggagtctgtacagagatttttctacgtttttattttttgcctcagagggatgggattggggaggaggggatgggcagcggagggttgggggcatggtctgcaggctcatctgtgtccgcctttcactccactaatgctgtctcagtgttttctctctctctctttcgagcttgcactccggtacccgacccggcgccctggcccatcccatgccggggggccagtggaaagaagacaggccgtccagcccgtgcccgcctgcggcgggggcacccagcaagcccgcccaccgcccgctgcctcacctgcttcgccacagactcttgttcccagccccttggggcctccgtgtttggggtgggggagctgcttagagactgtgcccgtcctcggccccccaccctgaagtgccagcaccaccagcaccagatcctccgccgccacaccgcactgaggacacgccggccgggccgcctcgtctcaagttgtataaagttgtctccgtgtcccctcctccctctgcccccagtgtttcttctgatttttttttcccctttccctccctccctctccgcattcttcccttggttcagcacaggtaaaacggttcccctccctccctgccttcatggatcaccagctcacgtcatgttgccttctcttttctttgtgtgtgtgtttatttaagttatttttcttcctcctctcccttttctttttggccctccctccctccctcttctgccatgtaactggaggatgtgctatgagtttgcaaacagctggactgtcaggctgctttttttccagatgttcctcctctgcctccccttcccctcctctcccctccttttccttccttccttcctttccttggagcactgagcaccatttggaagcttgagagaaaccaaaattaaagagagaaagagagagcgtgcacgctcctgctttgtcaaaaaaaaaaaaaaaaaaaaaaaaa

SEQ ID NO: 584 - DNA, 1750 bp, Homo sapiens
acatgcagcccaactacagattcttatggaattcctcaaggttgcaagaagaaataagagagagcaactggaacagatccagaaggagctaagtgttttggaagaggatattaagagagtggaagaaatgagtggcttatactctcctgtcagtgaggatagcacagtgcctcaatttgaagctccttctccatcacacagtagtattattgattccacagaatacagccaacctccaggtttcagtggcagttctcagacaaagaaacagccttggtataatagcacgttagcatcaagacgaaaacgacttactgctcattttgaagacttggagcagtgttacttttctacaaggatgtctcgtatctcagatgacagtcgaactgcaagccagttggatgaatttcaggaatgcttgtccaagtttactcgatataattcagtacgacctttagccacattgtcatatgctagtgaatctctataatggttccagtatagtctctagtattggaatttgaccggggattgtgaactattttgcgattgctggagttacaaagaagattaaagtctatgaatatgacactgtcatccaggatgcagtggatattcattaccctgagaatgaaatgacctgcaattcgaaaatcagctgtatcagttggagtagttaccataagaacctgttagctagcagtgattatgaaggcactgttattttatgggatggattcacaggacagaggtcaaaggtctatcaggagcatgagaagaggtgttggagtgttgactttaatttgatggatcctaaactcttggcttcaggttctgatgatgcaaaagtgaagctgtggtctaccaatctagacaactcagtggcaagcattgaggcaaaggctaatgtgtgctgtgttaaattcagcccctcttccagataccatttggctttcggctgtgcagatcactgtgtccactactatgatcttcgtaacactaaacagccaatcatggtattcaaaggacaccgtaaagcagtctcttatgcaaagtttgtgagtggtgaggaaattgtctctgcctcaacagacagtcagctaaaactgtggaatgtagggaaaccatactgcctacgttccttcaagggtcatatcaatgaaaaaaactttgtaggcctggcttccaatggagattatatagcttgtggaagtgaaaataactctctctacctgtactataaaggacttttctaagactttgctaacttttaagtttgatacagtcaaaagtgttctcgacaaagaccgaaaagaagatgatacaaatgaatttgttagtgctgtgtgctggagggcactaccagatggggagtccaatgtgctgattgctgctaacagtcagggtacaattaaggtgctagaattggtatgaagggttaactcaagtcaaattgtacttgatcctgctgaaatacatctgcagctgacaatgagagaagaaacagaaaatgtcatgtgatgtctctccccaaagtcatcatgggttttggatttgttttgaatatttttttctttttttcttttccctcctttatgacctttgggacattgggaatacccagccaactctccaccatcaatgtaactccatggacattgctgctcttggtggtgttatctaatttttgtgatagggaaacaaattcttttgaataaaaataaataacaaaacaataaaaaaaaaaaaa

SEQ ID NO: 585 - DNA, 2372 bp, Homo sapiens
ggcacgagtgaaaaagagctctatgaagcactagtgaaggttatcaataatcccagctaccgtcagagggctcagaagctttcggaaattcacaaggatcaacctggtcaccctgtcaatcgaactatctattggatagattatattattcgtcacaatggagcccatcacctacgtgccgctgtccatcagatctccttttgtcagtattttttactggatattgcctttgtgcttttgcttggtgctgccttgttatactttctcttgtcttgggtgacaaaatttatctacagaaaaatcaaaagtctgtggtctagaaataagcatagcacagttaatggacattaccacaatggaatcctcaatggcaagtacaaaagaaatggccatattaaacatgaaaagaaagtgaaatgagccaacagcccaggtgatagaaataaattggttcactcattgaatttttattgctattatttagtctaacagctactaaaagtaaaacatcagtaaacaattctaacatgcccttatgagatctactaatgaaattctgtggaattaagatggctgtaaaaagcacaaacctaaaatgcagaaatgtattttattcaaatactgatgtagagagttttggcactgaaccttttagaagccttaattatttaaatcaattcagtgactgtgtcagaccttagttttaaatcttgatatgtgcgtgtcccggatcaggaatggtttcatttttcttaataatgtgtgtgtgtgtatgtgtgtgtgtgtgtgtgtgtgtttgtgtgtgtgtgtgtgtgtcctaattaagagaatttttactggctgcttgttacatttgttgagggtacaacacactcaagaataaagtaaaaggatagtcaggatccagatgtttcttttctagcatttaatgtgtgtgaactcagaacactaccatgaaagaacacttccccccaaaactggatgcagaggaagaaaaaaaaaaaagaaatggcacagttttttgtattttttttttttagttattttttgttgttgttgtttgtattgtttttcttttctgatagagtatggccacttctgggggaaaaacatgtaattaagtaaatgtatacattggttttcacgttttacttttgttttcccactaccaataattttcctctggaagaattttatagttttttctatttcattttaatgagtaacaatatgttaaatgcataattaagacaaagcaatgaaattctgactttattcaaagtactgaagattattgcttctagggcatttttaaacagcaccattgtattgttgaatgtttatgtaactgatggcttttctataatgtaatttttgaatgttcaggtgttacatttccaaagtttaacttttaaaaaaccatcttctgatcccttttattgtctgggccatacaatctatattacataggtgccaacatttaattcttttaaatggaacatttgcagttttccatattggtacctgctttttctggagaggtttgagatcttgttaacaaatcagactttacactatatacagatgtgacagataaattgaaccacttgtttgtgaaaatgagttcctgtcatcttcctcattcactcagccctcaccccagcagccttttccggtcattgtagctgacatggagcagtgacagtattcatttgagaacagggatgcaagtcacagacatcataaaatcagggtctccctgctgaagcattcactagttggcaactatgaatttattccatgtcattctgtttacttagcacttgcactacccttgttggttgagtgtatgctttatttgtttctagtttgaaatcccacatctgatagctgagagtaggcaaatacaacatttacctaatgtcattcactaactggaagagttgtgaaaattctagagtgctgtaaatccttggcatacactatgacaaacaacttcattactctcccaccaggagctgctctcctgcacttagaaataatgtcacaagtagttttctaatgtacaatgcagacaaatgtactgctctctgaatacttgaagaaatggtattatacatacatagaaacttattagttataccttttcacaatcttattacgatgttgccgttaaaagggaaaaaagacacaggcaatgaatggtgggatagtaagaggacttagagtgtatgaatgagttgattttacttttttggaatttgattaagttgacagtaggcactgattggatgattaaacataagttaatctccactgtgataaaaacttaaataataaacatgatttaaaataaaaaaaaaaaaaaaaaa

SEQ ID NO: 586 - DNA, 1541 bp, Homo sapiens; identical to SEQ ID NO: 300

SEQ ID NO: 587 - DNA, 2601 bp, Homo sapiens
ggcacgagctggagtcggagttgtaacgctccactgactgatagagcgaccggccgaccatggcgcccggagtggcccgcgggccgacgccgtactggaggttgcgcctcggtggcgccgcgctgctcctgctgctcatcccggtggccgccgcgcaggagcctcccggagctgcttgttctcagaacacaaacaaaacctgtgaagagtgcctgaagaacgtctcctgtctttggtgcaacactaacaaggcttgtctggactacccagttacaagcgtcttgccaccggcttccctttgtaaattgagctctgcacgctggggagtttgttgggtgaactttgaggcgctgatcatcaccatgtcggtagtcgggggaaccctcctcctgggcattgccatctgctgctgctgctgctgcaggaggaagaggagccggaagccggacaggagtgaggagaaggccatgcgtgagcgggaggagaggcggatacggcaggaggaacggagagcagagatgaagacaagacatgatgaaatcagaaaaaaatatggcctgtttaaagaagaaaacccgtatgctagatttgaaaacaactaaagcgctccagcacatcagtcccgacgcttcctgtgaggtgcacactccgcagcccagcccagccgggagaccacgtggccattgcggtctcctgaccttggccagtgaacctgccagccttccaggacaggcggccggagagctgcccctgaaggacagtcctctcgtcttgcagactggtgaccttctattccctgttcatctctgtttctagatttagtcacttgaaataagaaatctttggggtttgggcttttttatactcttctcagtttgtgaaacgctaactgcacacgaagccgcctgacggcacccagcgctgtggctgtcattctcccagggcagaaccctgcgtttctctctgtccactaacaagcttcacacgcaacacagggaagtcggtttgacttttgtcatgaggagaactgaccagccctcatcattccccataaaaccacggacagcgtctgtgtgcgcatcttgagtcttcacacctgttgactcacacggcttttgctgatgacacggggctccagtacacagtctgataaggacttaacgtcctaacctcaattgtattaaatagcattggggaatagctaaacctttttaaaaaaatttattggattttcctccctgcttaaaagatttcaccagaaaaccttcatataaaaattcaggccctttttggacaatttttaaaatttgtatctttactagaacatgagaatctttttcccttggaagcttgaattataaatgtggtgtttggcctgcctcagcagcaccagttgactgctcgtgtgccagcggtgtggggaggacggggcaggacgctgcagctctctccagccctgttggcatcctcagtgcctgcaggcctctcgctgcctgttgggctgtctgggggtggccatttagggatcgtggggacggggtccaccccaagaagaaagaaaggcccgtccacaggcccggctctgggccacgtgccccggaagcaggtgtgtccagagtcagctgagggctctccccacaccacccagcaggcgctggtgctccttctgcctcatgggaccagtccagcttccagccgctctggctcgagggtggtctgagcacttccttctgagtgggcttctctgggagctctccagtggcactgctggacctgcccacgtttctgtaaaatcaggatacgtggctttagtaagcagaccaagcgcttcgtggcagggaaagcagcgtgcggggaagtcactgaaaagtgctgcctaaggaagtttggaaatagtccccgttccagattgccttgaattttaaaacattttgctttgggaaagtaggtcagcagcacctaagatcaaggatgcgttccattttcacacttcacagtcatgaaaactgagaagactgtcttcagcgtgaactaaagttcacaggcagatcactgatccagaacacttcaagaactcgtcaaacagctcgataagcctttttgactgtgtacatctgtaccgggaataacattcctaggctgaaatttccacaaagaatagaacctgtacccagttcttcaggctgatttccctgacctcttgggcatttgtatttgtagtaaagtattgcagagattcctaagtattttatagcagccatcaaaattggactttgtattgtttattcataaaagacacttggtaatagacttcagtgaactctgtatgaatgcagtagtgtgcgtgcaaaatccgcttcctgagcgtagggtgctgagctggcgctagggctcggttgtgaaatacagcgtagtcagcccttgcgctcagtgtagaaacccacgtctgtaaggtcggtcttcgtccatctgcttttttctgaaatacactaagagcagccacaaaactgtaacctcaaggaaaccataaagcttggagtgccttaatttttaaccagtttccaataaaatggtttactacctgaaaaaaaaaaaaaaaaa

SEQ ID NO: 588 - DNA, 1260 bp, Homo sapiens; identical to SEQ ID NO: 48
  misc_feature (1249)..(1249): n equals a,t,g, or c
  misc_feature (1251)..(1251): n equals a,t,g, or c
  misc_feature (1257)..(1257): n equals a,t,g, or c

SEQ ID NO: 589 - DNA, 2529 bp, Homo sapiens
cattgcagactctagtgcagtggttcaatctcggctcactgcaacctccgcctccccgattcaagcgattctcctgcgtcagcctccccagtagctgagactacaggatgcagaaagcctcagtgttgctcttcctggcctgggtctgcttcctcttctacgctggcattgccctcttcaccagtggcttcctgctcacccgtttggagctcaccaaccatagcagctgccaagagcccccaggccctgggtccctgccatgggggagccaagggaaacctggggcctgctggatggcttcccgattttcgcgggttgtgttggtgctgatagatgctctgcgatttgacttcgcccagccccagcattcacacgtgcctagagagcctcctgtctccctacccttcctgggcaaactaagctccttgcagaggatcctggagattcagccccaccatgcccggctctaccgatctcaggttgaccctcctaccaccaccatgcagcgcctcaaggccctcaccactggctcactgcctacctttattgatgctggtagtaacttcgccagccacgccatagtggaagacaatctcattaagcagctcaccagtgcaggaaggcgtgtagtcttcatgggagatgatacctggaaagaccttttccctggtgctttctccaaagctttcttcttcccatccttcaatgtcagagacctagacacagtggacaatggcatcctggaacacctctaccccaccatggacagtggtgaatgggacgtgctgattgctcacttcctgggtgtggaccactgtggccacaagcatggccctcaccaccctgaaatggccaagaaacttagccagatggaccaggtgatccagggacttgtggagcgtctggagaatgacacactgctggtagtggctggggaccatgggatgaccacaaatggagaccatggaggggacagtgagctggaggtctcagctgctctctttctgtatagccccacagcagtcttccccagcaccccaccagaggagccagaggtgattcctcaagttagccttgtgcccacgctggccctgctgctgggcctgcccatcccatttgggaatatcggggaagtgatggctgagctattctcagggggtgaggactcccagccccactcctctgctttagcccaagcctcagctctccatctcaatgctcagcaggtgtcccgatttcttcatacctactcagctgctactcaggaccttcaagctaaggagcttcatcagctgcagaacctcttctccaaggcctctgctgactaccagtggcttctccagagccccaagggggctgaggcgacactgccgactgtgattgctgagctgcagcagttcctgcggggagctcgggccatgtgcatcgagtcttgggctcgtttctctctgagcttccttctcctacatctgcttgctgctgggatacccgtcaccacccctggtccttttactgtgccatggcaggcagtctcggcttgggccctcatggccacacagaccttctactccacaggccaccagcctgtctttccagccatccattggcatgcagccttcgtgggattcccagagggtcatggctcctgtacttggctgcctgctttgctagtgggagccaacacctttgcctcccacctcctctttgcagtaggttgcccactgctcctgctctggcctttcctgtgtgagagtcaagggctgcggaagagacagcagcccccagggaatgaagctgatgccagagtcagacccgaggaggaagaggagccactgatggagatgcggctccgggatgcgcctcagcacttctatgcagcactgctgcagctgggcctcaagtacctctttatccttggtattcagattctggcctgtgccttggcagcctccatccttcgcaggcatctcatggtctggaaagtgtttgcccctaagttcatatttgaggctgtgggcttcattgtgagcagcgtgggacttctcctgggcatagctttggtgatgagagtggatggtgctgtgagctcctggttcaggcagctatttctggcccagcagaggtagcctagtctgtgattactggcacttggctacagagagtgctggagaacagtgtagcctggcctgtacaggtactggatgatctgcaagacaggctcagccatactcttactatcatgcagccaggggccgctgacatctaggacttcattattctataattcaggaccacagtggagtatgatccctaactcctgatttggatgcatctgagggacaaggggggcggtctccgaagtggaataaaataggccgggcgtggtgacttgcacctataatcccagcactttgggaggcagaggtgggaggattgcttggtcccaggagttcaagaccagcctgtggaacataacaagaccccgtctctactatttaaaaaaaagtgtaataaaatgataatataatt

SEQ ID NO: 590 - DNA, 761 bp, Homo sapiens
gctttttggaaatgccgaggagggtatttccgcttctcgcagtggggcagggtggcagacgcctagcttgggtgagtgactatttctttataaaccacaactctgggcccgcaatggcagtccactgccttgctgcagtcacagaatggaaatctgcagaggcctccgcagtcacctaatcactctcctcctcttcctgttccattcagagacgatctgccgaccctctgggagaaaatccagcaagatgcaagccttcagaatctgggatgttaaccagaagaccttctatctgaggaacaaccaactagttgctggatacttgcaaggaccaaatgtcaatttagaagaaaagatagatgtggtacccattgagcctcatgctctgttcttgggaatccatggagggaagatgtgcctgtcctgtgtcaagtctggtgatgagaccagactccagctggaggcagttaacatcactgacctgagcgagaacagaaagcaggacaagcgcttcgccttcatccgctcagacagyggccccaccaccagttttgagtctgccgcctgccccggttggttcctctgcacagcgatggaagctgaccagcccgtcagcctcaccaatatgcctgacgaaggcgtcatggtcaccaaattctacttccaggaggacgagtagtactgcccaggcctgcctgttcccattcttgcatggcaaggactgcagggactgccagtccccctgccccagggctcccggc

SEQ ID NO: 591 - DNA, 564 bp, Homo sapiens
ggtttacattgtgtagggaacaactaaattcatggaagtaaatgatgtatctgttcctaagtcaccctatctgctgagttacttgtgacaaattgtttaaacagtaaaagaatttaatatgaaaagatacacgttaagatgattctaggattaattcattcaggcatgacagcatcaccaaggacccaggttctttctatcttttaatgctgctgctgttcttgatctgttgggttgtcctcatggtccagttcttgtttacacattcaaacccagaattgcatgcaaaaaggctgggagcatgtgtttttacctgggtcttttttcatcagccaagaaaacttttcctaaaagctccctagcaaacttactttcttgtcttcttggccagaattgcattaggaagtgttaccagactacccactggcaaggggaatggaaattgtcacagttggttcagaccagagctttctagcccaagtatttttttctgttatctcttctggaagaagccttttccccttgcctttgagtctctyctgtagttcagtaagttagaatttc

SEQ ID NO: 592 - DNA, 1696 bp, Homo sapiens
ccacgcgtccgctgcaccggagtgagcgcgaccatcatgtccatgctcgtggtctttctcttgctgtggggtgtcacctggggcccagtgacagaagcagccatattttatgagacgcagcccagcctgtgggcagagtccgaatcactgctgaaacccttggccaatgtgacgctgacgtgccaggcccgcctggagactccagacttccagctgttcaagaatggggtggcccagacctgtgcaccttgactcacctgccatcaagcaccagttcctgctgacgggtgacacccagggccgctaccgctgccgctcgggcttgtccacaggatggacccagctgagcaagctcctggagctgacagggccaaagtccttgcctgctccctggctctcgatggcgccagtgtcctggatcacccccggcctgaaaacaacagcagtgtgccgaggtgtgctgcggggtgtgacttttctgctgaggcgggagggcgaccatgagtttctggaggtgcctgaggcccaggaggatgtggaggccacctttccagtccatcagcctggcaactacagctgcagctaccggaccgatggggaagcgccctctctgagcccagcgctactgtgaccattgaggagctcgctgcaccaccaccgcctgtgctgatgcaccatggagagtcctcccaggtcctgcaccctggcaacaaggtgaccctcacctgcgtggctcccctgagtggagtggacttccagctacggcgcggggagaaagagctgctggtacccaggagcagcaccagcccagatcgcatcttctttcacctgaacgcggtggcctgggggatggaggtcactacacctgccgctaccggctgcatgacaaccaaaacggctggtccggggacagcgcgccggtcgagctgattctgagcgatgagacgctgcccgcgccggagttctccccggagccggagtccggcagggccttgcggctgcggtgcctggcgcccctggagggcgcgcgattcgccctggtgcgcgaggacaggggcgggcgccgcgtgcaccgtttccagagccccgctgggaccgaggcgctcttcgagctgcacaacatttccgtggctgactccgccaactacagctgcgtctacgtggacctgaagccgcctttcgggggctccgcgcccagcgagcgcttggagctgcacgtggacggaccccctcccaggcctcagctccgggcgacgtggagtggggcggtcctggcgggccgagatgccgtcctgcgctgcgagggacccatccccgaggtcaccttcgagctgctgcgcgagggcgagacgaaggccgtgaagacggtccgcacccccggggccgcggcgaacctcgagctgatttcgtggggccccagcacgccggcaactacaggtgccgctaccgctcctgggtgccccacaccttcgaatcggagctcagcgaccctgtggagctcctggtggcagaaagctgatgcagccgcgggcccagggtgctgttggtgtcctcagaagtgccggggattctggactggctccctcccctcctgttgcagcacaaggccggggtctctggggggctggagaagcctccctcattcctcccaggaattaataaatgtgaagagagctctgttaaaaaaaaaaaaaaa

SEQ ID NO: 593 - DNA, 2704 bp, Homo sapiens
acgcgtccggtaattgcgctggctaaagaacaaagaattctatagcactgtgagctggagaatgttgtagcaggttaataaggggcttactccattttgtcagtaaccagcattggttccaggaattcaagaggtggtgagatattatgcttaatggtaataagataccacttattggtaatgtaccaggcattggtctctggcatcttaccatctttgtactcatatcttcacaggagcacaagaaaattaaaccatccaccttttacagatttagggatttagtagaaggctgaaggaggccagataactgaacttttacttgtacagctaatattaagtcggtgcaatattaattgcggtttttgcaattacttttaaagtttcagaaccctggatttgaagcagagcgtctgggagtctcttcgttctgttataccagagttgttcttgtatgtgaataaggagcgtatctgaatgccttggcttcagccctggaagccatgcatctgaccaacctttgtgtaaccattttgtagactgtgaggactcttgtcactccttaaattctctcctaaacatattatattttgcttctgaagatgatccaaataccctcaaaactcaggtggagatactgttaaaagatagttttcaaaaagggtaagatcataactcattttaaatataaaatgaacacatgttaaaaattttaactcataagacaagcagttacaaccagttcagggagagtaggacaacaaagagcagacatacatgtagtaatgtcagtaatgtcgaaatgaacacaactggcttttccacagggaaggattatcaagacagttcatttacttatccatggacaagagtgatttgcatttccctcagttctacacaacttagagttgctgaagggcagtgaaaggctagaatcatataacctagaaggatgtgttccaaagcttagagtataaatctaaatattgcagtttcccattggaaacatcccatggtcttttttaaaatttgtttacagaatgtgagagtttataatactattgtctcgtttttttttcttccataacatatttaaaattcttgcttaaaaatgtttttgatggggatagggggttgtgaattaaattcctaacatgtcctaatagttacatgttatgcctaatctgttagtgtacttgggtgatatgacacttattttaagcctgatgcacttagaagcatgttctactttggatatctgttctgaggatggtagctacaaaatgaacttgtgccctttcgcaaattgttggacttgtggtggttgtcttgtgtccctagtatctgatttggaagactcaattaagggtttaaaagcctgcagaaggcgcgggcccgccacgcctaactggttttcatatttttttggtggagacggggtttcgctgtgttggccgggctggtctccagctcctaaccgcgagtgatctgccagcctcggccccccgaggtgccaggattgcagacggagtctcgttcactcagtgctcagtgttgcccaggctggagtgcagtggcgtgatctcggctcgctacaacctccacctcccagccgcctgccttggcctcccaaagtgccgagattgcagcctctgcccggccaccaccccatctgggaagtgaggagcgtctctgcctggccgcccatcgtctgggatgcgaggagcccctctgcccggctgcccagtctgggaagtgaggagcgcctcttcccggccgccatcccatctaggaagtaaggagcgtctctgcccggctgcccattgtctgagatgtggggagcgcctctgcccggccgcgaccccgtctgggatatgaggagcccctccgccggcagccgccccatctgagaagtgaggagcccctccacccagcagccgccccatctgagaagtgaggagcccctccgccggcagccgcccatctgagaagtgaggagcccctccaccccggcagccgccccgtctgagaagtgaaggcgcccctctgcccggcagccaccccgtccgggaggaagttggggttcagcccccgcccagcaagccgacccgtccgggaggtggggggcgcctctgcccggccgccccttctgggaagtgaggagcccctctgcccggccaccaccccgtctgggaggtgtacccaacagctcattgagaacgggccatgatgacgatggcggttttgcagaatagaaaagggggaaaggtggggaaaagatagcgaaatcagattgttgctgtgtctgtgtagaaagaagtagacatcactttgttctgtactaagaaaaattcttctgccttgggatgctgttgatctatgaccttacctccaaccatgtgctctctgaaacatgtgctgtgtccactcagggttaaatggattaagggcggtgcaagatgtgctttgttaaacagatgcttgaaggcagcatgctccttaagagtcatcaccactccctaatctcaagtacccagggacacaaacactgcggaaggccgcagggtcctctgcctaggaaaaccggagacctttgttcacttgtttatgtgctgaccttccctgcactattgtcctatgaccctgccaaatccccttctgcgagaaacacccaagaatgatcaattaaaaaaaaaaaaaaaaa

SEQ ID NO: 594 - DNA, 2546 bp, Homo sapiens; identical to SEQ ID NO: 206
  misc_feature (48)..(48): n equals a,t,g, or c

SEQ ID NO: 595 - DNA, 1022 bp, Homo sapiens
  misc_feature (984)..(984): n equals a,t,g, or c
ggcagagaatcagacgctagggggacagccactgtgttgtctgctaccctcatcctggtcactgcttctgctataacagccctaggccaggaatatgaacaagccgctgctttggatctctgtcctcaccagcctcctggaagcctttgctcacacagacctcagtgggaaggtgtttgtatttcctagagaatctgttactgatcatgtaaacttgatcacaccgctggagaagcctctacagaactttaccttgtgttttcgagcctatagtgatctctctcgtgcctacagcctcttctcctacaatacccaaggcagggataatgagctactagtttataaagaaagagttggagagtatagtctatacattggaagacacaaagttacatccaaagttatcgaaaagttcccggctccagtgcacatctgtgtgagctgggagtcctcatcaggtattgctgaattttggatcaatgggacacctttggtgaaaaagggtctgcgacagggttactttgtggaagctcagcccaagattgtcctggggcaggaacaggattcctatgggggcaagtttgataggagccagtcctttgtgggagagattggggatttgtacatgtgggactctgtgctgcccccagaaaatatcctgtctgcctatcagggtacccctctccctgccaatatcctggactggcaggctctgaactatgaaatcagaggatatgtcatcatcaaacccttggtgtgggtctgaggtcttgactcaacgagagcacttgaaaatgaaatgactgtctaagagatctggtcaaagcaactggatactagatcttacatctgcagctctttcttctttgaatttcctatctgtatgtctgcctaattaaaaaaatatatattgtaaaaaaaaawctggggggccggccttcgtccaaaaacaagcgctcaactgggctgggtgggggtctgggnccttccggaatgggcaatttccatgaagggcccggcaa

SEQ ID NO: 596 - DNA, 1899 bp, Homo sapiens
gcccagctgagcggccgccgagcgggtgcgggtgcgggcgcatcggccatcaccgcgcggccgcgcagcggacaccgtgcgtaccggcctgcggcgcccggccaccggggcggaccgcggaacccgaggccatgtcccatgaaaagagttttttggtgtctggggacaactatcctccccccaaccctggatatccgggggggccccagccacccatgcccccctatgctcagcctccctaccctggggccccttacccacagccccctttccagccctccccctacggtcagccagggtacccccatggccccagcccctacccccaagggggctacccacagggtccctacccccaagggggctacccacagggcccctacccacaagagggctacccacagggcccctacccccaagggggctacccccaggggccatatccccagagccccttcccccccaacccctatggacagccacaggtcttcccaggacaagaccctgactcaccccagcatggaaactaccaggaggagggtcccccatcctactatgacaaccaggacttccctgccaccaactgggatgacaagagcatccgacaggccttcatccgcaaggtgttcctagtgctgaccttgcagctgtcggtgaccctgtccacggtgtctgtgttcacttttgttgcggaggtgaagggctttgtccgggagaatgtctggacctactatgtctcctatgctgtcttcttcatctctctcatcgtcctcagctgttgtggggacttccggcgaaagcacccctggaaccttgttgcactgtcggtcctgaccgccagcctgtcgtacatggtggggatgatcgccagcttctacaacaccgaggcagtcatcatggccgtgggcatcaccacagccgtctgcttcaccgtcgtcatcttctccatgcagacccgctacgacttcacctcatgcatgggcgtgctcctggtgagcatggtggtgctcttcatcttcgccattctctgcatcttcatccggaaccgcatcctggagatcgtgtacgcctcactgggcgctctgctcttcacctgcttcctcgcagtggacacccagctgctgctggggaacaagcagctgtccctgagcccagaagagtatgtgtttgctgcgctgaacctgtacacagacatcatcaacatcttcctgtacatcctcaccatcattggccgcgccaaggagtagccgagctccagctcgctgtgcccgctcaggtggcacggctggcctggaccctgcccctggcacggcagtgccagctgtacttcccctctctcttgtccccaggcacagcctagggaaaaggatgcctctctccaaccctcctgtatgtacactgcagatacttccatttggacccgctgtggccacagcatggcccctttagtcctcccgcccccgccaaggggcaccaaggccacgtttccgtgccacctcctgtctactcattgttgcatgagccctgtctgccagcccaccccagggactgggggcagcaccaggtcccggggagagggattgagccaagaggtgagggtgcacgtcttccctcctgtcccagctccccagcctggcgtagagcacccctcccctcccccccacccccctggagtgctgccctctggggacatgcggagtggggktcttatccctgtgctgagccctgagggcagagaggatggcatgtttcaggggagggggaagccttcctctcaatttgttgtcagtgaaattccaataaatgggatttgctctctgcaaaaaaaaaaaaaaaaaaaaaaaaaaaaaagggggggggcggacgcgtgggtcgacccgggaattccggacctggtat

SEQ ID NO: 597 - DNA, 979 bp, Homo sapiens
gtggcttgtcgcgaatcttcatcttagcacatttccctcaccaggtgctggctggcctaataactggcgctgtcctgggctggctgatgactccccgagtgcctatggagcgggagctaagcttctatgggttgactgcactggccctcatgctaggcaccagcctcatctattggaccctctttacactgggcctggatctttcttggtccatcagcctagccttcaagtggtgtgagcggcctgagtggatacacgtggatagccggccctttgcctccctgagccgtgactcaggggctgccctgggcctgggcattgccttgcactctccctgctatgcccaggtgcgtcgggcacagctgggaaatggccagaagatagcctgccttgtgctggccatggggctgctgggccccctggactggctgggccacccccctcagatcagcctcttctacattttcaatttcctcaagtacaccctctggccatgcctagtcctggccctcgtgccctgggcagtgcacatgttcagtgcccaggaagcaccgcccatccactcttcctgacttcttgtgtgcctccctttcctttccctcccacaaagccaacactctgtgaccaccacactccaggaggcagccccatccccttccagcccctaagtaggccctcccctccctaaatctgcttccgcaccacctggtcttagccccaaagatgggccttctctctcccagataagttggtcctccctctgcctttcctctcaagcccccaaagagcaaaggcaacagcaagaccagcgggttcttgcaacactgtgaggggcagccagggcggccccaataaagcccttgaatactttgaaaaaaaaaaaaaaaaaaaaaaaaaaaaaaaaaaaaaaaaaaaaaaaaaaaaaaaaaaaaaaaaaaaaaaaaaaaaaaaaaaaaaaaaaaaaaaaaaaaaaaaaaaa

SEQ ID NO: 598 - DNA, 2234 bp, Homo sapiens
ccttggctgctttcatctctgaagcgccacttctcagaaacacagagctttagctccgccaaaatgaaacactcattaaacgcacttctcattttcctcatcataacatctgcgtggggtgggagcaaaggcccgctggatcagctagagaaaggaggggaaactgctcagtctgcagatccccagtgggagcagttaaataacaaaaacctgagcatgcctcttctccctgccgacttccacaaggaaaacaccgtcaccaacgactggattccagagggggaggaggacgacgactatctggacctggagaagatattcagtgaagacgacgactacatcgacatcgtcgacagtctgtcagtttccccgacagactctgatgtgagtgctgggaacatcctccagctttttcatggcaagagccggatccagcgtcttaacatcctcaacgccaagttcgctttcaacctctaccgagtgctgaaagaccaggtcaacactttcgataacatcttcatagcacccgttggcatttctactgcgatgggtatgatttccttaggtctgaagggagagacccatgaacaagtgcactcgattttgcattttaaagactttgttaatgccagcagcaagtatgaaatcacgaccattcataatctcttccgtaagctgactcatcgcctcttcaggaggaattttgggtacacactgcggtcagtcaatgacctttatatccagaagcagtttccaatcctgcttgacttcaaaactaaagtaagagagtattactttgctgaggcccagatagctgacttctcagaccctgccttcatatcaaaaaccaacaaccacatcatgaagctcaccaagggcctcataaaagatgctctggagaatatagaccctgctacccagatgatgattctcaactgcatctacttcaaaggatcctgggtgaataaattcccagtggaaatgacacacaaccacaacttccggctgaatgagagagaggtagttaaggtttccatgatgcagaccaaggggaacttcctcgcagcaaatgaccaggagctggactgcgacatcctccagctggaatacgtggggggcatcagcatgctaattgtggtcccacacaagatgtctgggatgaagaccctcgaagcgcaactgacaccccgggtggtggagagatggcaaaaaagcatgacaaacagaactcgagaagtgcttctgccgaaattcaagctggagaagaactacaatctagtggagtccctgaagttgatggggatcaggatgctgtttgacaaaaatggcaacatggcaggcatctcagaccaaaggatcgccatcgacctgttcaagcaccaaggcacgatcacagtgaacgaggaaggcacccaagccaccactgtgaccacggtggggttcatgccgctgtccacccaagtccgcttcactgtcgaccgcccctttcttttcctcatctacgagcaycgcaccagctgcctgctcttcatgggaagagtggccaaccccagcaggtcctagaggtggaggtctaggtgtctgaagtgccttgggggcaccctcattttgtttccattccaacaacgagaacagagatgttctggcatcatttacgtagtttacgctaccaatctgaattcgaggcccatatgagaggagcttagaaacgaccaagaagagaggcttgttggaatcaattctgcacaatagcccatgctgtaagctcatagaagtcactgtaactgtagtgtgtctgctgttacctagagggtctcacctccccactcttcacagcaaacctgagcagcgcgtcctaagcacctcccgctccggtgaccccatccttgcacacctgactctgtcactcaagcctttctccaccaggcccctcatctgaataccaagcacagaaatgagtggtgtgactaattccttacctctcccaaggagggtacacaactagcaccattcttgatgtccagggaagaagccacctcaagacatatgaggggtgccctgggctaatgttagggcttaattttctcaaagcctgacctttcaaatccatgatgaatgccatcagtccctcctgctgttgcctccctgtgacctggaggacagtgtgtgccatgtctcccatactagagataaataaatgtagccacatttactgtgaaaaaaaaaaaaaaaaa

SEQ ID NO: 599 - DNA, 445 bp, Homo sapiens
ccacgcgtccgatgaaatggattttggtatttggaaagggcatttggatgccctaactgctgatgtgaaggagaaaatgtataacgtcttgttgtttgttgatggagggtggatggtggatgttagagaggatgccaaagaagaccatgaaagaacacatcaaatggtcttactgagaaagctttgtctgccaatgttgtgttttctgcttcatacgatattgcacagtactggtcagtatcaggaatgcctacagttagcagatatggtatcctctgagcgccacaaactgtacctggtattttctaaggaagagctcccaccctaaggggcacacactgagttgcttatgccacttccttgttcaaaataaagtaactgccttaatcttaaaaaaaaaaaaaaaaaaaaaaaaaaaaaaaaaaaaaaaaaaaaaaaaaaaaaa

SEQ ID NO: 600 - DNA, 939 bp, Homo sapiens
  misc_feature (909)..(909): n equals a,t,g, or c
  misc_feature (934)..(934): n equals a,t,g, or c
cgcgtgggctgcgagaagacggacagaaggggacgccgaccctccacacctcaccacgcccccatctccgtccgtgtacacacactcacacaaggacgccaaccccacctagatgcaaagcaggattcaaaagaacatctttgcgttttctaccggctccccatcatcgtactagggaggaagaagcgggtgagaaacaaaacttctttccattgtcctgcccgtttctgcggacttgttctgaggccgaggagcctgtgttggaagagatggtgatgggcctgggcgttttgttgttggtcttcgtgctgggtctgggtctgaccccaccgaccctggctcaggataactccaggtacacacacttcctgacccagcactatgatgccaaaccacagggccgggatgacagatactgtgaaagcatcatgaggagacggggcctgacctcaccctgcaaagacatcaacacatttattcatggcaacaagcgcagcatcaaggccatctgtgaaaacaagaatggaaaccctcacagagaaaacctaagaataagcaagtcttctttccaggtcaccacttgcaagctacatggaggttccccctggcctccatgccagtaccgagccacagcggggttcagaaacgttgttgttgcttgtgaaaatggcttacctgtccacttggatcagtcaattttccgtcgtccgtaaccagcgggcccctggtcaagtgctggctctgctgtccttgccttccatttcccctctgcacccagaacagtggtggcaacattcattgccaagggcccaaagaaagagctacctggaccttttgttttctgtttgacaacatgtttaataaataaaaatgtcttgatatcagtaaaaaaaaaaaaaaaaagccccngggggggccggtacccattggcccnaaagg

SEQ ID NO: 601 - DNA, 1056 bp, Homo sapiens
tatgggctagtacgggcctggggtcaaatcggcgaggcgtgcccttggggytccgtgtcctgctgtctttccgtccgctgcctagtctgcatctgagtaacatggcggcggcggcggtagccaggctgtggtggcgcgggatcttgggggcctcggcgctgaccagggggactgggcgaccctccgttctgttgctgccggtgaggcgggagagcgccggggccgacacgcgccccactgtcagaccacggaatgatgtggcccacaagcagctctcagcttttggagagtatgtggctgaaatcttgcccaagtatgtccaacaagttcaggtgtcctgcttcaatgagttagaggtctgtatccatcctgatggcgtcatcccagtgctgactttcctcagggatcacaccaatgcacagttcaaatctctggttgacttgacagcagtggacgtcccaactcggcaaaaccgttttgagattgtctacaacctgttgtctctgcgcttcaactcacggatccgtgtgaagacctacacagatgagctgacgcccattgagtctgctgtctctgtgttcaaggcagccaactggtatgaaagggagatctgggacatgtttggagtcttctttgctaaccaccctgatctaagaaggatcctgacagattatggcttcgagggacatcctttccggaaagactttcctctatctggctatgttgagttacgttatgatgatgaagtgaagcgggtggtggcagagccggtggagttggcccaagagttccgcaaatttgacctgaacagcccctgggaggctttcccagtctatcgccaacccccggagagtctcaagcttgaagccggagacaagaagcctgatgccaagtagctccagggaacgcatgtggatcctagacagcgccttatctatgattgagtgtccgtgtaaataaattcctacttagacttaaaaagggcgttaaataccccggcgatgcgccctttgtaaggcaagaggtaaagacgcggcacggaacggttgaccctgg

SEQ ID NO: 602 - DNA, 1142 bp, Homo sapiens; identical to SEQ ID NO: 262

SEQ ID NO: 603 - DNA, 1539 bp, Homo sapiens
  misc_feature (1501)..(1503): n equals a,t,g, or c
  misc_feature (1505)..(1505): n equals a,t,g, or c
cgcctgcaggtaccggtccggaattcccgggtcgacccactcgtcatggcgaccgagcagaggcctttccacctggtggtgttcggcgcgtctggcttcaccggccagttcgtgaccgaggaggtggcccgggagcaggtggacccggagcggagctcccgcctgccctgggccgtggcgggccgctcccgggagaagctgcagcgggtgctggagaaggcggccctgaagctgggaagaccaacactgtcatctgaagttggaatcatcatctgtgatattgctaatccagcctcgcttgatgaaatggctaaacaggcaacagttgtcctcaattgcgtaggaccatatcggttttatggagaacctgtaataaaagcatgtattgaaaatggagccagttgtatcgacatcagtggagaacctcagtttctggaactaatgcaactgaagtatcatgagaaagctgcagacaaaggggtttatatcattggaagcagcggctttgactccattccagcagatctgggagtaatatataccagaaataaaatgaatggtactttgactgctgtggaaagtttcctgactatacattcaggacctgaggggttgagcattcatgatggtacctggaagtcagcaatttatggttttggagatcagagtaatttgagaaaactaagaaatgtatcaaatctgaaacctgtcccgctcattggtccaaaattgaagagaaggtggccaatttcttattgtcgggaactcaaaggttattccattccttttatgggatctgatgtgtctgttgtaaggaggactcaacgttacttgtatgaaaatttagaggaatcaccagttcagtatgctgcgtatgtaactgtgggaggcatcacctctgttattaagctgatgtttgcaggacttttctttttgttctttgtgaggtttggaattggaaggcaacttctcataaaattcccatggttcttctcctttggctatttttcaaaacaaggcccaacacaaaaacagattgatgctgcctcattcacgctgacattctttggtcaaggatacagccaaggcactggtacagataagaacaaaccaaatatcaaaatttgtactcaggtgaaaggaccagaggctggctatgtggctacccccatagctatggttcaggcagccatgactcttctaagtgatgcttctcatctgcctaaggcgggcggggtcttcacacctggagcagctttttccaaaacaaagttgattgacagactcaacaaacacggtattgagtttagtgttattagcagctctgaagtctaaacactggaagaattaactgaagtcataacgtgcgtgaattaacagcttctctatttgatatttgaaattcttctgtaagcctgtctgagtgtatgtggaaacgattgtcaaatctaaaatatctatatattaaaaagtaggaaattgtcctagcttaccctaaaannncncccccaagagacaaaaccccccccacaaagaacc

SEQ ID NO: 604 - DNA, 939 bp, Homo sapiens; identical to SEQ ID NO: 600
  misc_feature (909)..(909): n equals a,t,g, or c
  misc_feature (934)..(934): n equals a,t,g, or c

SEQ ID NO: 605 - DNA, 2124 bp, Homo sapiens
ggcagagacaaaatgaaggcactcattgcagcactgcttttgatcacattgcagtattcgtgtgccgtgagtcccactgactgcagtgctgttgagccggaggagaaagctctagacctgatcaataaaaggcgacgggatggctaccttttccaattgctgcggattgctgatgcccacttggacagagtggaaaatacaactgtatattacttagtcttagatgtgcaagaatcggactgttcggtcctatccaggaaatactggaatgactgtgagccacctgattccagacgtccatctgaaatagtgatcggacaatgtaaggtaatagctacaagacattcccatgaatctcaggacctcagagtgattgactttaactgcaccacaagttctgtctcttcagcactggccaataccaaagatagtccggtcctcatagatttctttgaggatactgagcgctacagaaaacaagccaacaaagcccttgagaagtacaaagaggagaatgatgactttgcctctttcagagtggaccgaatcgagagagttgcaagagtgagaggaggggaaggaactggttacttcgtggacttctctgtgcggaactgcyccagacaccatttccccagacaccccaatgtctttggattctgcagagcagatttgttctatgatgtagaagccttggacttggaaagcccgaaaaaccttgtcataaactgtgaagtcttcgaccctcaggaacatgagaacatcaatggtgtaccgcctcatttgggacatcccttccactggggtgggcatgagcgttcttctaccaccaagcctccattcaagccccatggatctagagatcatcatcatccccacaagccacacgaacatggaccccataaccaaggtcactgttgccatggccacggcccaccacctgggcacttaagaaggcgaggcccaggtaaaggaccccgtcccttccattgcagacaaattggatctgtgtaccgactccctcctccactattgcccatgtcctgctcaagttgtmaacatgccacttttggcacaaatggggcccaaagacgttctcataataataattccagtgacctccatccccataagcatcattcccatgaacagcatccccacggacaccatccccatgcacaccatcctcatgaacatgatacccatagacagcatccccatggacaccacccccatggacaccatcctcatggacaccacccccatggacaccatccccatggacaccatccccactgccatgatttccaagactatggaccttgtgacccaccaccccataaccaaggtcactgttgccatggccacggcccaccacctgggcacttaagaaggcgaggcccaggtaaaggacccygtcccttccattgcagacaaattggatctgtgtaccgactccctcctctaagaaaaggtgaggtgctgccacttcctgaggccaattttcccagcttcccattgccgcaccacaaacatcctctaaagccagacawtcagccctttcctcaatcagtctctgaatcatgtccagggaagttcaagagtgggtttccacaagtttccatgttttttacacatacatttccaaaataaaatgtgattcctttgaagaggaaaatgaataatacattgaattagaaacataaataaaatgaccagtaattgtgaaaattacagttcttttcaacctactttcatactgaagatgcagcaaaatgtgaatgggaaaagagatggcctgagaagagagatcaaatggaaaggagaggaaagaactcagtgctgcctattagtagttaattctgtcactcaccactacatcacttgagacaaatctatgccactcagaatctccttctttcctggacttaactctaattctagagtctctgttactgcttgggctatacctgggcatactaataaagtatggtattgaaactaaaaaaaaaaaaaaaaaaaaaaaaaaaaaaaaaaaaaaaaaaaaaaaaaaaaaaaaaaaaaaaaaaaaaaaaaaaaaaaaaaggaaaaaataaaaaaaaaaaaaaaaaaaaaaaacttttg

SEQ ID NO: 606 - DNA, 2124 bp, Homo sapiens; identical to SEQ ID NO: 605

SEQ ID NO: 607 - DNA, 1040 bp, Homo sapiens
  misc_feature (5)..(5): n equals a,t,g, or c
gtccngcacactaaagaaatgagagatgcagaattctaaggctaaatagctaggaagtattcattcaaacttgaatattcttcaaagagagtgtgggggcaactctaatcagaggaagaaactaaaggaagtaaaaccagatgttttccaccaaagccctccttttggctggtctgatttctaccgcactggcagggccatgggctaatatatgtgctggcaagtcttccaatgagatccggacgtgtgaccgccatggctgtggacagtactctgctcaaagaagtcagaggcctcaccagggtgtggacgtcttgtgctctgctggatctactgtgtacgcaccattcactggaatgattgtgggccaggagaaaccttatcaaaacaagaatgctatcaataatggtgttcgaatatctggaagaggtttttgtgtcaaaatgttctacattaagccaattaagtataaaggtcctattaagaagggagaaaaacttggaactctattgcccttgcagaaagtttatcctggcatacaatcgcatgtgcacattgaaaactgtgactcgagtgaccctactgcatacctgtaaatcgaaggccaatggtcagatcttcaaaataaaaagtcatcttaaaaacctggatgcatacccttctcttcaagaaatttgtgttcacaaaggaaaaatgcatgaagggatggataccccattttccatgacatgattattacacattgcatgcctgtatcaaaacatctcatgtacctcataaacatatacacctatgtacccacaaaaattttttaattaaaaaaaggaaatttgagtttaaatagaaacatgataaatgcaagaaagaaaacattttgattttaactcattgtcactctgaygttcaygtgaactggttgcttcgggctctttgatctgtcacctatggaatctgagtggttttattttttagatttctcagtcccaaagatctaagataaataaacaagagaacttaaaaaaaaaaaaaaaaaaactcga

SEQ ID NO: 608 - DNA, 1212 bp, Homo sapiens
acgcgtccgggtgcaggagtgccacccccagggccctgtcaacctctcttttctcctccatggctgtctgcctgcgtatctgtctctgagaatcctcggggcggtcaggggatgtcaggaggggaaggagccgccctccctatcttgctgctcctcttggcactcaggggcaccttccatggagccagaccgggtggaggggcttctgggatttggtgtctgctgctgccagagcaggaacccccagtctaggacttgggcattttaacagggagaaagtagtggcttcccttttctctctctcctcctttttccctttaagcccacagattcaggtcatgccaaaagctctctggttgtaacctggagacatgtggaggggaatggcgatgggattataggactctccccatctcgggccctgaccctgacccttgccaccaacccaaagacagctggtgggtttccccttggagacaatcctgcgtttgcctgggccggccctggctgccctcagctttcgctgatctgcccggcctggagcctcccatcaccccgcttcttgttgggcctcaggcactggttaccagaagggggtctgggtctgctcaggatcatgttttgtagcacctcctgttggaggggtggaggatgttcccctgagccaggctgagactagaaccccatcttccctgagccaggctgagactagaaccccatcttccccaccacgccacccctgtggctgctacaggagcacagtagtgaaggcctgagctccaggtttgaaagacccaactggagcgtggggcgggcaggcaggggttagtgaaaggacacttccagggttaggacagagcatttagccttctggaagaacccctgcctggggtgggactgtgcaggccagagaaggtggcatgggcctgaacccacctggactgacttctgcactgaagccacagatggagggtaggctggtgggtgggggtggttcgttctctagccggggcagacacccagctggctgggtccttcctcagccttgcctcctcctgtccccaaccctttcctttcctcctgcttgcggactgctggccccctctccttccctccttccagctgtttctagttaccacctacccctggccgtggactgatcagaccagcattcaaaataaaagtttgttccaagttaaaaaaaaaaaaaaa

SEQ ID NO: 609 - DNA, 3257 bp, Homo sapiens
ccacgcgtccggtgggtgctggccaggacggttccttcagagcaaacagcagggagatgccggcccgctccttcccagctcctccccgtgcccgctaacacagcacggccgcctgcagtctcctctctgggtgattgcgcgggcctaagatgtgtcctggggcactgtgggtggccctgcccctgctgtccctgctggctggctccctacaggggaagccactgcagagctggggacgagggtctgctgggggaaacgcccacagcccactgggggtgcctggaggtgggctgcctgagcacaccttcaacctgaagatgtttctggagaacgtgaaggtggatttcctgcgcagccttaacctgagtggggtcccttcgcaggacaaaaccagggtggagccgccgcagtacatgattgacctgtacaacaggtacacgtccgataagtcgactacgccagcgtccaacattgtgcggagcttcagcatggaagatgccatctccataactgccacagaggacttccccttccagaagcacatcttgctcttcaacatctccattcctaggcatgagcagatcaccagagctgagctccgactctatgtctcctgtcaaaatcacgtggacccctctcatgacctgaaaggaagcgtggtcatttatgatgttctggatggaacagatgcctgggatagtgctacagagaccaagaccttcctggtgtcccaggacattcaggatgagggctgggagaccttggaagtgtccagcgccgtgaagcgctgggtccggtccgactccaccaagagcaaaaataagctggaagtgactgtggagagccacaggaagggctgcgacacgctggacatcagtgtccccccaggttccagaaacctgcccttctttgttgtcttctccaatgaccacagcagtgggaccaaggagaccaggctggagctgagggagatgatcagccatgaacaagagagcgtgctcaagaagctgtccaaggacggctccacagaggcaggtgagagcagtcacgaggaggacacggatggccacgtggctgcggggtcgactttagccaggcggaaaaggagcgccggggctggcagccactgtcaaaagacctccctgcgggtaaacttcgaggacatcggctgggacagctggatcattgcacccaaggagtatgaagcctacgagtgtaagggcggctgcttcttccccttggctgacgatgtgacgccgacgaaacacgctatcgtgcagaccctggtgcatctcaagttccccacaaaggtgggcaaggcctgctgtgtgcccaccaaactgagccccatctccgtcctctacaaggatgacatgggggtgcccaccctcaagtaccattacgagggcatgagcgtggcagagtgtgggtgcaggtagtatctgcctgcggggctggggaggcaggccaaaggggctccacatgagaggtcctgcatgcccctgggcacaacaaggactgattcaatctgcatgccagcctggaggaggaaagggagcctgctctccctccccacaccccacccaaagcatacaccgctgagctcaactgccagggaaggctaaggaaatggggatttgagcacaacaggaaagcctgggagggttgttgggatgcaaggaggtgatgaaaaggagacagggggaaaaataatccatagtcagcagaaaacaacagcagtgaaccagaggagcacaggcgggcaggtcactgcagagactgatggaagttagagaggtggaggaggccagctcgctccaaaacccttggggagtagagggaaggagcaggccgcgtgtcacacccatcattgtatgttatttcccacaacccagttggaggggcatggcttccaatttagagacataaaacacaggcagatcaagtagcattgatcaatggcatgattccaactcagatttgtgggacaccaaagcccaggatcttcccaagtgccctgctgcagtttagcaggtcctctccagctaaagagcagtgagacattgggagcccaggagtgttgaggccaggccaggctgaggcccatcagtcacaggtgtgactgggctgcttgtcacacacagggcgtggtctggccactgttgccagtgctcactcagcggccacatgctttttaatatgacccctgaggcactgaaaaataaccccaggccaactgcaggatagagagagaggtcaggacagcagccctgtgggctgcatgatacactgtggctggagttattgtgaccccctggtgcagtgctcccacggccagtggtgcacacagggccattcactgtccatagactgaaaccatgtgaccatttgagagggccgggcacactttcccctgagggatggggcagcctgtggccagcacctctgcagttactctgcatagccagctcaccagcatgccatgcccagggtgccccccagtgacaacctcatgggagacgggcctggatttgaatttgttggaattaaatgtgctctggctttggtctttgaaacatatctatttttattccttggtgacatgtccttaagtgacaagactccagccttcctgggcgaggcctctccagcctcggaagagctgcagtccttatcggctatcactggctctgcctgcatttgccggctctcttgagtcacgtgcatcccagcaccccgcctgggctcggactgtgggaccagactcagcctccccgaacacaagggaagataaggcttccatttgctctgtgtttcaccctctcctctgtctctccaggccacacatggaacggggcggtatgaggaagagtctgaaagtggtgaagagtgcacctatggccctctgacctccagccagagcagggcctaggggaggcttagagaggccagggcctctccccgtggttgaagctcccatttatttaagaaaaagtggggggtggggaaaacgttatgttaaatgtttacatggaaccaatgaacaactttaacacacaaatacaacgaaacattcttgtttaattactggcgttatagaaaatatgaattcctgctacatgccgggcagtgtagtgttacaatgctattccaagttgggtgttgagcatcttctttcagtcctggtggtgtgcttctgtgcctgcttgaaaatttcactcggaaataaagtcaaatgtctaaaaaaaaaaaaaaaa

SEQ ID NO: 610 - DNA, 943 bp, Homo sapiens
ccacgcgtccgcggggacaactgggtcttttgcggctgcagcgggcttgtaggtgtccggctttgctggcccagcaagcctgataagcatgaagctcttatctttggtggctgtggtcgggtgtttgctggtgcccccagctgaagccaacaagagttctgaagatatccggtgcaaatgcatctgtccaccttatagaaacatcagtgggcacatttacaaccagaatgtatcccagaaggactgcaactgcctgcacgtggtggagcccatgccagtgcctggccatgacgtggaggcctactgcctgctgtgcgagtgcaggtacgaggagcgcacaccaccaccatcaaggtcatcattgtcatctacctgtccgtggtgggtgccctgttgctctacatggccttcctgatgctggtggaccctctgatccgaaagccggatgcatatactgagcaactgcacaatgaggaggagaatgaggatgctcgctctatggcagcagctgctgcatccctcgggggaccccgagcaaacacagtcctggagcgtgtggaaggtgcccagcagcggtggaagctgcaggtgcaggagcagcggaagacagtcttcgatcggcacaagatgctcagctagatgggctggtgtggttgggtcaaggccccaacaccatggtgccagcttccaggctggacaaagcatggggctacttctcccttccctcggttccagtcttccctttaaaagcctgtggcattttcctccttctccctaactttagaaatgttgtacttggctattttgattagggaagagggatgtggtctctgaaaaaaaaaaaaaaaaaaaaaaaaaaaaaaaaaaaaaaaaaaaaaaaaaaaaaaaaaaaaaaaaaaaaaaaaaaaaaaaaaaaaaaaaaaaaaaaaaaaaaaaaaaaaaa

SEQ ID NO: 611 - DNA, 2012 bp, Homo sapiens
tcactaaagggaacttaagctggagctccccgcggtggcggccgctctagaactagtggatcccccgggctgcaggattcggcacgagggcggctggctctcagtcccctcgctgtagtcgcggagctgtgtctgttcccaggagtccttcggcggctgttgtgtcrgkrgcctgatcgcgatggggacaaaggcgcaagtcgagaggaaactgttgtgcctcttcatattggcgatcctgttgtgctccctggcattgggcagtgttacagtgcactcttctgaacctgaagtcagaattcctgagaataatcctgtgaagttgtcctgtgcctactcgggcttttcttctccccgtgtggagtggaagtttgaccaaggagacaccaccagactcgtttgctataataacaagatcacagcttcctatgaggaccgggtgaccttcttgccaactggtatcaccttcaagtccgtgacacgggaagacactgggacatacacttgtatggtctctgaggaaggcggcaacagctatggggaggtcaaggtcaagctcatcgtgcttgtgcctccatccaagcctacagttaacatcccctcctctgccaccattgggaaccgggcagtgctgacatgctcagaacaagatggttccccaccttctgaatacacctggttcaaagatgggatagtgatgcctacgaatcccaaaagcacccgtgccttcagcaactcttcctatgtcctgaatcccacaacaggagagctggtctttgatcccctgtcagcctctgatactggagaatacagctgtgaggcacggaatgggtatgggacacccatgacttcaaatgctgtgcgcatggaagctgtggagcggaatgtgggggtcatcgtggcagccgtccttgtaaccctgattctcctgggaatcttggtttttggcatctggtttgcctatagccgaggccactttgacagaacaaagaaagggacttcgagtaagaaggtgatttacagccagcctagtgcccgaagtgaaggagaattcaaacagacctcgtcattcctggtgtgagcctggtcggctcaccgcctatcatctgcatttgccttactcaggtgctaccggactctggcccctgatgtctgtagtttcacaggatgccttatttgtcttctacaccccacagggccccctacttcttcggatgtgtttttaataatgtcagctatgtgccccatcctccttcatgccctccctccctttcctaccactgctgagtggcctggaacttgtttaaagtgtttattccccatttctttgagggatcaggaaggaatcctgggtatgccattgacttcccttctaagtagacagcaaaaatggcgggggtcgcaggaatctgcactcaactgcccacctggctggcagggatctttgaataggtatcttgagcttggttctgggctctttccttgtgtactgacgaccagggccagctgttctagagcgggaattagaggctagagcggctgaaatggttgtttggtgatgacactggggtccttccatctctggggcccactctcttctgtcttcccatgggaagtgccactgggatccctctgccctgtcctcctgaatacaagctgactgacattgactgtgtctgtggaaaatgggagctcttgttgtggagagcatagtaaattttcagagaacttgaagccaaaaggatttaaaaccgctgctctaaagaaaagaaaactggaggctgggcgcagtggctcacgcctataatcccagaggctgaggcaggcggatcacctgaggtcaggagttcaagatcagcctgaccaacatggagaaaccctactgaagatacaaagttagccaggcatggtggtgcatgcctgtgatcccagctgctcaggagcctggcaacaagagcaaaactccagctcaaaaaaaaaaaaaaaaaaaaaaaactcgaggggggccccgg

SEQ ID NO: 612 - DNA, 1867 bp, Homo sapiens
ggcacgagaatacatacgatccttgtctaccaggagtctaatagaaagatggacagcgtggaccctgccagcagccaggccatggagctctctgatgtcaccctcattgagggtgtgggtaatgaggtgatggtggtggcaggtgtggtggtgctgattctagccttggtcctagcttggctctctacctacgtagcagacagcggtagcaaccagctcctgggcgctattgtgtcagcaggcgacacatccgtcctccacctggggcatgtggaccacctggtggcaggccaaggcaaccccgagccaactgaactcccccatccatcagagggtaatgatgagaaggctgaagaggcgggtgaaggtcggggagactccactggggaggctggagctgggggtggtgttgagcccagccttgagcatctccttgacatccaaggcctgcccaaaagacaagcaggtgcaggcagcagcagtccagaggcccccctgagatctgaggatagcacctgcctccctcccagccctggcctcatcactgtgcggctcaaattcctcaatgataccgaggagctggctgtggctaggccagaggataccgtgggtgccctgaagagcaaatacttccctggacaagaaagccagatgaaactgatctaccagggccgcctgctacaagacccagcccgcacactgcgttctctgaacattaccgacaactgtgtgattcactgccaccgctcacccccagggtcagctgttccaggcccctcagcctccttggccccctcggccactgagccacccagccttggtgtcaatgtgggcagcctcatggtgcctgtctttgtggtgctgttgggtgtggtctggtacttccgaatcaattaccgccaattcttcacagcacctgccactgtctccctggtgggagtcaccgtcttcttcagcttcctagtatttgggatgtatggacgataaggacataggaagaaaatgaaaggcatggtctttctcctttatggcctccccacttttcctggccagagctgggcccaagggccggggagggaggggtggaaaggatgtgatggaaatctcctccataggacacaggaggcaagtatgcggcctccccttctcatccacaggagtacagatgtccctcccgtgcgagcacaactcaggtagaaatgaggatgtcatcttccttcacttttagggtcctctgaaggagttcaaagctgctggccaagctcagtggggagcctgggctctgagattccctcccacctgtggttctgactcttcccagtgtcctgcatgtctgcccccagcacccagggctgcctgcaagggcagctcagcatggccccagcacaactccgtagggagcctggagtatccttccatttctcagccaaatactcatcttttgagactgaaatcacactggcgggaatgaagattgtgccagccttctcttatgggcacctagccgccttcaccttcttcctctaccccttagcaggaatagggtgtcctcccttctttcaaagcactttgcttgcattttattttatttttttaagagtccttcatagagctcagtcaggaaggggatggggcaccaagccaagcccccagcattgggagcggccaggccacagctgctgctcccgtagtcctcaggctgtaagcaagagacagcactggcccttggccagcgtcctaccctgcccaactccaaggactgggtatggattgctgggccctaggctcttgcttctggggctattggagggtcagtgtctgtgactgaataaagttccattttgtggtaaaaaaaaaaaaaaaaaaa

SEQ ID NO: 613 - DNA, 422 bp, Homo sapiens
cggcacgagcatgagcagaagaatcgttttatgctagttattgcattcatggttgaaactcaacttagggaaagggttccaatgtattaagcaatgggctgcttctccccaatcctccctaacaattcgttgtgtggacttctcatctaaaaggttagtggcttttgcttgggatcagtgctctctattgatgttcttgctggtctccagacacattcctgttgcattaagacttgaaagacttgtagatgtgtgatgttcaggcacaggatgctgaaagctatgttactattcttagtttgtaaattgtccttttgataccatcatcttgttttctttttgtaggtataaataaaaacactgttgacaataaaaaaaaaaaaaaaaaaaaaaaaaaaaaaaaaaaaaaaaaaaaaaaaaaa

SEQ ID NO: 614 - DNA, 2242 bp, Homo sapiens
cggcttactttctgctggtgtctcctttcagccgcctctgtctggggttcccttcgtctggccccgcccctcgggctaagcggggcggggccaggcggtcccggaggctgcggcaggccggacagcgggagcaggtggaggactggcggcggtcgagatcgtgctgccatggctcagcctctgggtccagagcctcagctcctacctcttccctccttgccagcccctgatgcctgccagacttttgcctctgctggagcccctgcctgaccagcttcccctccctgtctggttgggatttgggggctgagctgtctggggtcccagggccaaccaatgcagtgccggctcccgcggggcctggctggagccctcctcaccctcctgtgcatggggctcctgtgtctgcggtaccacttgaacctgtccccgcagcgggtacaagggacccccgagctgagccagccgaacccggggccccctaagctacagctacacgatgtcttcattgcagtgaagacgacccgggctttccaccgcttgcgcctggagctgctgcttgacacgtgggtttccaggaccagggaacagacatttgtcttcaccgacagcccagacaaaggcctccaggagagactggggtcccaccttgtggtcaccaactgctccgcggaacacagccacccagctctgtcctgcaagatggctgctgagttcgacaccttcttggccagtgggcttaggtggttctgccatgtggacgatgacaactatgtgaacccaagggcgctgctgcagcttctgagagccttcccgctggcccgcgacgtctatgtgggaaggcccagcctgaaccggcccatccatgcctcagagccacagccccacaaccgcacgaggctggtacagttctggtttgccactgggggtgctggcttctgcatcaatcgcaaactggctttgaagatggctccgtgggccagtggctcccgtttcatggacacatctgctctcatccggctgcctgatgactgcaccatgggctatatcattgagtgcaagctgggcggccgcctgcagcccagccccctctttcactcccacctggagaccctgcagctgctgaggactgcacagctcccagaacaggtcaccctcagctacggtgtctttgaggggaaactcaacgtcattaagctacagggccccttctccccggaggaggacccctccagatttcgctccctccattgtctgctctatccagatacaccctggtgtccccagctgggtgcccgatgaatcctgaactgctgggcaaaggttgggcagagacttctgggtgtgccttggctcccaaggtggcactgtgggtccctggcaagtgtcttgtgataggcagtccctggcagggccttcgggtggttggcaagcccaggatctgagtggcaattggcactgaaggcaccccaggcccctgggaggtgagttagacagcccaggggaccaggtggaccaggtggtggccagagaggctccaggggctagactccctcaggaggctgaattgaaaaagggcagggggcacttgagctgggctggggctcaggggtcctaaccctttaggcagtgacatggcctctgggtggggtctggccgttggccctggctaatgtctctcagtcattcccctggggctcaagcgctgggccgcccactcctgcctccctcatctgtgtcccgagttcctgaagggacatgggtggaatgatggcagaatccagggtctgcagcacctgctgttgttgccaaccagtctcccaaagctccttgctccccaccccttgcgaacaggaccagattttgtttggagcctcagcatgccggggcccagatgatggagcataacgggtcccagccaattgtgatgatcctttttgctcatttcccagcctttcttgctgttaggggctaccatgggaccagctctggccagagggaactaagcaaatccaatagagatgtttctggggaaggttttgcagcccactccccatcttcctgctataaatgtgggtgtgatggctggatctggggcagccaccttgctaccatgaaggaaaggccaagacaatcatccacagctattccctccagcatctggttctgtacaaaaattaaatgcttatttgtttaarwmaaaaaaaaaaaaaaaaraaaaaaaaaaaaaagggcggccgat

SEQ ID NO: 615 - DNA, 994 bp, Homo sapiens
gaattcggcacgagaagaaaatctccttcccctgggcttccatttagcctgtaaaataagggtaaaatactcttgtccctgtccacagtgaaggtagtgatggcagtccttctcaggttagtttaccacttctgggcatcagctacatgcccagatgtgggccatgtgcgggcagaacctgttttgcataagtgacattcattctgccagcacagaatgaatacttctgccacctgccacttgcaccttctattcaacattggttttgagatttattcatatggatacgtgcaggttttatgcattaaatgctctacaatatctcttttgtgaatagccgcaatttacccaagctcttgtttattaacattgagggagtttccaattttttcatatcagaaactctgctgctactctaagtattctcacacacacctccctatttacatgttccacaatttctcagcaagatgtatctgcacaggagtgctgggtcatargctatgtttascttcatctttaatagtcatggtcaaattgttttccaaagtgatcgtattaatttatattctaacagtagtatttgagagttccttgctccatttcttgccagcgtttggtattgtcagactataaaatgttttccattccaatggacgggaaatagcacccgttgcggttgtaatgtgcacgtccccagttactaatgcggttgtgcagttcacatgttaattcaccatttgtgattcctcttctatgagcacttattcatatactttggatattttactattgttttcctttttctttttttattttttaatattctggatacaagttctatgttcattgtgtatactgcaaaatcttctcccagtttcccatgtatctttttattatgtttgtactgtactttgctgaacagcaatttaggtttcattttagtcaaatatatcatgtctctgatttaaaaaaaaaaaaaaaaaaaactcga

SEQ ID NO: 616 - DNA, 1038 bp, Homo sapiens
ggcacgagagagcctccactgagctgctgcctgcccgccacatacccagctgacatgggcaccgcaggagccatgcagctgtgctgggtgatcctgggcttcctcctgttccgaggccacaactcccagcccacaatgacccagacctctagctctcagggaggccttggcggtctaagtctgaccacagagccagtttcttccaacccaggatacatcccttcctcagaggctaacaggccaagccatctgtccagcactggtaccccaggcgcaggtgtccccagcagtggaagagacggaggcacaagcagagacacatttcaaactgttccccccaattcaaccaccatgagcctgagcatgagggaagatgcgaccatcctgcccagccccacgtcagagactgtgctcactgtggctgcatttggtgttatcagcttcattgtcatcctggtggttgtggtgatcatcctagttggtgtggtcagcctgaggttcaagtgtcggaagagcaggagtctgaagatccccagaaacctgggagttcagggctgtctgaaagctgctccacagccaatggagagaagacagcatcacccttatctcccatgaagaacatcaacatgaataatggcaaacaaagtctctcagcagagaaggttctttaaaagcaactttgggtccccatgagtccaaggatgatgcagctgccctgtgactacaaggaggaagagatggaattagtagaggcaatgaaccacatgtaaattattttattgtttcatgtctgcttctagatctaaaggacactagcattgccccagatctgggagcaagctaccaacaggggagactctttcctgtatggacagctgctgtggaaatactgcctgcttctcccacctcctcagagccacaggaaagaggaggtgacagagagagagcaaggaaagtgatgaggtggattgatactttctactttgcattaaaattattttctagcctgcaaaaaaaaaaaaaaaaaaaaaaaaaaaa

SEQ ID NO: 617 - DNA, 1428 bp, Homo sapiens
acctcaaaaaaaaaaaaaaaaaaaaaaaaaacagaaagaaagaaaaagaaaactgcagataaccctatacattaatactggtatctcgaggtgactcttctgaccaagggtggttaagtgacacatagaacttttctaagagaagacagacaagttgacaggcatgccttgtactcagctgtgttcatgtggtggtctgtggaaagaaaagaagactcatttggaaatgaagctgtccctttccaagcagtctctggtgcttttcttctctcaaaatggatccgataaatatttgaatagagcagattgtagaatgtcgtgctgtcaccagaaagctgctgttttgggttctgcattgagccaaatatgtagaggacctaccaagcccactgagggactaggttttcatgtctctagtcatacctagaatgttctgagccgtctgagggccttcatgccggcagcagctagcaaagccagaaagcaagtctaacaggatctaagatgaccatcaggagaaggagtttgagactgtgtatgcaacccccaatagacccccttttactctgatctggagaatgtatctggcttcatattttcaagtcacatgtctctcagacccctggattcagaacccaaggccacaaatcataggcatgaagcactttcttaagactgacctaacgctggattatttcccgtccaatgcctgcatgctgcttgaattgctccacccacacctccatgaccaagggcgccagagtgctgcaactggggcgtgggccgctctctgcttttcctgtctgactctgacaagtcctccctcactgaatgtagaatcgttgccaagtttctgagaagtgtcgattccctgttaacatggatatcagttctgcctcacatttcccacttgaggttgaggcgtactggagacaacacctcagaccatctgaaccccatcagtggacgaaaatggggctgttaatatactctaaaagccatactaaaaatgctctgagggaactggctaagaatagtgggcctggtgattgtctatcacgcaaggctttgttttgtactgttcagaaatctgtcacctttctgcctgcccttgtttcctgaatgaaatgcttctggggttatttatgaaaggagtgatcctggggcaggcaggaggcagtgggcttcatggctccttgaagttattactgatcttgaccttctctttggctacctttagacaaagaatacgccaatcaatacttggggctctaagttttacaattgatatttatttgtatcatctctttgtctaggaatgtaaaagtgattctaaactaagatgtgtaataaaaatcaatcagatttattgtacctacaaaaaaaaaaaaaaaaaaaaaaaaaaaaaaaaaaaaaaaaaaactcgag

SEQ ID NO: 618 - DNA, 915 bp, Homo sapiens
  misc_feature (811)..(812): n equals a,t,g, or c
  misc_feature (860)..(860): n equals a,t,g, or c
cgctccctctgccccctcggggtcgcgcgcccacgatgctgcagggccctggctcgctgctgctgctcttcctcgcctcgcactgctgcctgggctcggcgcgcgggctcttcctctttggccagcccgacttctcctacaagcgcagcaattgcaagcccatcccggtcaacctgcagctgtgccacggcatcgaataccagaacatgcggctgcccaacctgctgggccacgaramcacctcctgccagccaccgaggaagctccaaaggtatgtraagcctgcaaaaataaaaatgatgatgacaacgacataatggaaacgctttgtaaaaatgattttgcactgaaaataaaagtgaaggagataacctacatcaaccgagataccaaaatcatcctggagaccaagagcaagaccatttacaagctgaacggtgtgtccgaaagggacctgaagaaatcggtgctgtggctcaaagacagcttgcagtgcacctgtgaggagatgaacgacatcaacgsgccctatctggtcatgggacagaaacagggtggggrgctggtgatcacctcggtgaagcggtggcagaaggggcagagagagttcaagcgcatctcccgcagcatccgcaagctgcagtgctatcccggcatcctgatggctccgrcgcytggatcccgctggtcatgaagcagtgccacccggacaccaagaagctccagagcacggctgaccatttctgctccgggatctcagctcccgttccccaagcacactcctagctgctccagtctcagcctgggcagnntccccctgccttttgcacgtttgcatccccagcatttcctgagttatnaaggccacaggagtgggatagctgttttcacctaaaggaaaagcccacccggaat

SEQ ID NO: 619 - DNA, 1342 bp, Homo sapiens
ggcacgagggactgtgtctccttttctctgcctgtggtgcttcatgcctattgacactcagtgaatgcttgaatgattgggctccatggataccaaaatagcagactctgggtaattttcttcttgctgctactcttctctggttcgtctgacatcacaaacaaaaggagccaagagtatctttctctttttgatatttatgtgcttcggggagttactttatcttcctgtgaaatactcattagataatagctgtccactccaatgtaagcagtgttataaactgggaaactgtttataaattgttttttgtaagctgcttaacgagctattttaagtagtaaagactgtttaacttgatggattttctaatattgctaacttatttcttaattcagccctcagcaggagagcacctatcagcaatccaggaatgagtgaagcagggaactttggtggggaatagcttccatgccagcaaatggcctcactgtgggcccaaaaccaggtgttgaatttgattaaggcttgtccaagacctgaagggttgaactttcaggatctcaagaaccagctgaaacacatgtctgtatcctcaatcaagcaagctgtggattttctgagcaatgaggggcacatctattctactgtggatgatgaccattttaaatccacagatgcagaataactggatctaactgggtacctgagatattttacagctggacctagtttcacaatctgttgtctccagctctgcatatgtctggccagggggcttctaggaagtaggtttcatctatcaaatgtctcctctgacttccttttgaaacttactgctcttctgttttattttgttttgtttgaagctcagagggagatgggcaattgacagggatgcaatccagggtgggatttcttgaggaagttacaaataagcttgttacaacatcaagatagatggaattggaaggatgctaccaggagagtacttacatagtgctcaggagtttctcttcttaaaatgtttactgctgaaagatgagcaggaccagggcgttataggcagagccctagccgagaaacctgctggcctctgcctgttttcatttcccactttggttgtgtggcattactttcagaattgcactttcctgcttgtcatgactttttgacacacttgccatgacgtgtgtttctgtgaacatgaagttctgcggtagtgcctccaggggcagaggaaaagaagaagtgttactgcattttgtacaaaataaatacagtcatatgtttaataaaacagttctattgtagtaaaaaaaaaaaaaaaaaaaaaaaaaaa

SEQ ID NO: 620 - DNA, 1818 bp, Homo sapiens
ctagaggatccccgctaagaagctagggctattggtcttcccatacacacatcagaactgaggcaccatgcaagggggccagagacctcatctcctcttgctgctgttggctgtctgcctgggggcccagagccgcaaccaagaggagcgtctgcttgcggacctgatgcgaaactacgacccccacctgcggccggctgagcgcgactcagatgtggtcaatgtcagcctgaagcttaccttgaccaacctcatctccctgaatgaacgagaggaggccctcacaactaacgtctggatagagatgcaatggtgcgactatcgcctgcgctgggacccaaaagactacgaaggcctgtggatattgagggtgccatctactatggtctggcggccagatatcgtcctggagaacaatgtggacggtgtcttcgaggtggctctctactgcaatgtcctcgtgtcccccgacggttgtatctactggctgccgcctgccatcttccgctcctcctgctccatctctgtcacctacttccccttcgattggcagaactgttccctcatcttccaatcccagacttacagcaccagtgagatcaacttgcagctgagccaggaggatgggcaagccattgagtggatcttcattgacccggaggctttcacagagaatggggagtgggccatccggcaccgaccggctaaaatgctcctggactccgtggctcctgcagagaaggcgggccaccagaaggtggtgttctacctgcttatccagcgcaagcccctcttctacgtcatcaacatcatcgccccctgtgtgctcatctcctcagtcgccatcctcatctacttccttcctgctaaggcgggcggccagaaatgcacagtggccaccaacgtgctcctggcccagactgtcttccttttccttgtggctaagaaggtgcctgagacctcccaggcagtgccactcatcagcaagtacctgaccttcctcatggtggtgaccatcctcatcgtcgtgaactctgtggtcgtgctcaatgtgtccttgcggtccccccacacacactccatggcccgtggggtccgcaaggtgttcctgaggctcctgccccagctgttacggatgcatgtgcgcccactagctccagctgctgtccaggatgcccggttccgactccagaatggctcttcctcagggtggcccatcatggctcgagaggaaggggacctctgtctgcctcgaagcgaactcctctttaggcaaaggcagcgcaatggattagtgcaggcagtattggagaagctagagaatggtccagaagtgaggcagagccaggagttctgtggcagcctgaagcaagcctccccagccatccaggcctgtgtggatgcctgtaacctcatggctcgtgcccgacgccagcagagtcactttgacagtgggaacgaggagtggttgctggtgggccgagtgctggaccgagtctgcttcctagccatgctctccctcttcatctgtggcactgctggcatcttcctcatggcccactacaaccaagtgcctgacctgccgttccccggagacccccgcccctacctgcctttgccagactgagccaaccaatccctcctgggccctggagtcagctatgagggccatgctgtttgtagagctgtatcccgtgttgatgctgagtgtgctcttggggaaatacccaaggcttcctgggagaagatagagaaataaagagacagaggggaaaaaaaaaaaaaaaaaaaaaaaaaaaaaaaaaaaaaaaaaaaaaa

SEQ ID NO: 621 - DNA, 620 bp, Homo sapiens
  misc_feature (433)..(433): n equals a,t,g, or c
  misc_feature (475)..(475): n equals a,t,g, or c
  misc_feature (481)..(481): n equals a,t,g, or c
  misc_feature (489)..(489): n equals a,t,g, or c
aattccgggtcgaccacgcgtccggacccacgcgtccgcccacgcgtccgggtttcttggagcttccacaaacttaaaaccatgaaacatctattattgctactattgtgtgtttttctagttaagtcccaaggtgtcaacgacaatgaggagggtttcttcagtgcccgtggtcatcgaccccttgacaagaagagagaagaggctcccagcctgaggcctgccccaccgcccatcagtggaggtggctatcgggctcgtccagccaaagcagctgccactcaaaagaaagtagaaagaaaagcccctgatgctggaggctttgctacaacaggaaaggccaatcagaaatagtgttgatgagttaaataacaatgtggaagctgtttcccagacctcctcttcttcctttcagtacatgtatttgctgaangacctgtggcaaaagaggcagaagcaagtaaaagataatganaatgtngtcaatgngtactcctcagaactggaaaagcaccaattatatatagatgagactgtgaatagcaatatcccaactaaccttcgtgtgcttcgttcatcctggaaaacctgagaagcaaaatacaaaagttagatctgat

SEQ ID NO: 622 - DNA, 1470 bp, Homo sapiens
  misc_feature (1407)..(1407): n equals a,t,g, or c
ctttgatgtcagtgtcaagggcatcagcatttcggtcaacctcctgttgggcagcgagtcctccgggaggcccacagttactgcctccagctgcagcagtgacatcgctgacgtggaggtggacatgtcgggagacttggggtggctgttgaacctcttccacaaccagattgagtccaagttccagaaagtactggagagcaggatttgcgaaatgatccagaaatcggtgtcctccgatctacagccttatctccaaactctgccagttacaacagagattgacagtttcgccgacattgattatagcttagtggaagcccctcgggcaacagcccagatgctggaggtgatgtttaagggtgaaatctttcatcgtaaccaccgttctccagttaccctccttgctgcagtcatgagccttcctgaggaacacaacaaaatggtctactttgccatctcggattatgtcttcaacacggccagcctggtttatcatgaggaaggatatctgaacttctccatcacagatgacatgataccgcctgactctaatatccgactgaccaccaagtccttccgacccttcgtcccacggttagccaggctctaccccaacatgaacctggaactccagggatcagtgccctctgctccgctcctgaacttcagccctgggaatctgtctgtggacccctatatggagatagatgcctttgtgctcctgcccagctccagcaaggagcctgtcttccggctcagtgtggccactaatgtgtccgccaccttgaccttcaataccagcaagatcactgggttcctgaagccaggaaaggtaaaagtggaactgaaagaatccaaagttggactattcaatgcagagctgttggaagcgctcctcaactattacatccttaacaccttctaccccaagttcaatgataagttggccgaaggcttcccccttcctctgctgaagcgtgttcagctctacgaccttgggctgcagatccataaggacttcctgttcttgggtgccaatgtccaatacatgagagtttgaggacaagaaagatgaagcttggaggtcacagctggatctgcttgttgcatttccagctgtgcagcacgtctcagagattcttgaagaatgaagacatttctgctctcagctccgggggtgaggtgtgcctggcctctgcctccaccctcctcctcttcaccaggtgcatgcatgccctctctgagtctggactttgcttcccctccaggagggaccaccctccccgactggcctgggatatctttacaagcaggcactgtatttttttattcgccatctgatccccatgcctagcagagtgctggcacttagtaggtcctcaataaatatttattaaatgatgnaaaaaaaaaaaaaaaaaaagggcggccgctctagaggatcccctcgagggtcccaagctgtac

SEQ ID NO: 623 - DNA, 574 bp, Homo sapiens
  misc_feature (2)..(2): n equals a,t,g, or c
  misc_feature (10)..(10): n equals a,t,g, or c
tntcaaaaantattttaggtgacactatagaaggtacgcctgcaggtaccggtccggaattcccgggtcgacccacgcgtcctgcgggcaggacaggacctcccaaccaagccctccagcaaggattcagagtgcccctccggcctcgccatgaggctcttcctgtcgctcccggtcctggtggtggttctgtcgatcgtcttggaaggcccagccccagcccaggggaccccagacgtctccagtgccttggataagctgaaggagtttggaaacacactggaggacaaggctcgggaactcatcagccgcatcaaacagagtgaactttctgccaagatgcgggagtggttttcagagacatttcagaaagtgaaggagaaactcaagattgactcatgaggacctgaagggtgacatcccaggaggggcctctgaaatttcccacaccccagcgcctgtgctgaggactccctccatgtggccccaggtgccaccaataaaaatcctacagaaaaaaaaaaaaaaaaaaaaaaaaaaaactcgagggggggccggtacccaattcgcccta

SEQ ID NO: 624 - DNA, 392 bp, Homo sapiens
ccacgcgtccggtagggttttggcctaggtaacggggcagagatgtggttcgagattctccccggactctccgtcatgggcgtgtgcttgttgattccaggactggctactgcgtacatccacaggttcactaacgggggcaaggaaaaaagggttgctcattttgggtatcactggagtctgatggaaagagataggcgcatctctggagttgatcgttactatgtgtcaaagggtttggagaacattgattaaggaagcattttcctgattgatgaaaaaaataactcagttatggccatctacccctgctagaaggttacagtgtattatgtagcatgcaatgtgttatgtagtgcttaataaaaataaaatgaaaaaaaaaaaaaaaa

SEQ ID NO: 625 - DNA, 736 bp, Homo sapiens
atgatggtattgagcttggggatcattttggcatctgcttccttctctccaaattttacccaagtgacttctacactgttgaactctgcttacccattcataggaccctttttttttatcatctctggctctctatcaatcgccacagagaaaaggttaaccaagcttttggtgcatagcagcctggttggaagcattctgagtgctctgtctgccctggtgggtttcattatcctgtctgtcaaacaggccaccttaaatcctgcctcactgcagtgtgagttggacaaaaataatataccaacaagaagttatgtttcttacttttatcatgattcactttataccacggactgctatacagccaaagccagtctggctggaactctctctctgatgctgatttgcactctgctggaattctgcctagctgtgctcactgctgtgctgcggtggaaacaggcttactctgacttccctgggagtgtacttttcctgcctcacagttacattggtaattctggcatgtcctcaaaaatgactcatgactgtggatatgaagaactattgacttcttaagaaaaaagggagaaatattaatcagaaagttgattcttatgataatatggaaaagttaaccattatagaaaagcaaagcttgagtttcctaaatgtaagcttttaaagtaatgaacattaaaaaaaaccattatttcactgtcaaaaaaaaaaaaaa

SEQ ID NO: 626 - DNA, 645 bp, Homo sapiens
  misc_feature (461)..(461): n equals a,t,g, or c
  misc_feature (567)..(567): n equals a,t,g, or c
  misc_feature (606)..(606): n equals a,t,g, or c
  misc_feature (628)..(628): n equals a,t,g, or c
ctggaaaccttccccggaatttycgggtcgacccacgcgtccgctcagagaaagcattttaacttttatagtaaacaataaaaaagcctcataaagcttctcacaacaacttcattcgtttcagaagttaagatatattccttatgaataccaacattgtgacatttgtgttgccaattattttctctggaatcattcttttaacttcacttcctgttgtttgggaagactttgcagagaacatatttttaataggctataatcacacgggcaacagagatcttggcaagtagctattaacggtatagacagaaacttggagtgtgatggttttagacttcctgtgcttcatgatgctattttaatgcactaagagtataaactaaatttagatcctgctgactgktgctggagtgagtgcatgtctcttttgcagacaatgctagatttartttctgggnatttttgcaagctgggagtgcagtttgaagctccagccttctaagcatttttatagctatacatatggatttcatgactgctttgawttgcaactgggcacttaangtttggtgggtcttaaagcgggtactggcacttgggggnggttcgcggggggggtcattgnattttaattttaataaa

SEQ ID NO: 627 - DNA, 2491 bp, Homo sapiens
ccacgcgtccgggcccacggagcccaccatgccgcgcccggcccccgcgcgccgcctcccgggactcctcctgctgctctggccgctgctgctgctgccctccgccgcccccgaccccgtggcccgcccgggcttccggaggctggagacccgaggtcccgggggcagccctggacgccgcccctctcctgcggctcccgacggcgcgcccgcttccgggaccagcgagcctggccgcgcccgcggtgcaggtgtttgcaagagcagacccttggacctggtgtttatcattgatagttctcgtagcgtacggccctggaattcaccaaagtgaaaacttttgtctcccggataatcgacactctggacattgggccagccgacacgcgggtggcagtggtgaactatgctagcactgtgaagatcgagttccaacttcaggcctacacagataagcagtccctgaagcaggccgtgggtcgaatacacccttgtcaacaggcaccatgtcagcctagcatccagacagcaatggacgaagcttcacagggaggcaggggctcgagagcctctttaacatcctaagggggcatcatgtacagatgggaggccccaggaccaggtgaatgaggtggcggctcgggcccaagcatctggtattgagctctatgctgtgggcgtggaccgggcagacatggcgtgcctcaagatgatggccagtgagcccctagaggagcatgttttctacgtggagacctatggggtcattgagaaactttcctctagattccaggaaaccttctgtgcgctggacccctgtgtgcttggaacacaccagtgccagcacgtctgcatcagtgatggggaaggcaagcaccactgtgagtgtagccaaggatacaccttgaatgccgacaagaaaacgtgttcagctcttgataggtgtgctcttaacacccacggatgtgagcacatctgtgtgaatgacagaagtggctcttatcattgtgagtgctatgaaggttataccttgaatgaagacaggaaaacttgttcagctcaagataaatgtgctttgggtacccatgggtgtcagcacatttgtgtgaatgacagaacagggtcccatcattgtgaatgctatgagggctacactctgaatgcagataaaaaaacatgttcagtccgtgacaagtgtgccctaggctctcatggttgccagcacatttgtgtgagtgatggggccgcatcctaccactgtgattgctatcctggctacaccttaatgaggacaagaaacatgttcagccactgaggaagcacgaagacttgtttccactgaagatgcttgtggatgtgaagctacactggcattccaggacaaggtcagctcgtatcttcaaagactgaacacctaaacttgatgacattttggagaagttgaaaataaatgaatatggacaaatacatcgttaaattgctccaatttctcacctgaaaatgtggacagcttggtgtacttaatactcatgcattcttttgcacacctgttattgccaatgttcctgctaataatttgccattatctgtattaatgcttgaatattactggataaattgtatgaagatcttctgcagaatcagcatgattcttccaaggaaatacatatgcagatacttattaagagcaaactttagtgtctctaagttatgactgtgaaatgattggtaggaaatagaatgaaaagtttagtgtttctttatctactaattgagccatttaatttttaaatgtttatattagataaccatattcacaatggaaactttaggtctagtttcttttgatagtatttataatataaatcaatcttattactgagagtgcaaattgtacaaggtatttacacatacaacttcatataactgagatgaatgtaattttgaactgtttaacactttttgttttttgcttattttgttggagtattattgaagatgtgatcaatagattgtaatacacatatctaaaaatagttaacacagatcaagtgaacattacattgccatttttaattcattctggtctttgaaagaaatgtactactaaagagcactagttgtgaatttagggtgttaaactttttaccaagtacaaaaatcccaaattcactttattattttgcttcaggatccaagtgacaaagttatatatttataaaattgctataaatcgacaaaatctaatgttgtctttttaatgttagtgatccacctgcctcagcctcccaaagtgctgggattacaggcttgaaagtctaacttttttttacttatatatttgatacatataattcttttggctttgaaacttgcaactttgagaacaaaacagtcctttaaattttgcactgctcaattctgtttttcgtttgcattgtctttaatataataaaagttattacctttacatattaaaaaaaaaaaaaaa

SEQ ID NO: 628 - DNA, 547 bp, Homo sapiens
  misc_feature (25)..(25): n equals a,t,g, or c
taattcccttcggggactttaaggnaacctcccggaatwyycgggtcgacccacgcgtccgcccacgcgtccggcggcggcgcttcaagatgcgctgcctgaccacgcctatgctgctgcgggccctggcccaggctgcacgtgcaggacctcctggtggccggagcctccacagcagtgcagtggcagccacctacaagtatgtgaacatgcaggatcccgagatggacatgaagtcagtgactgaccgggcagcccgcaccctgctgtggactgagctcttccgaggcctgggcatgaccctgagctacctgttccgggaaccggccaccatcaactacccgttcgagaagggcccgctgagccctcgcttccgtggggagcatgcgctgcgccggtacccatccggggaggagcgttgcattgcctgcaagctctgcgaggccatctkgccccgccaggccatcaccatcgargctgaaccaagactgatggcagccggcggacacccgctatgacatcgacatgacaagtgcatctaacttgg

SEQ ID NO: 629 - DNA, 2716 bp, Homo sapiens
actaccccttaattyscgtcgacccacgcgtccgtttgtattcgtcaaccctgtggcttgttagcatcagaacctctctgaagaccaaacttccctgtgtggccagcagaggaagccttgaggatagatctcgggtgacgtgggattttctaagcctgagaggtgtccttctgcacacccttgtaacaattaaaattgcttttcttccatgtttctcttggcagagagaaatgccatcatgcttactgctcttttggattcttcatgcagtggcttcccatttgctctgggaacagtgcctctgtgctggttatatgtatgcaccacatgtgcacacacgggtgtcggtgcaactcaccagcaggtgtgcagtaggcaagcttgaaggtggcccatgcttctctgttgtcacacaacacctttccctgtttctcttcagttgtcctctgatattttcacagcctgttagtggcggctgatctgtagaggtatgaaaatacagccccaaagggggaatttgtcatggggaagggccagccactgactacttgatcttggagaccacatttagatggaaatgagaggacctccacagccccgcctccctgccaggatgctagattattggctgggaggtgggcaagtggcagcccagctgaagcaagaggctgattgactggctgctcactcaggcaggtggcctgccctggcatcctgtagattctgagcaggttgagatgtggatatctccatgggaagcttgaaccaggctagaacagctgtctgccaaagatacaagaatatgcaaagtccctcttacccccctccttccctcaagtcttagttggtttgagagccagggatatggatccagggtgctgttgcagggtcacctgcctgttaccacacccccatccagctgggtggtgggtgagggtgtgagacaggcagggagaccaggtaatgagtggctgcaaggagtcatatagcctgggtgtgggtgagggtctgcctgcctgtttctgtctgggtgtctgagttccaaaaaatgtgtgttgtttgttcctcctcatcctcttctgagactgttgtttttttagagcttgattgtgggagaaaagcttgtgtgaaattccctcttcacctccccaccccccaaaaaataaaagggggcataaactttattccactggagaagccctgggggtggctggagccagcctgctgagaagcgtggtgcagctgggtctgggacttcactagagcttactctggagcacctattttctgtgcacatgggagtgctccactccctagcagagcagagggaagtctctgccaggtacccacgccacaggcctcaggatggctttttgtctgagggcctcattaggcccagactgctgctgctggtaccagtctcctgagacactgcctccctggagcccatgcatgcccagctgttcttactgcttagtagccttgaagcagcacatctccactgtccctggcaggattgtgggaggcttcacaacccctgctttcctgacttcctcttctgcccaacactgggtgccccttcccagtttcccagcaggggcttcatgggccaccgtcagtgggtctgggcctgccagagtcgtcttgctcttcctcttgcttctaggcaaccacacttggcaagttaaatgtcccaagcaccttgtctcccttcccaagaacaaaccatttctgtgcacatccttggaggcgagatgagctccttgcagagggccagagtaagtgcaagtcatggagtgcaggcagaggggtccatggcttccccagcccagggagggtatcagtatcattcattctctctcccctcactggtatgggttcagagcaatgcctagggcccctctctgctcccctgcctagtggggtggtagtggctacctctcagccccaatagtccctgctcctcttagaatcttcaccaagtggcaggccacctctgggcaggaccacctgcgtctggcacccaggaggtgaggcagacaccatggttaggtgatagggtctgaacccagttggggagacagaggggttcagacttgggaagaatctgtcagtgtgcatggagtgaggtgtgtgtgtgtggatggatgtgcacgtgtgcatgctttttttctttttgccgtgaggacagttgaatttggggcatttttctacaagaagcagtcagccttctctcccccataaggactggctgtaaccttaagcccatcaaagttacttccagcctggagagaacctcaccaaacagctggtgtggcctgagggtggccatggtgggaaatgggcatgagaataaatacctccccaaattcaatctgagcccagcaggagaggatggtagggttgccagggctcagaagtgcaagctgattactcaccccaccctgcctcgccgcacctttcctttgtttccttgggtgaatgcaggagcagcagtggctgcccttcccacctggacagtggtgtgtgtagaaagccagctggatgtttgtggtggggcctcatggtgcctaggaggagataaagatgaggaggtttttccttattgtataaatgaatatttgtatgattaaattaacacacacaccaaaaaaaaaaaaaaagggcggccgctctagaggatccckcgaggggcccragmtwacgcgtggaaggc

SEQ ID NO: 630 - DNA, 2691 bp, Homo sapiens
  misc_feature (2545)..(2545): n equals a,t,g, or c
  misc_feature (2603)..(2603): n equals a,t,g, or c
  misc_feature (2612)..(2612): n equals a,t,g, or c
  misc_feature (2626)..(2626): n equals a,t,g, or c
aaaccttcccggaatttccgggtcgacccacgcgtccggcagcttagcgaaagaaaccctctctgagttcttgggcacgttcatcttgattgtccttggatgtggctgtgttgcccaagctattctcagtcgaggacgttttggaggggtcatcactatcaatgttggattttcaatggcagttgcaatggccatttatgtggctggcggtgtctctggtggtcacatcaacccagctgtgtctttagcaatgtgtctctttggacggatgaaatggttcaaattgccattttatgtgggagcccagttcttgggagcctttgtgggggctgcaaccgtctttggcatttactatgatggacttatgtcctttgctggtggaaaactgctgatcgtgggagaaaatgcaacagcacacatttttgcaacatacccagctccgtatctatctctggcgaacgcatttgcagatcaagtggtggccaccatgatactcctcataatcgtctttgccatytttgactccagaaacttgggagcccccagaggcctagagcccattgccatcggcctcctgattattgtcattgcttcctccctgggactgaacagtggctgtgccatgaacccagctcgagacctgagtcccagacttttcactgccttggcaggctgggggtttgaagtcttcagagctggaaacaacttctggtggattcctgtagtgggccctttggttggtgctgtcattggaggcctcatctatgttcttgtcattgaaatccaccatccagagcctgactcagtctttaaggcagaacaatctgaggacaaaccagagaaatatgaactcagtgtcatcatgtagtggcatgctcagctctggatttgcagtcagtttgggattctcttcagaaagatggcatctaagtgtctgtgttcttgtaagcctgaggtggaatccacccagttttgtctgctagccatatgggacatctaattggaaaagcatctgcataaaagtttggaaacaatgaccacttctctaccattgtcccccacccccaccccccagaataacgctgactgtcccctgaaacagccttctctcctgccctgtttatttcatcctcgatgggaattcttgctaggtaagcactaataactcggcatcttgacgatagtcccatttgggtggtttcagctgcactatctgtatgaaatggtgtcaccaaaacccttttcttcagtatcgacaaagattacattctgagtaccaaccaaaccctaaattgaaagacaaaactatggtttcagtcaacatattcatgaattagggagctaatgggttaagcttccagttcccgctatgctactggatttgtataaatactgatattctccaaacctagtggtgtagggagcaagagaatgcagctggaaggcacaaggggaggacattgtggcattcagaaactgcaggagacaagatgaatttgagaagccaaatggaatttttaatggaaaccatttatcagattaatctcttgctctcctgcattttagaggacaccaattaatttcctggtctttagtatataataacctaaaataccattgtaacctcagtcatgaaaaatacatcactctgtctttttagctcaaatgtattttcctaattgcccacttgagaacagacatttgacaagttatatcaacgactgtgcttgtccattattttacacatgccctagaagccaaaactgaaagccactggatcctggtctagctgaatcttcagagtgggaggtctccaaaaagatattaccttattgggcttaacaattcacaaggcactttcacacccattatctaatttaatcctcataatgactatgtgaggcaaatgccacattgcccatttttcagataaagaaacaaaatcttagggaagataagttgagttgtccaagagcacactgaaagttgaatgttatctaatgcattcctctacctttcagaagatcagtagctggctgagaatctttgccaaatcttccttgctagccagaagtggaattggcagcttctagaatatgtacacctctggacaaaatgttcctcaatcttaagatacaaagaccctcattgtctgggtctattcccacacttactgagtacagatgaaggaaagtggtagcaatttaatcataactttcatttgctgaaaaacattatgagaaggcctcccttcctaagccacctctggtcttgctaagtcttgatcttgcttcctgccagcaccaaacattacattcaggggatttcctctggctyartcttttccccttgaagttctctaatagawgttacttttgacaaaagatcgcctatgagttacaagcaccaggggatgctctacatcaagggatgcaccttcagtmaaactgtcaaaaagcccagaattcccaaaggcattaggtttcccaactgctttgtgctgatatcagaacagcagaaattaaatgtgaaatgtttctgatgncttatggttctacaatcttttgggcatacgggggttttttttttcttggctttgaagntatctgggnatttcccatttggnaataaaattggtcgggccaaaaaaaaaaaaaaaaaaaaccggggggggggcccggaccctttgcc

SEQ ID NO: 631 - DNA, 1783 bp, Homo sapiens
ccagattctggaggcgaagaacgcaaagctgagaacatggacgttaatatcgccccactccgcgcctgggacgatttcttcccgggttccgatcgctttgcccggccggacttcagggacatttccaaatggaacaaccgcgtagtgagcaacctgctctattaccagaccaactacctggtggtggctgccatgatgatttccattgtggggtttctgagtcccttcaacatgatcctgggaggaatcgtggtggtgctggtgttcacagggtttgtgtgggcagcccacaataaagacgtccttcgccggatgaagaagcgctaccccacgacgttcgttatggtggtcatgttggcgagctatttccttatctccatgtttggaggagtcatggtctttgtgtttggcattacttttcctttgctgttgatgtttatccatgcatcgttgagacttcggaacctcaagaacaaactggagaataaaatggaaggaataggtttgaagaggacaccgatgggcattgtcctggatgccctagaacagcaggaagaaggcatcaacagactcactgactatatcagcaaagtgaaggaataaacataacttacctgagctagggttgcagcagaaattgagttgcagcttgcccttgtccagacctatgttctgcttgcgtttttgaaacaggaggtgcacgtaccacccaattatctatggcagcatgcatgtataggccgaactattatcagctctgatgtttcagagagaagacctcagaaaccgaaagaaaaccaccaccctcctattgtgtctgaagtttcacgtgtgtttatgaaatctaatgggaaatggatcacacgatttctttaagggaattaaaaaaaataaaagaattacggcttttacagcaacaatacgattatcttataggaaaaaaaaaatcattgtaaagtatcaagacaatacgagtaaatgaaaaggctgttaaagtagatgacatcatgtgttagcctgttcctaatcccctagaattgtaatgtgtgggatataaattagtttttattattctcttaaaaatcaaagatgatctctatcactttgccacctgtttgatgtgcagtggaaactggttaagccagttgttcatacttcctttacaaatataaagatagctgtttaggatattttgttacatttttgtaaatttttgaaatgctagtaatgtgttttcaccagcaagtatttgttgcaaacttaatgtcattttccttaagatggttacagctatgtaacctgtattattctggacggacttattaaaatacaaacagacaaaaaataaaacaaaacttgagttctatttaccttgcacattttttgttgttacagtgaaaaaaatggtccaagaaaatgtttgccatttttgcattgtttcgtttttaactggaacatttagaaagaaggaaatgaatgtgcattttattaattccttaggggcacaaggaggacaataatagctgatcttttgaaatttgaaaaacgtctttagatgaccaagcaaaaagactttaaaaaatggtaatgaaaatggaatgcagctactgcagctaataaaaaattttagatagcaattgttacaaccatatgcctttatagctagacattagaattatgatagcatgagtttatacattctattatttttcctccctttctcatgtttttataaataggtaataaaaaatgttttgcctgccaaaaaaaaaaaaaaaaaaaa

SEQ ID NO: 632 - DNA, 564 bp, Homo sapiens
  misc_feature (560)..(560): n equals a,t,g, or c
tgagctgttgaaagaacttgaccggcagcaacgtaaactccagacctggattggcgtgcctggcgtggaccagagccgtattgaagcattaattcagcagttaaaagcggcggggagcgtattaatttccgcgccgcgtatcgggcaatttctgcgtgaagatcgtttgattgctctggtgcgtcagcgactgagcatcccaggcggctgttgcagctttgatttacctacattgcacatttggctgcatctaccccaggcgcagcgcgacagccaggtagaaacctggattgccagcctgaacccgctcacccaggcacttaccatggtgctggatttaattcgccagtcggcccccttccgtaaacaaaccagcctgaatggtttttatcaggataacggtggcgatgccgacttgctgcgcctgaatctgtcgctcgattcacagctttatccgcaaatttccggacataagagccgttttgccattcgttttatgccgctggacactgaaaacggacagtaccggacgtctggattcgaaattgcctgttgctaangggt

SEQ ID NO: 633 - DNA, 555 bp, Homo sapiens
ggcagagagcagatggccttgacaccagcagggtgacatccgctattgctacttctctgctcccccacagttcctctggacttctctggaccacagtcctctgccagacccctgccagaccccagtccaccatgatccatctgggtcacatcctcttcctgcttttgctcccagtggctgcagctcagacgactccaggagagagatcatcactccctgccttttaccctggcacttcaggctcttgttccggatgtgggtccctctctctgccgctcctggcaggcctcgtggctgctgatgcggtggcatcgctgctcatcgtgggggcggtgttcctgtgcgcacgcccacgccgcagccccgcccaagaagatggcaaagtctacatcaacatgccaggcaggggctgaccctcctgcagcttggacctttgacttctgaccctctcatcctggatggtgtgtggtggcacaggaacccccgccccaacttttggattgtaataaaacaattgaaacaccaaaaaaaaaaaaaaaaaaaaaaaaaaaaaaa

SEQ ID NO: 634 - DNA, 934 bp, Homo sapiens
ggcacgaggagattcccactcagccgctcacacaacacacacactcctctaggactctggtccaagggaggggctggctgggatgaagtctgggctctggagctgagagcaagtgggagagcagagggccagtggacaaggtcaccttgtgaccttggggccaggggctttccctctctgaattccacaaatgcccagcatgtccagcttgctgtggagatgggtctctccctggctgggctcctgccaaaactgtactcctctcctctccactgccaccagctacggagttcgagaagtggaccaagtgaaacctcacaaggcccaggacttagcgaggggccaagccaagcatcagcgtgatggtcacaggggcccctggcctaccaggtgatgcccggggcttggggataggatgaagctcctggagccttggtttgccccactgtgggctgggcagcatctgaggctcctgctgggctcccctaggctctccaggacatgtttgcactacttgggggagtttggagaagaccagatctatgaagcccaccaacaaggccgaggggctctggaggcattgctatgtgggggaccccagggggcctgctcagagaaggtgtcagccacaagagaagagctctagtcctggactctaccctcctctgaaagaagctggggcttgctctgatggtctccactcccgtctgcaggcagccaggagggcaggaagcccttgctctgtgctgccatcctgcctccctcctccagcctcagggcactcgggcctgggtgggagtcaactccttcccctctggactcaaataaaacccagtgacctcacttcttttctctgcaaaaggtgcttgtggggctgggagtgcagacattggtgtttctgctgatgtcccttgtgaaaaaaaaaaaaaaaaaa

SEQ ID NO: 635 - DNA, 520 bp, Homo sapiens
  misc_feature (45)..(45): n equals a,t,g, or c
  misc_feature (48)..(48): n equals a,t,g, or c
  misc_feature (65)..(65): n equals a,t,g, or c
  misc_feature (75)..(75): n equals a,t,g, or c
ttaacccttcacaaagggaacaaaagctggagctccacgcgttgncgnccgctctagaactagtngatcccccgngctgcaggaatcggcacgagctgagacggacacagccaagctgcagagctgaattacaaggccagcttagcctgaagtcattgcttaaataacctgctaactggaatgtattgacatgaactgtcaacacggctgctcccttcaaccaattccaagctctttctcctcctaatgagaggcttcttgtgtgtcttgatttgtctgttatgcctcttaacattgctcacagtctcaattggatcagaaaacagctttttctagaccacagaatgtatgctattctctgaaatcttaagctcttaagatctctacagtctgtttacccaatgtattgaattcttgtacccaatatctcatgataatgttcatttatgatacatatttcttctcttcttactatttgaataaattatattgactataaaaaaaaaaaaaaaaactcgta

SEQ ID NO: 636 - DNA, 506 bp, Homo sapiens
gcacgaggtgggcagtgtgggctccagactaggtcaggcctgtggagccggactctgtgttcaatgctggcatttatgtgcgtgcttgtggtcttgctgaccacatgtcaagctattctgtctacattcaagacaggagcaagggggaaggtgaagtgccagggtctcctgctcctttttcaagaaaatgataggctgggcgcggtgctcacgcctgtaatcctcccaaagtgctggtattacaggcgtgagcagtgcgtctggcccgaccctgtctttactaaaaatggcaagaccctgtctctactaaaaatacaaagaaaccccaaactagtcaggtgtggtggtacattcttgtgtcccagctacttgggaggctaaggtaggaggatcacctgagccttgaaggtcaaagctgtagtgagctgagatcgtgtccattgcattccagcctaggcaaccagagcaagaccctatctcacaaaaaaaaaaaaaaaaaaaaaaaa

SEQ ID NO: 637 - DNA, 947 bp, Homo sapiens
ggcacgagactgttactcccttgaatttataaacaaggaggctcaaagagctgaagattaaagagatgaagtatctaggctaaggtcacagagctagcaaatgacatatgctagatctaagcccaagtctgactctaaaattctgctttcttcatttagtttttctgccattcaaagtttactgccagctcctccaggaacttctgagtaagcctgtctccaaattgcccctaactcctcagtgccagtcatgggccaggcccctgggggacttggaatgagtaaaacatgcacctattgttaaggttcacctggtccagaaggggaggcagacccacctgcccaccatgacccggacagaggcgataaatacggagcacctcatggccagggcctggaggattcccaccataccctacccagcgccaataacagagggaccctggagttgtgtacacaagatagcagttcagtgcttgcacacatactagttgagaagggaaatcagggctaatgaaacagctcaactgtctggcagagccaggctccttctgccatgatacagtttggatgtttgtccctttctaatcttatatggaaatttgatccccagtgttgaaggtggggcctggtgggagatgttcctgttatcgggatggatccttcatgaatagcctggtgccatctttgtggtaacaagtgagttctcacttgattagtttctgtgagaactgtttgttaaaaagagcctggtggcacctccctcccttcttcctccttctcttgctatgtgatgctgctgccctttgccttccgtcatgagtggaagctccctgaagcccccaccagaagcaaatgctggcaccatgctgcttgtacagcctgcagaactgtgagccaaataaacctcttttctttataaattaaaaaaaaaaaaaaaaaaaaaa

SEQ ID NO: 638 - DNA, 1270 bp, Homo sapiens
ggcacgagttgtcacccagttcataagctgacattgccttaaatgtccctttttaaccccttatccctattttctaccattattactccggctcatgcccctttcatctcttgcttagacttctatagtgattttctaattggttgcttttattctagtcttaagccctctcatccatcctttactctcctaccagaggtatctttatgaaatgcaaattagctgtaagtcatcagtgacttaaatagagataaaatctaaacaacttagggtaacatttgagatctagcccctgttgatctctgtagcctcttcactcattctgtcccattcaggaccagttaaccatccatgccatgcttcttgcagttctcttaatgtacatattgatcatttttttctttcctttgatcctggtgatttctcagccaggggtactgcacagcctacctacctggtacatctatatacttcttttccaaaatttgttttcaatgtcacatgttctctggagcctttcctaacttccctccagtgtggtcaaagtgaactactcaccccacctttttaaaatctccattgtactctagtgtataaatgtttctcctggaacatgttatccttatttgtttaaatctctccctctctctaagccttgatgtctttttttttaaaaaaatgtattgaatatatactttgtgccctgcactatgctaagtgttcttcatttatttatatcatttacatttgcagttgccctgtgaggtgaggtagatattatccccagatgaagatgtcagagaagttaactgccctaagttatatcattactaagtaccagagttacgatttgagccaagaatgttggactgacacctaagtctatgcgtttactgaatccacagtactgcctttgtacgtcttatgcctgttacattgtattcagaaaacatttgttaaatgactggaagaaagcttggcgggtcttttttgcatggccttttcgctgtcttgtgtgtgcctctccctggctccaaggacagttctggttagtatatgatcagatcatagtaacagtttgtcacctgacttactgaccaaggactcgtgattgtagagaactcttaggaggctgacctgatgctcaagtttctgcttctcacatgataatttgtggtagaggtaggaagacaagaagagactgagtaatagtagaaagagagaaacacaaaaaaagcaaacaacaaaaaccaaaaaaaaaaaaaaaaaa

SEQ ID NO: 639 - DNA, 1126 bp, Homo sapiens
cggcgccggacagaagaggtccagcggttagtgggcgcggccggcggcacgaaggctggagccgcctgcatttccagcaatgacggcgccctttcccctcgcccgcagcggccttgcaggccactcgagccctaatggtggtctccctggtgctgggcttcctggccatgtttgtggccacgatgggcatgaagtgcacgcgctgtgggggagacgacaaagtgaagaaggcccgtatagccatgggtggaggcataattttcatcgtggcaggtcttgccgccttggtagcttgctcctggtatggccatcagattgtcacagacttttataaccctttgatccctaccaacattaagtaagtctgggaaccctgcctcctaaggggacaggtctggggtcctggaatagggaggagggcagaggcacgccagggtttctaaccacccccttctcttcacaggtatgagtttggccctgccatctttattggctgggcagggtctgccctagtcatcctgggaggtgcactgctctcctgttcctgtcctgggaatgagagcaaggctgggtaccgtgtaccccgctcttaccctaagtccaactcttccaaggagtatgtgtgacctgggatctccttgccccagcctgacaggctatgggagtgtctagatgcctgaaagggcctggggctgagctcagcctgtgggcagggtgccggacaaaggcctcctggtcactctgtccctgcactccatgtatagtcctcttgggttgggggtgggggggtgccgttggtgggagagacaaaaagagggagagtgtgctttttgtacagtaataaaaaataagtattgggaagcaggcttttttcccttcagggcctctgctttcctcccgtccagatccttgcagggagcttggaaccttagtgcacctacttcagttcagaacacttagcaccccactgactccactgacaattgactaaaagatgcaggtgctcgtatctcgacattcattcccacccccctcttatttaaatagctaccaaagtacttcttttttaataaaaaaataaagatttttattaggtaaaaaaaaaaaaaaaaaaaaaaaaaaaaaa

SEQ ID NO: 640 - DNA, 651 bp, Homo sapiens
ggcacgagtgcagctccctgagcactctctacagagacgcggaccccagacatgaggaggctcctcctggtcaccagcctggtggttgtgctgctgtgggaggcaggtgcagtcccagcacccaaggtccctatcaagatgcaagtcaaacactggccctcagagcaggacccagagaacagggcctggggcgcccgtgtggtggagcctccggagaaggacgaccagctggtggtgctgttccctgtccagaagccgaaactcttgaccaccgaggagaagccacgaggtcagggcaggggccccatccttccaggcaccaaggcctggatggagaccgaggacaccctgggccgtgtcctgagtcccgagcccgaccatgacagcctgtaccaccctccgcctgaggaggaccagggcgaggagaggccccggttgtgggtgatgccaaatcaccaggtgctcctgggaccggaggaagaccaagaccacatctaccacccccagtagggctccaggggccatcactgcccccgccctgtcccaaggcccaggctgttgggactgggaccctccctaccctgccccagctagacaaataaaccccagcaggccgggaaaaaaaaaaaaaaaaaaaaaaaaaaaaaaaaa

SEQ ID NO: 641 - DNA, 535 bp, Homo sapiens
ccgggcctgcttcgacttcaagacgtggatgcggacgcagcagaagcgggacaccaagtttagggaggactgcccgccggatcgcgaggaactgggccgccacagctgggctgtcctccacaccctggccgcctactaccccgacctgcccaccccagaacagcagcaagacatggcccagttcatacatttattttctaagttttacccctgtgaggagtgtgctgaagacctaagaaaaaggttgtgcaggaaccacccagacacccgcacccgggcatgcttcacacagtggctgtgccacctgcacaatgaagtgaaccgcaagctgggcaagcctgacttcgactgctcaaaagtggatgagcgctggcgcgacggctggaaggatggctcctgtgactagagggtggtcagccagagctcatgggacagctagccaggcatggttggataggggcagggcactcattaaagtgcatcacagccagaaaaaaaaaaaaaaaaaaaaaaaaaaaaaaaaaacggggggggc

SEQ ID NO: 642 - DNA, 2347 bp, Homo sapiens
gggcacaggccctggctgggaggtggggcgggcaggagccagcctggaggaggggctgagagtcagcaggcacacggkaacccggaaccctgtgtgctggggaggaatcccgcagtggccggggggcttgaggccgctgctttgtctcttcgtccagagccttatgtaagagcttttctcgggaaacaggaagtcctgcttgccaatttcagcacagggagtagtgcaggccttattccaacacacccggcccagccttaaccccagaactcagccagtttcttgcttccgtgcccctggttctcctccccatcgagcccacccctcctttcccaccttcagtcacccctagtgaactgccccagcgatctctgctgtgcttgaccccgagggtcttccaccctcgccctgaccctggacactgcccagcttggccccccatcctgctcctggcacaatgccctctagccagccaaccttccctcccccaaccctggggccgccccagggttcctgcgcactgcctgttcctcctgggtgtcactggcagccctgtccttcctagagggactggaacctaattctcctgaggctgagggagggtggagggtctcaaggcaacgctggccccacgacggagtgccaggagcactaacagtacccttagcttgctttcctcctccctcctttttattttcaagttcctttttatttctccttgcgtaacaaccttcttcccttctgcaccactgcccgtacccttacccgccccgccacctccttgctaccccactcttgaaaccacagctgttggcagggtccccagctcatgccagcctcatctcctttcttgctagcccccaaagggcctccaggcaacatggggggcccagtcagagagccggcactctcagttgccctctggttgagttggggggcagctctgggggccgtggcttgtgccatggctctgctgacccaacaaacagagctgcagagcctcaggagagaggtgagccggctgcagaggacaggaggcccctcccagaatggggaagggtatccctggcagagtctcccggagcagagttccgatgccctggaagcctgggagagtggggagagatcccggaaaaggagagcagtgctcacccaaaaacagaagaatgactccgatgtgacagaggtgatgtggcaaccagctcttaggcgtgggagaggcctacaggcccaaggatatggtgtccgaatccaggatgctggagtttatctgctgtatagccaggtcctgtttcaagacgtgactttcaccatgggtcaggtggtgtctcgagaaggccaaggaaggcaggagactctattccgatgtataagaagtatgccctcccacccggaccgggcctacaacagctgctatagcgcaggtgtcttccatttacaccaaggggatattctgagtgtcataattccccgggcaagggcgaaacttaacctctctccacatggaaccttcctggggtttgtgaaactgtgattgtgttataaaaagtggctcccagcttggaagaccagggtgggtacatactggagacagccaagagctgagtatataaaggagagggaatgtgcaggaacagaggcgtcttcctgggtttggctccccgttcctcacttttcccttttcattcccaccccctagactttgattttacggatatcttgcttctgttccccatggagctccgaattcttgcgtgtgtgtagatgaggggcgggggacgggcgccaggcattgtccagacctggtcggggcccactggaagcatccagaacagcaccaccatctagcggccgctcgagggaagcacccgccggttggccgaagtccacgaagccgccctctgctagggaaaacccctggttctccatgccacacctctctccaggtgccctctgcctcttcaccccacaagaagccttatcctacgtccttctctccatctatcggaccccagtttccatcactatctccagagatgtagctattatgcgcccgtctacagggggtgcccgacgatgacggtgccttcgcagtcaaattactcttcgggtcccaaggtttggctttcacgcgctccattgccccggcgtggcaggccattccaagcccttccgggctggaactggtgtcggaggagcctcgggtgtatcgtacgccctggtgttggtgttgcctcactcctctgagctcttctttctgatcaagccctgcttaaagttaaataaaatagaatgaatgataaaaaaaaaaaaaaaaaagggcgccgctcgcgatctagaactagtc

SEQ ID NO: 643 - DNA, 2900 bp, Homo sapiens
acactgatcttcaaataccatagaatwctaatctctggaggctggcagmttgacttggcactttagggccccttagcagggtgagctgktaaaacagcacacatctstcatcccctcttcctttattcccccctgggtttcagaaaggaaggatatatggggaccacctcccccttctttgatcccagcatctcagtccccctcccaaccctccatatggctctcaatggtgctcacttgcttggaagcaggctcccaatagggagggggctgccctctacagtctctttgactgtaagacagggctctgtatcagtgagacgatgagaaaagtcccaggctaatggcagaaatttgcactttgaacatgtgtgtttttgtgttgtggaacctgagattccttatttattaacaggaagtctgattttttttttttggagtctttgttgctatattttgtggggctgggagagagagattagattattttgacatgggatcccttccataacaggtactttgaaggcaagacatagggttgaagaagcacarccagcctctgaaatcatagctctccagtggcttttaaagaaagctggtcctcagcactaacaaaatcactacaatagcctagtgcttttttggaagcctttttagggaagaatgttaggttcatggtaactagtatgctctttgagatttttacagtgttgaaacttaagaattttgagagggtgaggagggttgttcagaatctaaattacagatagatgattgtttcttgtgaatttgtttcttttcctttttttttgtccctaccatttccttacatttcccttggggcccatctctggctccttgctttttgtttcttgctttgctttatcagttcattccagctccctgttagtgaaggacactgctgttagtgaaggaacaaagtctatgagtcctaaaattttaagtcaaagaaaactgctctgtttcccctttagtaacacttctgaagaggaaaaacttcaatagccaaagttaataatcctatataataattgctttggctttcacctaaaattctgggcatcacaatttccttgggatagaggttgtgttggggaatagattgcttattgctgttcactggagagaaaaggtagtgtttttgtacaaggtcataccgccagaagccccaaatcctattttggctcatcttcaggtaaagagtaattcctatcctgtgtgcctcagaagctagaatcgaaggcttaccctattcattgtttattgtcagaaatgcatgatggctcttggaaagaatgacgttttgctggaaaaaaaaaaaagaacagtttgtgtttcacaaacatggcttatcaattttttcaaagaattcttttttcccaaaaagaggagtaacaaaatgtcatttctgaaagaggcttactttataccaactagtgtcagcatttgggatgccagggaacagagagtgagacacctacaatcaccagtctcaaatgcgctattgtttcttttcagagtgttgcagatttgccatttctccataatatggggatagaaaatggaataaagatagaagggatgtagaatatgctttcctgccaacatggtttggagtcgactttggtatattgactagatttgaaaatacaagattgattagatgaatctacaaaaaagttgtcctcctctcaggtcccttttacactttttgactaactagcatctatattccacacttagcttttttgtcacacttatcctttgtctccgtaaatttcatttgcagtggttagtcatcagatattttagccacctacacaaaagcaaactgcatttttaaaaatctttctgagatgggagaaaatgtattctcctttcctataccgctctcccaacaaaaaaacaactagttagttctactaattagaaacttgctgtactttttcttttcttttaggggtcaaggaccctctttatagctaccatttgcctacaataaattattgcagcagtttgcaatactaaaatattttttatagactttatatttttccttttgataaagggatgctgcatagtagagttggtgtaattaaactatctcagccgtttccctgctttcccttctgctccatatgcctcattgtccttccagggagctcttttaatcttaaagttctacatttcatgctcttagtcaaattctgttacctttttaataactcttcccactgcatatttccatcttgaattggtggttctaaattctgaaactgtagttgagatacagctatttaatatttctgggagatgtgcatccctcttctttgtggttgcccaaggttgttttgcgtaactgagactccttgatatgcttcagagaatttaggcaaacactggccatggccgtgggagtactgggagtaaaataaaaatatcgaggtatagactagcatccacatagagcacttgaacctcctttgtacctgtttggggaaaaagtataatgagtgtactaccaatctaactaagattattatagtctggttgtttgaaataccatttttttctccttttgtgtttttcccactttccaatgtactcaagaaaattgaacaaatgtaatggatcaatttaaaatattttatttcttaaaagccttttttgcctgttgtaatgtgcaggacccttctcctttcatgggagagacaggtagttacctgaatataggttgaaaaggttatgtaaaaagaaattataataaaagggatactttgcttttcaaatctttgttttctcttattctaggtaaggcatattaaaaataaatatgtaaagaagaaaaataaaagttgtcttcatggaaaaaaaaaaaa

SEQ ID NO: 644 - DNA, 2142 bp, Homo sapiens
  misc_feature (2135)..(2135): n equals a,t,g, or c
  misc_feature (2139)..(2139): n equals a,t,g, or c
ggagatccacgagcagctggtcacctacgacgaggagggcggcggcgagatggacaccaccagctacgatgtgtcggtgctcaactcggtgcgccgcggcggggccaagcccccgcggcccgcgctggacgcccggccttccctctatgcgcaggtgcagaagccaccgaggcacgcgcctggggcacacggagggcccggggagatggcagccatgatcgaggtgaagaaggacgaggcggaccacgacggcgacggccccccctacgacacgctgcacatctacggctacgagggctccgagtccatagccgagtccctcagctccctgggcaccgactcatccgactctgacgtggattacgacttccttaacgactggggacccaggtttaagatgctggctgagctgtacggctcggacccccgggaggagctgctgtattaggcggccgaggtcactctgggcctggggacccaaaccccctgcagcccaggccagtcagtcgccaggcaccacagcctccaaaaatggcagtgactccccagcccagcaccccttcctcgtgggtcccagagacctcatcagccttgggatagcaaactccaggttcctgaaatatccaggaatatatgtcagtgatgactattctcaaatgctggcaaatccaggctggtgttctgtctgggctcagacatccacataaccctgtcacccacagaccgccgtctaactcaaagacttcctctggctccccaaggctgcaaagcaaaacagactgtgtttaactgctgcagggtctttttctagggtccctgaacgccctggtaaggctggtgaggtcctggtgcctatctgcctggaggcaaaggcctggacagcttgacttgtggggcaggattctctgcagcccattcccaagggagactgaccatcatgccctctctcgggagccctagccctgctccaactccatactccactccaagtgccccaccactccccaacccctctccaggcctgtcaagagggaggaaggggccccatggcagctcctgaccttgggtcctgaagtgacctcactggcctgccatgccagtaactgtgctgtactgagcactgaaccacattcagggaaatggcttattaaactttgaagcaactgtgaattcattctggaggggcagtggagatcaggagtgacagatcacagggtgagggccacctccacacccaccccctctggagaaggcctggaagagctgagaccttgctttgagactcctcagcacccctccagttttgcctgagaaggggcagatgttcccggagcagaagacgtctccccttctctgcctcacctggtcgccaatccatgctctctttcttttctctgtctactccttatcccttggtttagaggaacccaagatgtggcctttagcaaaactggacaatgtccaaacccactcatgactgcatgacggagccgagccatgtgtctttacacctcgctgttgtcacatctcagggaactgaccctcaggcacaccttgcagaaggcaaggccctgccctgcccaacctctgtggtcacccatgcatcttccactggaacgtttcactgcaaacacaccttggagaagtggcatcagtcaacagagaggggcagggaaggagacaccaagctcacccttcgtcatggaccgaggttcccactctgggcaaagcccctcacactgcaagggattgtagataacactgacttgtttgttttaaccaataactagcttcttataatgatttttttactaatgatacttacaagtttctagctctcacagacatatagaataagggtttttgcataataagcaggttgttatttaggttaacaatattaattcaggttttttagttggaaaaacaattcctgtaaccttctattttctataattgtagtaattgctctacagataatgtctatatattggccaaactggtgcatgacaagtactgtatttttttatacctaaataaagaaaaatctttagcctgggcaaaaaaaaaaaaaaaaaaaaaaaaaaaaaaaaaaaaaaaaaaaaaaaaaaaaaaaaaaaaaaaaaaaaaaaaancaanaaa

SEQ ID NO: 645 - DNA, 1873 bp, Homo sapiens
tgagggctgcataactgatggagggccgggcgcggtaagagcgtctcgggggagtggggcaaggcggccgggcccctcccatgccgccttttcttcagcgtcctacccgcggcactggctgcgagcgccgggccacctgcgagtgtgcgcagggactctggacacccgcggcggcgagctgagggagcagtctccacgaggacccaggcggaccctctggcgccatgcgcgccctccccggcctgctggaggccagggcgcgtacgccccggctgctcctcctccagtgccttctcgctgccgcgcgcccaagctcggcggacggcagtgccccagattcgccttttacaagtccacctctcagagaagaaataatggcaaataacttttccttggagagtcataacatatcactgactgaacattctagtatgccagtagaaaaaaatatcactttagaaaggccttctaatgtaaatctcacatgccagttcacaacatctggggatttgaatgcagtaaatgtgacttggaaaaaagatggtgaacaacttgagaataattatcttgtcagtgcaacaggaagcaccttgtatacccaatacaggttcaccatcattaatagcaaacaaatgggaagttattcttgtttctttcgagaggaaaaggaacaaaggggaacatttaatttcaaagtccctgaacttcatgggaaaaacaagccattgatctcttacgtaggggattctactgtcttgacatgtaaatgtcaaaattgttttcctttaaattggacctggtacagtagtaatgggagtgtaaaggttcctgttggtgttcaaatgaataaatatgtgatcaatggaacatatgctaacgaaacaaagctgaagataacacaacttttggaggaagatggggaatcttactggtgccgtgcactattccaattaggcgagagtgaagaacacattgagcttgtggtgctgagctatttggtgcccctcaaaccatttcttgtaatagtggctgaggtgattcttttagtggccaccattctgctttgtgaaaagtacacacaaaagaaaaagaagcactcagatgaggggaaagaatttgagcagattgaacagctgaaatcagatgatagcaatggtatagaaaataatgtccccaggcatagaaaaaatgagtctctgggccagtgaatacaaaacatcatgtcgagaatcattggaagatatacagagttcgtatttcagctttrtttatccttcctgttaagagcctctgagtttttagttttaaaaggatgaaaagcttatgcaacatgctcagcaggagcttcatcaacgatatatgtcagatctaaaggtatattttcattctgtaattatgttacataaaagcaatgtaaatcagaataaatatgttagaccagaataaaattaattatattctggtcttcaaaggacacacagaacagatatcagcagaatcacttaatacttcatagaacaaaaatcactcaaaacctgtttataaccaaagaattcatgaaaaagaaagcctttgccatttgtcttagaaagttattttttwaaaaaaaatcatacttactattagtatctatggaagtatatgtaacaatttttatgtaaaggtcatctttctgtgatagtgaaaaaatatgtctttactaagttgaaatgaatactttctgcctttgctmatgatagttattctacaatctccacaagaaaaatataccttttatccggaaatattggtttaaggcaaataaataaaactgtgcttgctctaaagctctgcactacaaaagcaaaaaaaaaaaaaaaaaaaaaaaaaaaaa

SEQ ID NO: 646 - DNA, 1042 bp, Homo sapiens
  misc_feature (919)..(919): n equals a,t,g, or c
  misc_feature (1026)..(1026): n equals a,t,g, or c
gttaagatccgtgccgccataaccatgagtgataacactgcggccaacttacttctgacawcgwtcggwggaccgaaggagctaaccgcttttttgcacaacatgggggatcatgtaactcgccttgatcgttgggaaccggagctgaatgaagccataccaaacgacgagcgtgacaccacgatgcctgtagcaatggcaacaacgttgcgcaaactattaactggcgaactacttactctagcttcccggcaacaattaatagactggatggaggcggataaagttgcaggaccacttctgcgctcggcccttccggctggctggtttattgctgataaatctggagccggtgagcgtgggtctcgcggtatcattgcagcactggggccagatggtaagccctcccgtatcgtagttatctacacgacggggagtcaggcaactatggatgaacgaaatagacagatcgctgagataggtgcctcactgattaagcattggtaactgtcagaccaagtttactcatatatactttagattgatttaaaacttcatttttaatttaaaaggatctaggtgaagatcctttttgataatytcatgccataacttcgtataatggatgctatacsaagttatggsatgaccaaaatcccttaacgtgagttttcgttccactgarcgtcagaccccgtagaaaagaycaaaggatcttcttgagatcctttttttctgcgcgtaatctgctgcttgcaaacaaaaaaaccaccgctaccagcggtggtttgtttgccggatcaagagctaccaactctttttccgaaggtaactggcttcagcagagcgcagataccaaatactggtcttctagtgtagccgtagttaggccaccacttcaagaactctgtagcaccgnctacatacctcgctctgctaatcctggtaccagtggctgctgccagtggcgataagtcgtgtcttaccgggttggactcaagacgatagttaccggataaggcgcancggtcgggctgaacgg

SEQ ID NO: 647 - DNA, 767 bp, Homo sapiens
  misc_feature (621)..(621): n equals a,t,g, or c
  misc_feature (660)..(660): n equals a,t,g, or c
  misc_feature (700)..(700): n equals a,t,g, or c
  misc_feature (719)..(719): n equals a,t,g, or c
  misc_feature (756)..(756): n equals a,t,g, or c
  misc_feature (761)..(761): n equals a,t,g, or c
cgggtcgacccacgcgtccgggaggccggtccggcgccgcccagccccgggctccgggcgggaagtgggcgagcgcgacggtgcggggcgcgcgggcgacgggccagcgggatgggagcagggtcccccggcggcccgcagcctcgggagccgcgctgaagccgggggcgggaccagcgcggagccgacatgtgtctgcgcctcggaggcctgagtgtgggcgacttccggaaggtgctgatgaagacaggcctggtgctggtggtgctgggccatgtgagcttcatcacagctgccctgttccatggcacagtgctgcgctacgtgggcacccctcaagatgcggtggctctgcagtactgcgtggtcaacatcctctctgtcacttccgccatcgtggtcatcacttcaggcatcgcagccatcgtgttgtcacgctacctccctagcacccccctgcgctggacagtgtttagctcgagcgtggcctgtgctctcctttctctgacctgtgccytcggcctcttggcctccatcgccatgacctttgccacccagggcaaggsactgctggctgcctgcacttttgggaagctcttgaactactggccctcgcacttnaattgtccctttcgaccccacacgcaatttaataggttnccggccctgtggccttcttgggggcattcgccccttaaangctttcttgccggggggcnggaaaaaaaacggggggtttttgcttggtaacccccnttttnggcttt

SEQ ID NO: 648 - DNA, 1954 bp, Homo sapiens
cccacgcgtccggagatgcgggtcatggcgccccgagccctcctcctgctgctctcgggaggcctggccctgaccgagacctgggcctgtgagtgcggggttgggagggaagcggcctctgcggagaggagcgaggggcccgcccggcgagggcgcaggacccggggagccgcgcagggaggtgggtcgggcgggtctcagcccctcctcgcccccaggctcccactccatgaggtatttcgacaccgccgtgtcccggcccggccgcggagagccccgcttcatctcagtgggctacgtggacgacacgcattcgtgcggttcgacagcgacgccgcgagtccgagaggggagccgcgggcgccgtgggtggagcaggaggggccggagtattgggaccgggagacacagaactacaagcgccaggcacaggctgaccgagtgagcctgcggaacctgcgcggctactacaaccagagcgaggacggtgagtgaccccggcccggggcgcaggtcacgacccctccccatcccccacggacggcccgggtcgccccgagtctccccgtctgagatccaccccaaggtggatctgcggaacccgcccagaccctcgaccggagagagccccagtcgcctttacccggtttcattttcggtttaggccaaaatccccgcgggttggtcggggcggggcggggctcgggggactgggctgaccgcgggggcggtgccagggtctcacaccctccagaggatgtatggctgcgacctggggcccgacgggcgcctcctccgcgggtatgaccagtccgctacgacggcaaggattacatcgccctgaacgaggacctgcgctcctggaccgccgcggacaccgcggctcagatcacccagcgcaagttggaggcggcccgtgcggcggagcagctgagagcctacctggagggcacgtgcgtggagtggctccgcagatacctggagaacgggaaggagacgctgcagcgcgcagaacccccaaagacacacgtgacccaccaccccctctctgaccatgaggccaccctgaggtgctgggccctgggcttctaccctgcggagatcacactgacctggcagcgggatggggaggaccagacccaggacaccgagcttgtggagaccaggccagcaggagatggaaccttccagaagtgggcagctgtggtggtgccttctggacaagagcagagatacacgtgccatatgcagcacgaggggctgcaagagcccctcaccctgagctgggagccatcttcccagcccaccatccccatcatgggcatcgttgctggcctggctgtcctggttgtcctagctgtccttggagctgtggtcaccgctatgatgtgtaggaggaagagctcaggtggaaaaggagggagctgctctcaggctgcgtgcagcaacagtgcccagggctctgatgagtctctcatcacttgtaaagcctgagacagctgcctgtgtgggactgagatgcaggatttcttcacacctctcctttgtgacttcaagagcctctggcatctctttctgcaaaggcgtctgaatgtgtctgcgttcctgttagcataatgtgaggaggtggagagacagcccacccccgtgtccaccgtgacccctgtccccacactgacctgtgttccctccccgatcatctttcctgttccagagaggtggggctggatgtctccatctctgtctcaaattcatggtgcactgagctgcaacttcttacttccctaatgaagttaagaacctgaatataaatttgtgttctcaaatatttgctatgaagcgttgatggattaattaaataagtcaattcctagaagttgagagagcaaataaagacctgagaaccttccagaaaaaaaaaaaaaaaaaaaaaaaaaaaaaaaaaaaaaaaaaa

SEQ ID NO: 649 - DNA, 1499 bp, Homo sapiens; identical to SEQ ID NO: 387
  misc_feature (42)..(42): n equals a,t,g, or c
  misc_feature (330)..(330): n equals a,t,g, or c
  misc_feature (1298)..(1298): n equals a,t,g, or c
  misc_feature (1319)..(1319): n equals a,t,g, or c
  misc_feature (1373)..(1373): n equals a,t,g, or c
  misc_feature (1375)..(1375): n equals a,t,g, or c
  misc_feature (1393)..(1393): n equals a,t,g, or c

SEQ ID NO: 650 - DNA, 957 bp, Homo sapiens
  misc_feature (945)..(946): n equals a,t,g, or c
cgcgtccgcggacgcgtgggcggacgcgtgggcggacgcgtgggcctgtggatgctgcgcctctccgaacgcaacatgaaggtgctccttgccgccgccctcatcgcggggtccgtcttcttcctgctgctgccgggaccttctgcggccgatgagaagaagaaggggcccaaagtcaccgtcaaggtgtattttgacctacgaattggagatgaagatgtaggccgggtgatctttggtctcttcggaaagactgttccaaaaacagtggataattttgtggccttagctacaggagagaaaggatttggctacaaaaacagcaaattccatcgtgtaatcaaggacttcatgatccagggcggagacttcaccaggggagatggcacaggaggaaagagcatctacggtgagcgcttccccgatgagaacttcaaactgaagcactacgggcctggctgggtgagcatggccaacgcaggcaaagacaccaacggctcccagttcttcatcacgacagtcaagacagcctggctagatggcaagcatgtggtgtttggcaaagttctagagggcatggaggtggtgcggaaggtggagagcaccaagacagacagccgggataaacccctgaaggatgtgatcatcgcagactgcggcaagatcgaggtggagaagccctttgccatcgccaaggagtagggcacagggacatctttctttgagtgaccgtctgtgcaggccctgtagtccgccacagggctctgagctgcactggccccggtgctggcatctggtggagcggacccactcccctcacattccacaggcccatggactcacttttgtaacaaactcctaccaacactgaccaataaaaaaaaatgtgggttttttttttttttaataaaaaaaaaaaaaaaaaactcgrggggggcccgtacnnaatcgccctat

SEQ ID NO: 651 - DNA, 1700 bp, Homo sapiens
ccacgcgtccgcgcttgccccgggggtctgtcgcgtcgcaggcgccgccgggagccctggccatgaggaccctgtggatggcgctgtgcgcgctgtcgcggctgtggcccggggcccaggccggctgcgccgaggccgggcgctgctgtcccggccgggaccccgcctgcttcgcccgcggctggaggctggacagggtctacgggacgtgtttctgcgaccaagcctgtcgcctcaccggggactgctgcttcgactacgacagggcgtgcccagctcgcccgtgcttcgtgggggaatggagcccctggagtggttgtgcagaccagtgcaagcctacaacccgtgtgcggaggcgctcggtgcagcaggagcctcagaacggcggggcgccctgcccacccctggaagagagagctggctgcctggagtactccaccccgcagggccaggactgcgggcacacctatgttcctgcctttataactacctctgcattcaacaaggagagaacacgacaagctacgtctccacactggtctacacacacagaggatgctggatactgtatggagtttaagacagagtccttgactcctcactgtgctctggaaaaccggcccttgactagatggatgcagtatctccgagagggatacacggtgtgtgtggattgtcagcctccagctatgaactctgtgagccttcgttgttctggagatggcctggactccgatggaaatcagactctccattggcaagcaattggtaatcctcggtgtcaaggaacttggaaaaaagttcggcgagtagaccagtgttcttgtccagctgttcacagttttatttttatatagatggtgatataaatatttccaaatgcatttgtaaacattctaaatattctcaagtcatgttcaatgtttcctaaaccttcaattttggccaaagtccccaaacacatcattgccacactctgaagtagagaaagaaaatttaggggccagttctcaaggaacacaggtcctttatttttattttaactaagttgaagacccactcaaaaagctcttgtggttttatgttcttgacctttcactggagtcctctcattcagcaggtggcccgtgagacacagaatacatgtctgtttgctaaagtaaaattactgtaactcagtccgattattggtgacggaagtgtcatttaaggggatctatgttttgaaccttgcagtctattttataatcttttaaaagtttctcactttaaaacatgtatacaggtatgcacactctacacatatatttccatatatttaatattccataaattctgaaataatttcaagcaaattatcacaaataatttttccacagggcaaattatttaaaattttagtaagcattctgtaatgaaaaaccaagttatactaaaaacattttttgaagaagaaattttttttttgcttaagaagtgaaaggatcaaatgctcattgtaggtcaatgggagttcttttaaatgttataattttcatgaaaagaaatgttgacaccagtgaatgaaacaattgctttcattctgaaaattctaccaccatttgcatctaagattatttccaaggcttaaagcctgaagctgaataaaataatctttcagagtccagcttcaaaaaaaaaaaaaaaaaaaaaaaaaaaaa

SEQ ID NO: 652 - DNA, 988 bp, Homo sapiens
ccaattgggttccgggccccccccaggtttttttttttttttttttaaagatgaaattcttattattattctgtatcatgcattaagagagagaaagaggattgtttttgcattgcgtttgtcacacagcagcacaaagacaatatatgtaagcgtagcgttcaccagatttgacacaagagatagcgaacaccacaaagattaggacagaccgcgtatagtaagctctgcggaactccaagaatctagagggggctgtgggaacgctgcttagatctcctcgtcgytctcgcatgggttgggggtgcagctgttggccacgatctcgcagaaattgcctgagaagccaggggggcacaggcaggaggcatgggaggcccggccctcatcatccacgcaggtgcctccgtgctggcagggggagccgttgatcacacagggcccgtcctttttctggcagtcctttcccgagtacccgggggcacaggagcattcatagaggccatcgtccaggctcacgcaggtcccgttgttggcacagggggccgaggagcaggcccgaacatctctatcacagagctccccgtcccagccgtcggtgcaaatgcactgcccgggttctccacagagtccgtgaaggcagccgggagaggtcacgcactggtcacaaaggggaccctgccagccaggctggcacctgcaaacattgtcatcctcgcagaatccattttgggggttgcaggccgggaagcattcagccccataggtgctgtggccgaaagccagcaggagcaagaggacgcgcaggagggcttcggtcgcggtcatctctgggcggccggggtcgcggtcccgggagcggtgcgggcgcgggtccggctcctggcgccgcactgggcttctggttgcggacgcgaaagggggcgcgggcgcgcagcgaggggaaagccagggctgcaccgggctgcgcrctscgctctccaccgcc

SEQ ID NO: 653 - DNA, 2087 bp, Homo sapiens
cgccgctgcatcggtcgccttcggagcgaagggtaccgacccggcagaagctcggagctctcggggtatcgaggaggcaggcccgcgggcgcacgggcgagcgggccgggagccggagcggcggaggagccggcagcagcggcgcggcgggctccaggcgaggcggtcgacgctcctgaaaacttgcgcgcgcgctcgcgccactgcgcccggagcgatgaagatggtcgcgccctggacgcggttctactccaacagctgctgcttgtgctgccatgtccgcaccggcaccatcctgctcggcgtctggtatctgatcatcaatgctgtggtactgttgattttattgagtgccctggctgatccggatcagtataacttttcaagttctgaactgggaggtgactttgagttcatggatgatgccaacatgtgcattgccattgcgatttctcttctcatgatcctgatatgtgctatggctacttacggagcgtacaagcaacgcgcagcctggatcatcccattcttctgttaccagatctttgactttgccctgaacatgttggttgcaatcactgtgcttatttatccaaactccattcaggaatacatacggcaactgcctcctaattttccctacagagatgatgtcatgtcagtgaatcctacctgtttggtccttattattcttctgtttattagcattatcttgacttttaagggttacttgattagctgtgtttggaactgctaccgatacatcaatggtaggaactcctctgatgtcctggtttatgttaccagcaatgacactacggtgctgctacccccgtatgatgatgccactgtgaatggtgctgccaaggagccaccgccaccttacgtgtctgcctaagccttcaagtgggcggactgagggcagcagcttgactttgcagacatctgagcaatagttctgttatttcacttttgccatgagcctctctgagcttgtttgttgctgaaatgctactttttaaaatttagatgttagattgaaaactgtagttttcaacatatgctttgctaggaacactgtgatagattaactgtagaattcttcctgtacgattggggatataatgggcttcactaaccttccctaggcattgaaacttcccccaaatctgatggacctagaagtctgcttttgtacctgctgggccccaaagttgggcatttttctctctgttccctctcttttgaaaatgtaaaataaaaccaaaaatagacaactttttcttcagccattccagcatagagaacaaaaccttatggaaacaggaatgtcaattgtgtaatcattgttctaattaggtaaatagaagtccttatgtatgtgttacaagaatttcccccacaacatcctttatgactgaagttcaatgacagtttgtgtttggtggtaaaggattttctccatggcctgaattaagaccattagaaagcaccaggccgtgggagcagtgaccatctgctgactgttcttgtggatcttgtgtccagggacatggggtgacatgcctcgtatgtgttagagggtggaatggatgtgtttggcgctgcatgggatctggtgcccctcttctcctggattcacatccccacccagggcccgcttttactaagtgttctgccctagattggttcaaggaggtcatccaactgactttatcaagtggaattgggatatatttgatatacttctgcctaacaacatggaaaagggttttcttttccctgcaagctacatcctactgctttgaacttccaagtatgtctagtcaccttttaaaatgtaaacattttcagaaaaatgaggattgccttccttgtatgcgctttttaccttgactacctgaattgcaagggatttttatatattcatatgttacaaagtcagcaactctcctgttggttcattattgaatgtgctgtaaattaagttgtttgcaattaaaacaaggtttgcccacatccaaaaaaaaaaaaaaaaaaaaaaaaaaaaaaaaaaaaaaaaaaaaaaaaaaaaaaaaaaaaaaaaa

SEQ ID NO: 654 - DNA, 1631 bp, Homo sapiens
ggcctggacacataaatcagcacgcggccggagaaccccgcaatctttgcgcccacaaaatacaccgacgatgcccgatctactttaagggctgaaacccacgggcctgagagactataagagcgttccctaccgccatggaacaacggggacagaacgccccggccgcttcgggggcccggaaaaggcacggcccaggacccagggaggcgcggggagccaggcctgggccccgggtccccaagacccttgtgctcgttgtcgccgcggtcctgctgttggtctcagctgagtctgctctgatcacccaacaagacctagctccccagcagagagcggccccacaacaaaagaggtccagcccctcagagggattgtgtccacctggacaccatatctcagaagacggtagagattgcatctcctgcaaatatggacaggactatagcactcactggaatgacctccttttctgcttgcgctgcaccaggtgtgattcaggtgaagtggagctaagtccctgcaccacgaccagaaacacagtgtgtcagtgcgaagaaggcaccttccgggaagaagattctcctgagatgtgccggaagtgccgcacagggtgtcccagagggatggtcaaggtcggtgattgtacaccctggagtgacatcgaatgtgtccacaaagaatcaggcatcatcataggagtcacagttgcagccgtagtcttgattgtggctgtgtttgtttgcaagtctttactgtggaagaaagtccttccttacctgaaaggcatctgctcaggtggtggtggggaccctgagcgtgtggacagaagctcacaacgacctggggctgaggacaatgtcctcaatgagatcgtgagtatcttgcagcccacccaggtccctgagcaggaaatggaagtccaggagccagcagagccaacaggtgtcaacatgttgtcccccggggagtcagagcatctgctggaaccggcagaagctgaaaggtctcagaggaggaggctgctggttccagcaaatgaaggtgatcccactgagactctgagacagtgcttcgatgactttgcagacttggtgccctttgactcctgggagccgctcatgaggaagttgggcctcatggacaatgagataaaggtggctaaagctgaggcagcgggccacagggacaccttgtacacgatgctgataaagtgggtcaacaaaaccgggcgagatgcctctgtccacaccctgctggatgccttggagacgctgggagagagacttgccaagcagaagattgaggaccacttgttgagctctggaaagttcatgtatctagaaggtaatgcagactctgccatgtcctaagtgtgattctcttcaggaagtgagaccttccctggtttaccttttttctggaaaaagcccaactggactccagtcagtaggaaagtgccacaattgtcacatgaccggtactggaagaaactctcccatccaacatcacccagtggatggaacatcctgtaacttttcactgcacttggcattatttttataagctgaatgtgataataaggacactatggaaaaaaaaaaaaaaaaaaaaaaaaaaaaaaaaaaggg

SEQ ID NO: 655 - DNA, 1727 bp, Homo sapiens
gcccacgcgtccgcttgtttgaagtttttgtctcctactcagcacactgcaattgcacaggcccatgttttctattactgtcttttttttcttttttaaaaaatctgatgttggataactagataatcttaatcccccttctttattcctattgtccagcaatacatctctaacgttttcattaatgacgtgtatgtaatttttgctctgtttccctgatgccttgaaccattgtcatgtttagctcttatttctgctttgccacacatattcagactgtattaatcctcgccgtttctctcttctggggtaccacattaagaaagaaaagctaaagtgcaattataggtacccctggctatttttgaatttgcatttgtaactataccctctgatgtttattccgtgtttgtttggggtcgtacsctgtagcttatgcctgtaatcccagcacttttcgaggccaagatgggcagatcacttgagcccaggacttcgagcccagtctgggcaacacggtgaaatcccatctcctcaaaaaatmcaaaaaaaattagctgggcgtgatgatgtgcgcctgtattcctggctactcaggaggctgaaatgggagaatcacctgagcctgggggaagttaagtctgcagcaagccctgatcaggccactgcactctggcctggacggcggagtgagaccctgtctccaaaaaaaaaaaaaaaaaaaaaaggaagaaaaaagtttgtttggttctaggtctgttacatatgggtcctaaaaagaactatagagggttaaagtgagaaagccagtcgttggtgaatatgtctgtgtgtgcatagagttttaaacattatttagtgactgttttgtgccagctatggtatgagtaactggaaatataaagatgctgaaattgactatttaaaaacatttatgtatttatttatttttggagatgtggtctcactctgttgcccaggctggagtgcagtgacatgatcatagctcactgcagcctcaaactcctggactcaatcaatcttcccgccttagcctcccaggctgtgaggcaccacagatggctaattaaaaaaaactttttaaaatgtaaacctgaaaattgcctgagagtggattgsataatctaaaaatatgaaaatatgtataaatattttgtttcttaaaaggccactgctgtggtagcttatctagtatccttgctacatttactgaaaatatatgttagagatatctgcactgctatgttcttttcagcatttttcacaatagccaagatwtggaaacaaccttaacgttcatcaatgaatgcataaagaaaatgtgatacatacgcacttgcaccatgaaatattattcagcattaaaaaagaagaaaatcctgccatttgcggcaacatggatgaacgtggaggacattatgctaagtgaagtaacgcagccatagaaagacaaatactgcatggaatctgaaaatatcaaacttacagagtagaatggtggttaccaggggctagggaaaggagtaaatggagagatgttgaaacttcaagtacaaagattcagttatgcaacataaataagttcggagatctaatgtacaacagtgtgactgtagttaatagtgtcatatactgtaattgacatttgtgaagagggtagaccttaaaagttcttaacacaccaaaaaaaaaaaaaaagggcggcc

SEQ ID NO: 656 - DNA, 1105 bp, Homo sapiens
cctgatcctctcttttctgcagttcaagggaaagacgagatcttgcacaaggcactctgcttctgcccttggctggggaagggtggcatggagcctctccggctgctcatcttactctttgtcacagagctgtccggagcccacaacaccacagtgttccagggcgtggcgggccagtccctgcaggtgtcttgcccctatgactccatgaagcactgggggaggcgcaaggcctggtgccgccagctgggagagaagggcccatgccagcgtgtggtcagcacgcacaacttgtggctgctgtccttcctgaggaggtggaatgggagcacagccatcacagacgataccctgggtggcactctcaccattacgctgcggaatctacaaccccatgatgcgggtctctaccagtgccagagcctccatggcagtgaggctgacaccctcaggaaggtcctggtggaggtgctcgcagaccccctggatcaccgggatgctggagatctctggttccccggggagtctgagagcttcgaggatgcccatgtggagcacagcatctccaggagctcttcktaggaaaggccgcaaattcccattccttcccctcttgcctatcyttctcctccaagayctgcatctttctcatcaagattctagcagccagcgccctctgggctgcagcctggcatggacagaagccagggacacatccacccagtgaactggactgtggccatgacccagggtatcagctccaaactctgccagggctgagagacacgtgaaggaagatgatgggaggaaaagcccaggagaagtcccaccagggaccagcccagcctgcatacttgccacttggccaccaggactccttgttctgctctggcaagagactactctgcctgaacactgcttctcctggaccctggaagcagggactggttgagggagtggggaggtggtaagaacacctgacaacttctgaatattggacattttaaacacttacaaataaatccaagactgtcatatttaaaaaaaaaaaaaaaaaamaaaarrrrrrccccggtacccaattcgccctatagtgagtcgtata

SEQ ID NO: 657 - DNA, 615 bp, Homo sapiens
  misc_feature (555)..(555): n equals a,t,g, or c
  misc_feature (583)..(583): n equals a,t,g, or c
  misc_feature (607)..(607): n equals a,t,g, or c
  misc_feature (609)..(609): n equals a,t,g, or c
gtaaagcggctccgtgacggagcggcggtgcgcgcggcagggcccggagtatcccgctttctttggaggaaaccaccgcatcagatctgcgctgcggcagaggcaggctacaaccactagcacggctgacgatggccctttctgcggagaccgagtcacacatctaccgagctctgcgtactgcttctggcgctgccgcccaccttgtggccctgggctttaccatctttgtggctgtgcttgccaggcctggctccagcctgttctcctggcacccggtgcttatgtctttggctttctccttcctgatgaccgaggcactactggtgttttctcctgagagttcgctgctgcactccctctcacggaaaggccgagcacgctgccactgggtgctgcagctgctggccctgctgtgtgcactgctgggcctcggccttgtcatcctccacaaagagcagcttggcaaagcccacctggttacgcggcatgggcaggcagggctgctggctgtgctgtgggcagggctgcagtgctcaagtggggtggggctgntctaccccaaggcttggttgccccccgnatgggccccctgggcggaaaggcntnaaagcc

SEQ ID NO: 658 - DNA, 1993 bp, Homo sapiens
  misc_feature (1917)..(1921): n equals a,t,g, or c
  misc_feature (1925)..(1925): n equals a,t,g, or c
  misc_feature (1959)..(1959): n equals a,t,g, or c
  misc_feature (1978)..(1978): n equals a,t,g, or c
  misc_feature (1989)..(1989): n equals a,t,g, or c
gttaagcagccaggattgtttattcattacaatgccttgccatcaaatattttaaatacctattcttaggctgcacatgctaacatatccaaataagatcgataacgataattaatttcattatcatggaagttcgtatgtctggttctgttgccgtgacacgcgccattgccgtgcccggattgctgttattactgattatcgcgacggcattaagcctgctcattggggcaaaatcactccccgcttccgtagtgctggaggccttctccggcacctgccagagcgccgactgcaccatcgtgctcgacgcgcggctgccgcgtacccttgccggtttactggcaggcggcgcgcttggccttgccggggcgttaatgcaaaccctcacccgaaacccacttgccgaccccggcttgcttggcgttaacgccggaaccagctttgccattgtgctgggtgcggcgctgtttggttactcttccgcgcaggaacaactggcgatggccttcgccggggcgctggtggcctcattgattgttgcctttaccggcagtcagggcggcgggcagttaagtccggtgcgtttaaccctggcgggcgtggcgctggcggcggtgctggaaggactgaccagcggcatcgccctgcttaatcctgacgtctacgatcagttgcgtttctggcaagccggttcgctggatattcgcaatctacataccttaaaagtggtgctgatcccggtgctgatcgccggagcaactgcgctattactgagtcgcgcgctgaacagtttgagcctcggcagcgacaccgcgacggcgctgggcagtcgcgtggcgcgcacacagttgattggtctgctggcgattaccgtgctttgtggtagtgcgacggcaatagttggcccgattgcctttattggcctgatgatgccgcatatggcgcgttggctggtgggtgccgatcatcgctggtcgctgcccgtcacgctacttgctacccctgccctgctgctgtttgccgatatcatcgggcgggtgattgtgcccggcgaactgcgcgtttctgtggtcagtgcgtttattggtgcaccggtgctgatcttcctcgtgcgacgtaaaacgcgaggtggtgcatgatttacgtctctcgccgattactcatcacctgtttgctgctggtttccgcctgtgtggttgcaggtatctggggattacgcagcggtgccgtcacgctggaaacctcgcaggtattcgccgcgctgatgggcgatgcgccgcgcagtatgacgatggtggtcaccgaatggcgtttaccacgcgtgctgatggcgctgttgattggcgcagcactgggcgtcagtggcgcgatttttcagtcgctgatgcgtaacccgctcggcagccctgacgtaatgggctttaacaccggggcgtggagcggcgtgctggtggcgatggtgctgtttggtcaggacctgacggctatcgcgctgtcagcaatggtgggcggcattgtcacttcgctgctggtctggctgctcgcctggcgcaacggcatcgacacctttcggttgattattatcggtatcggcgttcgcgccatggtggtggcctttaatacctggctgttgctgaaagcgtctttagaaacggcgctaacagcaggtttgtggaatgccggatcgctcaacggcctgacgtgggcaaaaacctcgcgttccgcacccatcattatattgatgctcattgccgccgccttactggtacgccggatgcgcttgctggaaatgggcgatgataccgcgtgtgcgctgggcgtcagcgtcgaacgttcgcgtctgttaatgatgctggttgcagtggtgcttaccgctgcggcaacagcgcttgccgggcggatttcctttatggnnnnngtcncaccgcacattgcccgacgcattagcaacaccgntttgtgggggggccggtancctattttccnaaga

SEQ ID NO: 659 - DNA, 884 bp, Homo sapiens
ggcggatgaagccacgcgacgtgttgtgtctgagatcccggtgctgaagactaacgccggaccccgagatcgtgagttgtgggtgcagcgactgaaggaggaatatcagtcccttatccggtatgtggagaacaacaagaatgctgacaacgattggttccgactggagtccaacaaggaaggaactcggtggtttggaaaatgctggtatatccatgacctcctgaaatatgagtttgacatcgagtttgacattcctatcacatatcctactactgccccagaaattgcagttcctgagctggatggaaagacagcaaagatgtacaggggtggcaaaatatgcctgacggatcatttcaaacctttgtgggccaggaatgtgcccaaatttggactagctcatctcatggctctggggctgggtccatggctggcagtggaaatccctgatctgattcagaaggcgtcatccaacacaaagagaaatgcaaccaatgaagaatcaagccactgaggcagggcagagggacctttgataggctacgatactattttcctgtgcatcacacttaactcatctaactgcttccccggacaccctccacctctagttgttactaagtagctgcagtaggcattgctggggaagaaacaaacacacaccaaacagtactgctacttagtttctaaggctgcacagggaagggaaagactgggctttggacaatctagaggtaatttatatccgcccccaggtggagcaacatgcgattctggaggcacgggggtaactgaaagtgagtacatatagtctttctggtttctggagataacccatcaataaaagctgcttcctctggtaaaaaaaaaaaaaaaaaaaa

SEQ ID NO: 660 - DNA, 1897 bp, Homo sapiens
ggcacgaggtgaggaaccctggactctcagagatggaatttcaccgtgttgcctaggctggtctggagctcttgatctcaagcgatcctccctgcctcggcctcccaacgtgctgggattataggcgtgagcaccgctcctggccagggtctgttcctagttgcaacagttcttggaaacccactcgagagggccaggcctccattcaccaggccacgcatcacaagaggcaacaccaggagccaacatgagctcggggactgaactgctgtggcccggagcagcgctgctggtgctgttgggggtggcagccagtctgtgtgtgcgctgctcacgcccaggtgcaaagaggtcagagaaaatctaccagcagagaagtctgcgtgaggaccaacagagctttacggggtcccggacctactccttggtcgggcaggcatggccaggacccctggcggacatggcacccacaaggaaggacaagctgttgcaattctaccccagcctggaggatccagcatcttccaggtaccagaacttcagcaaaggaagcagacacgggtcggaggaagcctacatagaccccattgccatggagtattacaactgggggcggttctcgaagcccccagaagatgatgatgccaattcctacgagaatgtgctcatttgcaagcagaaaaccacagagacaggtgcccagcaggagggcataggtggcctctgcagaggggacctcagcctgtcactggccctgaagactggccccacttctggtctctgtccctctgcctccccggaagaagatgaggaatctgaggattatcagaactcagcatccatccatcagtggcgcgagtccaggaaggtcatggggcaactccagagagaagcatcccctggcccggtgggaagcccagacgaggaggacggggaaccggattacgtgaatggggaggtggcagccacagaagcctagggcagaccaagaagaaaggagccaaggcaaagagggaccactgtgctcatggacccatcgctgccttccaaggaccatttcccagagctactcaacttttaagcccctgccatggttgctcctggaaggagaaccagccaccctgaggaccacctggccatgcgtgcacagcctgggaaaagacagttactcacgggagctgcaggcccgtcaccaagccctctcccgacccaggctttgtggggcaggcacctggtaccaagggtaacccggctcctggtatggacggatgcgcaggatttaggataagctgtcacccagtccccataacaaaaccactgtccaacactggtatctgtgttcttttgtgctatgaatttggattcctaattgctattgttggttgctggggttttaaatgattgataagcttgtacagttaacttatagagggggagccatatttaacattctggatttcagagtagagatttctgtgttgtctcctagaaagcattacatgtagtttatttcagcatccttgttgggtggggccctggctctcttccctttggtgggacctcccctttctttgggcttcagttcactcaggagaaatgaggctgtcgccatctttatgtgcttccagtggaaatgcacttgctacagacaatagtgcatgagagtctagagaagtagtgaccagaacagggcagagtaggtcccctccatggccctgaatcctccctctgctccagggctggcctctgcagagctgattaaacagtgttgtgactgtctcatgggaagagctggggcccagagggaccttgagtcagaaatgttgccagaaaaagtatctcctccaaccaaaacatctcaataaaaccattttagttgaaaaaaaaaaaaaaaaaa

SEQ ID NO: 661 - DNA, 1230 bp, Homo sapiens
ggcacgaggtggggtcgccttgtaggccttgtgtacatcctgcctgctgcctacttttggagaaagggctggctcagccgtggcatgaaaggacgtgttcttgccctctgtggcctcgtctgcttccagggtctgttgggatggtatatggtgaaaagtggactagaagaaaaatcagactcccatgacatccctcgggtcagtcagtaccgccttgctgcccacctgggatcagccctggttctttattgtgccagcttgtggacctcactgtcactgctactccctccgcacaagttgcctgaaacccaccaactcctacagttgagacgatttgctcatggaacagcaggtctggtgttccttacggccctctcaggggcttttgtggcagggctagatgctgggcttgtttataactcctttcccaaaatgggagaatcctggatcccggaggacctctttaccttctcccccatcctgaggaatgtttttgagaatcccaccatggtgcagtttgatcaccggattctgggaatcacttcagtcactgccattacagtgctctacttcctctctcggagaattccccttcctagaaggaccaagatggcagcagtgactctgctggctttggcgacgctgctgatgtatgtcccaactcctctggccgccactcaccagtcaggctccttggctttgctcactggtgctctttggctgatgaatgaactccgaagagtcccaaaatgattcttagaggaccagcctcctgggactgtgactgcttttgagagctcttcagagatcataagaacttgggcttttctacgagatgaccttgacataccaagtggtttccaaatggtcaacttacttaaaaatcttttcctgttttgagatagtcactggatcaagaatgcattaagtgtggttaccctaaatgttcccttttaaatctgcttttcatgttgaaaatcagttttaatgtagagaaagaaatgtctgccatttgctgcttaacaggctttgtgtcaggtttttcagtgttggcaagctcttggttctacgtggatgatttctacgtggatgttctcctgagtccttaattctgcctaaatagaatttctttatgatcttaacttcacttccattaggtgaagattgaaaggataggattgacatacccaaagtagccagctggtcttcagcaaaaaaaaaaaaaaaaaa

SEQ ID NO: 662 - DNA, 1000 bp, Homo sapiens
gcctggccctcctggaaagagtcctggaaagacaaccttcaggtccagccctggagctggaggagtggagccccactctgaagacgcagcctttctccaggttctgtctctcccattctgattcttgacaccagatgcaggatggtgtcctctccctgcacgccggcaagctcacggacttgctcccgtatcctgggactgagccttgggactgcagccctgtttgctgctggggccaacgtggcactcctccttcctaactgggatgtcacctacctgttgaggggcctccttggcaggcatgccatgctgggaactgggctctggggaggaggcctcatggtactcactgcagctatcctcatctccttgatgggctggagatacggctgcttcagtaagagtgggctctgtcgaagcgtgcttactgctctgttgtcaggtggcctggctttacttggagccctgatttgctttgtcacttctggagttgctctgaaagatggtcctttttgcatgtttgatgtttcatccttcaatcagacacaagcttggaaatatggttacccattcaaagacctgcatagaattatctgtatgaccgttcgctctggaactccgtctgcctggagccctctgcagctgttgtctggcacgtgtccctcttctccgcccttctgtgcatcagcctgctccagcttctcctggtggtcgttcatgtcatcaacagcctcctgggccttttctgcagcctctgcgagaagtgacaggcagaaccttcacttgcaagcatgggtgttttcatcatcggctgtcttgaatcctttctacaaggagtgggttcaggccctctgtggttaaagactgtatccatgctgtgctcaaggaggaactggcaaatgctgaatattctccagaagaaatgcctcagcttacaaaacatttatcagaaaacattaaagataaattaaaaggtaaaaaaaaaaaaaaaaaaactcga

SEQ ID NO: 663 - DNA, 579 bp, Homo sapiens
caaccttcaggtccagccctggagctggaggagtggagccccactctgaagacgcagcctttctccaggttctgtctctcccattctgattcttgacaccagatgcaggtgcttactgctctgttgtcaggtggcctggctttacttggagccctgatttgctttgtcacttctggagttgctctgaaagatggtcctttttgcatgtttgatgtttcatccttcaatcagacacaagcttggaaatatggttacccattcaaagacctgcatagtaggaattatctgtatgaccgttcgctctggaactccgtctgcctggagccctctgcagctgttgtctggcacgtgtccctcttctccgcccttctgtgcatcagcctgctccagcttctcctggtggtcgttcatgtcatcaacagcctcctgggccttttctgcagcctctgcgagaagtgacaggcagaaccttcacttgcaagcatgggtgttttcatcatcggctgtcttgaatcctttctacaaggagtgggtacgaattataaacaaacttcccctttaaaaaaaaaaaaaaaaaaa

SEQ ID NO: 664 - DNA, 1535 bp, Homo sapiens
gggcacgaggaaagttcttcaggtacgaggagggcattgttgtcagtctggaccgagcccgcagagcccctcctcggcgtcctggtcccggccgtgcccgcggtgtcccgggaggaaggggcgggccgggggtcgggaggagtcacgtgccccctcccgccccaggtcgtcctctcagcatgggggtcccgcggcctcagccctgggcgctggggctcctgctctttctccttcctgggagcctgggcgcagaaagccacctctccctcctgtaccaccttaccgcggtgtcctcgcctgccccggggactcctgccttctgggtgtccggctggctgggcccgcagcagtacctgagctacaatagcctgcggggcgaggcggagccctgtggagcttgggtctgggaaaaccaggtgtcctggtattgggagaaagagaccacagatctgaggatcaaggagaagctctttctggaagctttcaaagctttggggggaaaaggtccctacactctgcagggcctgctgggctgtgaactgggccctgacaacacctcggtgcccaccgccaagttcgccctgaacggcgaggagttcatgaatttcgacctcaagcagggcacctggggtggggactggcccgaggccctggctatcagtcagcggtggcagcagcaggacaaggcggccaacaaggagctcaccttcctgctattctcctgcccgcaccgcctgcgggagcacctggagaggggccgcggaaacctggagtggaaggagcccccctccatgcgcctgaaggcccgacccagcagccctggcttttccgtgcttacctgcagcgccttctccttctaccctccggagctgcaacttcggttcctgcggaatgggctggccgctggcaccggccagggtgacttcggccccaacagtgacggatccttccacgcctcgtcgtcactaacagtcaaaagtggcgatgagcaccactactgctgcattgtgcagcacgcggggctggcgcagcccctcagggtggagctgggtgaggtcccgccaggtggtgatgctcctggtttcccgttgccttgtctcactgctgcgccggtccttcctgagtctgaccttcctccccactgctgccacctccttgaatctgactgccttgaacctcacgcctgtcagtgcccccaaaacctgatggcttgtccttcccaaggccaactgccttccgtctcctgctgcttctggcctcactgagtctgaagagctgttaactaccatggccagtcctccctgagtctgaccatcttccatcctgctgctgctgctgctgctgctgcgggtcttcctggaatctgaccattcgttgtctgctatgcccgtcctcaccaagactgactgcctgctgctttgctactgcccgggcccatgagactgacttcccactgctctgcctgcctctccccactgcactggcacagccccgccttgccgctgctgatccattgccggtgtgaccgcggccgc

SEQ ID NO: 665 - DNA, 2151 bp, Homo sapiens
ggcacgagctctgatgtaacccagcgccccgcagtcccgacacagattcctggatctcagccccatagcagctatgatcccgctgctgctggcagcgctgctgtgcgtccccgccggggccctgacctgctacggggactccgggcagcctgtagactggttcgtggtctacaagctgccagctcttagagggtccggggaggcggcgcagagagggctgcagtacaagtatctggacgagagctccggaggctggcgggacggcagggcactcatcaacagcccggagggggccgtgggccgaagcctgcagccgctgtaccggagcaacaccagccagctcgccttcctgctctacaatgaccaaccgcctcaacccagcaaggctcaggactcttccatgcgtgggcacacgaagggtgtcctgctccttgaccacgatgggggcttctggctggtccacagtgtacctaacttccctccaccggcctcctctgctgcatacagctggcctcatagcgcctgtacctacgggcagaccctgctctgtgtgtcttttcccttcgctcagttctcgaagatgggcaagcagctgacctacacctacccctgggtctataactaccagctggaagggatctttgcccaggaattccccgacttggagaatgtggtcaagggccaccacgttagccaagaaccctggaacagcagcatcacactcacatcccaggccggggctgttttccagagctttgccaagttcagcaaatttggagatgacctgtactccggctggttggcagcagcccttggtaccaacctgcaggtccagttctggcacaaaactgtaggcatcctgccctctaactgctcggatatctggcaggttctgaatgtgaaccagatagctttccctggaccagccggcccaagcttcaacagcacagaggaccactccaaatggtgcgtgtccccaaaagggccctggacctgcgtgggtgacatgaatcggaaccagggagaggagcaacggggtgggggcacactgtgtgcccagctgcagccctctggaaagccttccagccgctggtgaagaactaccagccctgtaatggcatggccaggaagcccagcagagcttataagatctaacccttatggccaggtgcagtggctcacgtatgtaatcccagcactttggaagccaaggagggaggatcacttgaactcaggaattcgagaccagcctgggctacatagtgagaccacatctctactagaacttaaaaaaagttagccaggcacggtgataaatgcctgtagtcccagccactgaagccagaggatcgattgaaccagggagatcatggtcacagtgaactatgattacgccaacctgggtcacatagcaagactctgtttcaaaaaaaaagggggggcgggggacgggtgggtgcagtggctcacatctgtaaccccagcactttgggaggctgagatgggcagatcacttgaggtcaggagttcgagaccagcctggccaacatggtgaaaccccatatccattaaaaatatttaaaaattagccagacatggtggcacgcgtctgtggtcctagctcctcgggaggctgaggcaggagaatcgcttgaactcgggaggcagaggttgtcatgagctgagctaacaccacggcacttcagcctgggtgacagaatgagactctgtgtcaaaaaaataaaaaataaaaaatctaagggctcaggaaaaaaaaaaaaaaaaaactcctcgtgccgattcggcacgagtcaacaccctcctagccttactactaataattattacattttgactaccacaactcaacggctacatagaaaaatccaccccttacgagtgcggcttcgaccctatatcccccgcccgcgtccctttctccataaaattcttcttagtagctatcaccttcttattatttgatctagaaattgccctccttttacccctaccatgagccctacaaacaactaacctgccactaatagttatgtcatccctcttattaatcatcatcctagccctaagtctggcctatgagtgactacaaaaaggattagactgagccgaataaaaaaaaaaaaaaaaaaa

SEQ ID NO: 666 - DNA, 1460 bp, Homo sapiens
attgccttctggtccctggtgacactggggtcatccttcatccccggagagcatttctggctgctcctcctgacccggggcctggtgggggtcggggaggccagttattccaccatcgcgcccactctcattgccgacctctttgtggccgaccagcgcgaccggatgctcagcatcttctactttgccattccggtgggcagtggtctgggctacattgcaggctccaaagtgaaggatatggctggagactggcactgggctctgagggtgacaccgggtctaggagtggtggccgttctgctgctgttcctggtagtgcgggagccgccaaggggagccgtggagcgccactcagatttgccacccctgaaccccacctcgtggtgggcagatctgagggctctggcaagaaatcctagtttcgtcctgtcttccctgggcttcactgctgtggcctttgtcacgggctccctggctctgtgggctccggcattcctgctgcgttcccgcgtggtccttggggagaccccaccctgccttcccggagactcctgctcttcctctgacagtctcatctttggactcatcacctgcctgaccggagtcctgggtgtgggcctgggtgtggagatcagccgccggctccgccactccaacccccgggctgatcccctggtctgtgccactggcctcctgggctctgcacccttcctcttcctgtcccttgcctgcgcccgtggtagcatcgtggccacttatattttcatcttcattggagagaccctcctgtccatgaactgggccatcgtggccgacattctgctgtacgtggtgatccctacccgacgctccaccgccgaggccttccagatcgtgctgtcccacctgctgggtgatgctgggagcccctacctcattggcctgatctctgaccgcctgcgccggaactggcccccctccttcttgtccgagttccgggctctgcagttctcgctcatgctctgcgcgtttgttggggcactgggcggcgcacttcctgggcaccgccatcttcattgaggccgaccgccggcgggcacagctgcacgtgcagggcctgctgcacgaagcagggtccacagacgaccggattgtggtgccccagcggggccgctccacccgcgtgcccgtggccagtgtgctcatctggagaggctgccgctcacctacctgcacatctgccacagctggccctgggcccaccccacgaagggcctgggcctaaaccccttggcctggcccagcttccagagggaccctgggccgtgtgccagctcccagacactacatgggtagctcaggggaggaggtgggggtccaggagggggatccctctccaacaggggcagccccaagggctcggtgctatttgtaacgggattaaaatttgtagccagaaaaaaaaaaaaaaaaaaaaa

SEQ ID NO: 667 - DNA, 1029 bp, Homo sapiens
taccgctcgccctgacatccggtaccttacaggcctggatgacggtcgagaatatcgatctcaaaaccattggtttcttctctctggtaggccaggcttacgtttttaaattcctctggtcaccgctgatggaccgctacacgcctccattttttgggcggcggcgcggttggctgctcgccacgcaaatcctgttattagtcgccattgcggcgatgggttttctcgaaccaggcacccaactccgctggatggcggcgctggcagtggtgatcgctttttgctctgcttcccaggratatagtcttcgatgcgtggaaaaccgatgtgcttccggcagaagaacgtggtgcgggcgcggcaatcagcgtgctgggttaccgtttagggatgctggtttccggcggcctagccctgtggctggcagataaatggctgggctggcagggcatgtactggttaatggcggcactgttgatcccctgtattaatcgcgacgttgcttgcaccagaaccaaccgacaccattcctgtgcccaaaacgctggaacaagcggttgttgcacctctgcgagatttctttggtcgcaataatgcctggcttattttgcttcttatcgtgctgtataagctgggcgacgcattcgccatgagcctgacaaccacgtttttgattcgcggcgtcgggtttgatgcgggtgaagtaggcgtggttaacaaaacgcttggcttactagcgaccattgttggcgcattgtacggtgggattttgatgcagcgcctgtcactgttccgggcactgctgattttcggcattttacaaggtgcgtctaacgccggttactggctgctgtcgattactgataagcatctctacagcatgggcgcagccgtctttttcgaaaacctctgtggcgggatgggcacatcagcctttgtcgcgctgttaatgacgctatgtaataagtcattttccgctactcaatttgccctgctctcagcgctttctgctgtagggcgagtttatgt

SEQ ID NO: 668 - DNA, 1381 bp, Homo sapiens
atgatacgccaagcttggcacgagggtccgcagcgggcggctgctgagctgccttgaggtgcagtgttggggatccagagccatgtcggacctgctactactgggcctgattgggggcctgactctcttactgctgctgacgctgctggcctttgccgggtactcagggctactggctggggtggaagtgagtgctgggtcaccccccatccgcaacgtcactgtggcctacaagttccacatggggctctatggtgagactgggcggcttttcactgagagctgcagcatctctcccaagctccgctccatcgctgtctactatgacaacccccacatggtgccccctgataagtgccgatgtgccgtgggcagcatcctgagtgaaggtgaggaatcgccctcccctgagctcatcgacctctaccagaaatttggcttcaaggtgttctccttcccggcacccagccatgtggtgacagccaccttcccctacaccaccattctgtccatctggctggctacccgccgtgtccatcctgccttggacacctacatcaaggagcggaagctgtgtgcctatcctcggctggagatctaccaggaagaccagatccatttcatgtgcccactggcacggcagggagacttctatgtgcctgagatgaaggagacagagtggaaatggcgggggcttgtggaggccattgacacccaggtggatggcacaggagctgacacaatgagtgacacgagttctgtaagcttggaagtgagccctggcagccgggagacttcagctgccacactgtcacctggggcgagcagccgtggctgggatgacggtgacacccgcagcgagcacagctacagcgagtcaggtgccagcggctcctcttttgaggagctggacttggagggcgaggggcccttaggggagtcacggctggaccctgggactgagcccctggggactaccaagtggctctgggagcccactgcccctgagaagggcaaggagtaacccatggcctgcaccctcctgcagtgcagttgctgaggaactgagcagactctccagcagactctccagccctcttcctccttcctctgggggaggaggggttcctgagggacctgacttcccctgctccaggcctcttgctaagccttctcctcactgccctttaggctcccagggccagaggagccagggactattttctgcaccagcccccagggctgccgcccctgttgtgtctttttttcagactcacagtggagcttccaggacccagaataaagccaatgatttacttgtttcacaaaaaaaaaaaaaaaastcgagggggggcccggtacccaaaacgccggatagtga

SEQ ID NO: 669 - DNA, 1951 bp, Homo sapiens
ggcacgagctacgccgtgggccacttcctcaacgacctgtgcgcgtccatgtggttcacctacctgctgctctacctgcactcggtgcgcgcctacagctcccgcggcgcgggctgctgctgctgctgggccaggtggccgacgggctgtgcacaccgctcgtgggctacgaggccgaccgcgccgccagctgctgcgcccgctacggcccgcgcaaggcctggcacctggtcggcaccgtctgcgtcctgctgtccttccccttcatcttcagcccctgcctgggctgtggggcggccacgccgagtgggctgccctcctctactacggcccgttcatcgtgatcttccagtttggctgggcctccacacagatctcccacctcagcctcatcccggagctcgtcaccaacgaccatgagaaggtggagctcacggcactcaggtatgcgttcaccgtggtggccaacatcaccgtctacggcgccgcctggctcctgctgcacctgcagggctcgtcgcgggtggagcccacccaagacatcagcatcagcgaccagctggggggccaggacgtgcccgtgttccggaacctgtccctgctggtggtgggtgtcggcgccgtgttctcactgctattccacctgggcacccgggagaggcgccggccgcatgcggaggagccaggcgagcacacccccctgttggcccctgccacggcccagcccctgctgctctggaagcactggctccgggagccggctttctaccaggtgggcatactgtacatgaccaccaggctcatcgtgaacctgtcccagacctacatggccatgtacctcacctactcgctccacctgcccaagaagttcatcgcgaccattcccctggtgatgtacctcagcggcttcttgtcctccttcctcatgaagcccatcaacaagtgcattgggaggaacatgacctacttctcaggcctcctggtgatcctggcctttgccgcctgggtggcgctggcggagggactgggtgtggccgtgtatgcagcggctgtgctgctgggtgctggctgtgccaccatcctcgtcacctcgctggccatgacggccgacctcatcggtccccacacgaacagcggagcgttcgtgtacggctccatgagcttcttggataaggtggccaatgggctggcagtcatggccatccagagcctgcacccttgcccctcagagctctgctgcagggcctgcgtgagcttttaccactgggcgatggtggctgtgacgggcggcgtgggcgtggccgctgccctgtgtctctgtagcctcctgctgtggccgacccgcctgcgacgctgggaccgtgatgcccggccctgactcctgacagcctcctgcacctgtgcaagggaactgtggggacgcacgaggatgccccccagggccttggggaaaagcccccactgcccctcactcttctctggacccccaccctccatcctcacccagctcccgggggtggggtcgggtgagggcagcagggatgcccgccagggacttgcaaggaccccctgggttttgagggtgtcccattctcaactctaatccatcccagccctctggaggatttggggtgcccctctcggcagggaacaggaagtaggaatcccagaagggtctgggggaaccctaaccctgagctcagtccagttcacccctcacctccagcctgggggtctccagacactgccagggccccctcaggacggctggagcctggaggagacagccacggggtggtgggctgggcctggaccccaccgtggtgggcagcagggctgcccggcaggcttggtggactctgctggcagcaaataaagagatgacggcaaaaaaaaaaaaaaaaaaaaaaaaaaaaaaaaaaaaaaaaaaaaaaaaaaaaaaaaaaaaaaa

SEQ ID NO: 670 - DNA, 1588 bp, Homo sapiens
ggcacgagcggaaacccaggcacctcgacctcaagaggatcagcctggccagggtggcacaactcttccttccccgtgcacagcaggaaagctgccatcagctgagcaagtccaccaacagtttctgtgtcccacttcatctttaataaggacaccatcttcttgtattatacggcacgagagtgtacctatcacacacagggggaaaaatgctcttttgggtgctaggcctcctaatcctctgtggttttctgtggactcgtaaaggaaaactaaagattgaagacatcactgataagtacatttttatcactggatgtgactcgggctttggaaacttggcagccagaacttttgataaaaagggatttcatgtaatcgctgcctgtctgactgaatcaggatcaacagctttaaaggcagaaacctcagagagacttcgtactgtgcttctggatgtgaccgacccagagaatgtcaagaggactgcccagtgggtgaagaaccaagttggggagaaaggtctctggggtctgatcaataatgctggtgttcccggcgtgctggctcccactgactggctgacactagaggactacagagaacctattgaagtgaacctgtttggactccatcagtgtgacactaaatatgcttcctttggtcaagaaagctcaagggagagttattaatgtctccagtgttggaggtcgccttgcaatcgttggagggggctatactccatccaaatatgcagtggaaggtttcaatgacagcttaagacgggacatgaaagcttttggtgtgcacgtctcatgcattgaaccaggattgttcaaaacaaacttggcagatccagtaaaggtaattgaaaaaaaactcgccatttgggagcagctgtctccagacatcaaacaacaatatggagaaggttacattgaaaaaagtctagacaaactgaaaggcaataaatcctatgtgaacatggacctctctccggtggtagagtgcatggaccacgctctaacaagtctcttccctaagactcattatgccgctggaaaagatgccaaaattttctggatacctctgtctcacatgccagcagctttgcaagactttttattttgaaacagaaagcagagctggctaatcccaaggcagtgtgactcagctaaccacaaatgtctcctccaggctatgaaattggccgatttcaagaacacatctccttttcaaccccatccttatctgctccaacctggactcatttagatcgtgcttatttggattgcaaaagggagtcccaccatcgctggtggtatcccagggtccctgctcaagttttctttgaaaaggagggctggaatggtacatcacataggcaagtcctgccctgtatttaggctttgcctgcttggtgtgatgtaagggaaattgaaagacttgcccattcaaaatgatctttaccgtggcctgccccatgcttatggtccccagcatttacagtaacttgtgaatgttaagtatcatctcttatctaaatattaaaagataagtcaaacattaaaaaaaaaaaaaaaaaaaa

SEQ ID NO: 671 - DNA, 1721 bp, Homo sapiens
tgcaggaatttttacgctgtggcgcagtttacgctttggcgataatctccaggcatggctggagcagaacgcacgtctgccgggaaatgactgtccgcaaggaaaagagtgtgaggaaaaacaatgaaaattttactggctgcgttgacgtcatcttttatgctggttggctgtacgcctcgcattgaagtcgctgcacctaaggaaccgatcactatcaatatgaacgttaaaattgagcatgagatcatcatcaaggcagacaaagatgtcgaagagctgcttgaaactcgtagcgatcttttctgaggtgatgatgaagaaaacattacttctttgtgcgtttcttgttgggctggtaagcagcaatgtaatggcattgactctggatgaagccagaactcaggggcgggtaggtgaaacattttacggttatctggttgcgctgaaaactggatgctgaaacagagaaattagtagccgacattaatgccgaacgtaaagcgagttaccaacaactggcaaagcaaaataatgtgtcggtagatgatatcgcgaaactcgccgggcaaaagctcgtagctcgggccaaaccgggggaatatgtacaagggataaacggtaaatgggtgcgaaaattttaatagcaaaaccgcaatatcgggataacgctacaggagaaggcgattgatctattttcctgaaacaaggtgaatattcaaaaactcctgtcaaattgccttttgccctgaaaaatgcatagtcaaatatctgttttaactaattggcgttgcagtacatgcaacgccaattagttagcggaatttacgtcgatactcgcctggcgtcatcccaaagcgttgcttaaataccgttgaaaaatgactctggtcagaaaatccccaatgaaagccgatgcctgccagtttttcatcatctgcggcatggcgaatcgcatctgcacaaaaatcgagacgacggttacgaatatattgcgcgactaccaaacctttatcggcaaacattcggtacaaactacgtactgacatacctgtctctccggctatccactccgggcgtaatatctcttcgcgaatattatcgtctatcaacgtaaccactttttgaaactgacgttcacgacgaggttgaacagattcccgctgatgaagtaccgggcgcagcagacacaccatcgcctgtagcgcagcttcactttctgtttcagaaagtgccggattattcatgctctcctgtaacaggcgatgactgagttgcaccatgggtaagtcagcgtccagtctttctgcgcagataggtttttgatggggaaaatattgttccagcagagtgcgtggcaaaagtaatgaaatctgtttagaagactcctgccagtaaagcgaacaggggcgtgaggcatcgagtaacgtaatatcgccagcgccaatctgcacctgacgctcatcctgctccattattgcctgaccactaagctgaaaaacggtgtaaaaccaggcatcgtcgctgccttttacttcctgccaggtgcgggataaattcaccccgctggttgtcacggtactcagctttagtcctttggcaaaatgcgtgtccagtacacccgtgtaacgctcagtcagcaggcgtccggtaaaatttccgcatacctgattgatttgggaaagccattgctgaaactcattatccactgcgggggcccg

SEQ ID NO: 672 - DNA, 1105 bp, Homo sapiens; identical to SEQ ID NO: 656

SEQ ID NO: 673 - DNA, 910 bp, Homo sapiens
agcaggtgggaagtgggagccggagcggcagctggcagcgttctctccgcagtcggcaccatgcgccctgcagccctgcgcggggccctgctgggctgcctctgcctggcgttgctttgcctgggcggtgcggacaagcgcctgcgtgacaaccatgagtggaaaaaactaattatggttcagcactggcctgagacagtatgcgagaaaattcaaaacgactgtagagaccctccggattactggacaatacatggactatggcccgataaaagtgaaggatgtaatagatcgtggcccttcaatttagaagagattaaggatcttttgccagaaatgagggcatactggcctgacgtaattcactcgtttcccaatcgcagccgcttctggaagcatgagtgggaaaagcatgggacctgcgccgcccaggtggatgcgctcaactcccagaagaagtactttggcagaagcctggaactctacagggagctggacctcaacagtgtgcttctaaaattggggataaaaccatccatcaattactaccaagttgcagattttaaagatgctgccagagtatatggagtgatacccaaaatccagtgccttccaccaagccaggatgaggaagtacagacaattggtcagatagaactgtgcctcactaagcaagaccagcagctgcaaaactgcaccgagccgggggagcagctcccccaagcaggaatttggttggcaaatgggcccgccgagagccgggttttgagagtctgtgaagatggcccagtcttctatcccccacttaaaaagaccaagcattgatgcccaagttttggaaatattcctgttttaaaagcaagagaaattcacaaactgcagctttctaaaaaacacataaattaaaaaa

SEQ ID NO: 674 - DNA, 811 bp, Homo sapiens
  misc_feature (807)..(807): n equals a,t,g, or c
aaatccccgtgacactattcaaggtacgcccgcaggtaccggtccggaattcccgggtcgacccacgcgttttctccgcgggcgcctcgggcggaacctggagataatgggcagcacctgggggagccctggctgggtgcggctcgctctttgcctgacgggcttagtgctctcgctctacgcgctgcacgtgaaggcggcgcgcgcccgggaccgggattaccgcgcgctctgcgacgtgggcaccgccatcagctgttcgcgcgtcttctcctccaggttgcctgcggacacgctgggcctctgtcctgatgctgctgagctccctggtgtctctcgctggttctgtctacctggcctggatcctgttcttcgtgctctatgatttctgcattgtttgtatcaccacctatgctatcaacgtgagcctgatgtggctcagtttccggaaggtccaagaaccccagggcaaggctaagaggcactgagccctcaacccaagccaggctgacctcatctgctttgctttggcatgtgagccttgcctaagggggcatatctgggtccctagaaggccctagatgtggggcttctagattaccccctcctcctgccatacccrcacatgacaatggaccaaatgtgccacacgctcgctcttttttacacccagtgcctctgactctgtccccatgggctggtctccaaagctctttccattgcccagggagggaaggttctgagcaataaagtttcttagatcaatcaaaaaaaaaaaaaagggsggccgtctaaagwtcccccgangggg

SEQ ID NO: 675 - DNA, 499 bp, Homo sapiens
cggcacggaggggaattccatgtttgcacagctcccatctccctggaaagaggaactgatgtttgaggggacagatgtgggtcactttccctggcagtgccctctagccttgctgccttggctttctgaccccttccaggcttcaggggcctgggagatctcatgcctcagcccaggaaacatttaatagggaaagcagagacatgtcatgtcagccccacagacaagaatttctagagcacttgtcctgttgttccttgccccgacattactcagtctgggccatggaatccatccaataaacacagcaacaccctatgctactgaccaagcaaagcttgcccctggtaccaaagagctaaatcatgaccaaagtgtgacatgaatgtaactgaaatgcgggttagttgctcaatgtatgcaaagtcccacggacaagagtaaagtctgataccaataaagtggaatgtattccaaagctaaaaaaaaaaaaaaaaaa

SEQ ID NO: 676 - DNA, 1867 bp, Homo sapiens
  misc_feature (1)..(1): n equals a,t,g, or c
ngcggcagatcttccagtccctgccgcccttcatggacatcctcctgctgctgctgttcttcatgatcatctttgccatcctcggtttctacttgttctcccctaacccttcagacccctacttcagcaccctggagaacagcatcgtcagtctgtttgtccttctgaccacagccaatttcccagatgtgatgatgccctcctactcccggaacccctggtcctgcgtcttcttcatcgtgtacctctccatcgagctgtatttcatcatgaacctgcttctggctgtggtgttcgacaccttcaatgacattgagaaacgcaagttcaagtctttgctactgcacaagcgaaccgctatccagcatgcctaccgcctgctcatcagccagaggaggcctgccggcatctcctacaggcagtttgaaggcctcatgcgcttctacaagccccggatgagtgccagggagcgctatcttaccttcaaggccctgaatcagaacaacacacccctgctcagcctaaaggacttttacgatatctacgaagttgctgctttgaagtggaaggccaagaaaaacagagagcactggtttgatgagcttcccaggacggcgctcctcatcttcaaaggtattaatatccttgtgaagtccaaggccttccagtatttcatgtacttggtggtggcagtcaacggggtctggatcctcgtggagacatttatgctgaaaggtgggaacttcttctccaagcacgtgccctggagttacctcgtctttctaactatctatggggtggagctgttcctgaaggttgccggcctgggccctgtggagtacttgtcttccggatggaacttgtttgacttctccgtgacagtgttcgccttcctgggactgctggcgctggccctcaacatggagcccttctatttcatcgtggtcctgcgccccctccagctgctgaggttgtttaagttgaaggagcgctaccgcaacgtgctggacaccatgttcgagctgctgccccggatggccagcctgggcctcaccctgctcatcttttactactccttcgccatcgtgggcatggagttcttctgcgggatcgtcttccccaactgctgcaacacgagtacagtggcagatgcctaccgctggcgcaaccacaccgtgggcaacaggaccgtggtggaggaaggctactattatctcaataattttgacaacatcctcaacagctttgtgaccctgtttgagctcacagttgtcaacaactggtacatcatcatggaaggcgtcacctctcagacctcccactggagccgcctctacttcatgaccttttacattgtgaccatggtggtgatgacgatcattgtcgcctttatcctcgaggccttcgtcttccgaatgaactacagccgcaagaaccaggactcggaagttgatggtggcatcacccttgagaaggaaatctccaaagaagagctggttgccgtcctggagctctaccgggaggcacggggggcctcctcggatgtcaccaggctgctggagaccctctcccagatggagagataccagcaacattccatggtgtttctgggacggcgatcaaggaccaagagcgacctgagcctgaagatgtaccaggaggagatccaggagtggtatgaggagcatgccagggagcaagagcagcagcgacaactcagcagcagtgcagcccccgccgcccagcagcccccaggcagccgccagcgctcccagaccgttacctagcccagcgcccgaaagccgtctcttctatgcaataacacaatagtattactctaaaaaaaaaaaaaaaaaaaaaactcgag

SEQ ID NO: 677 - DNA, 1068 bp, Homo sapiens
ggacctctagagcaagatgtcagtaggatgacctccaccctccttggacatgaatcctccatggagggcctgctggctgaacatgctgaatcatctccaacaaaacccagccccaactttctctctgatgctccagcattggggcaggggcatggtggcccatgtagtctcctgggcctcaccatcccagaagaggagtgggagccagctcagagaaggaactgaacccaggagatccatccacctattagccctgggcctggacctccctgcgatttcccactcctttcttagtcttcttccagaaacagagaaggggatgtgtgcctgggagaggctctgtctccttcctgctgccaggacctgtgcctagacttagcatgcccttcactgcagtgtcaggcctttagatgggacccagcgaaaatgtggcccttctgagtcacatcaccgacactgagcagtggaaaggggctatatgtgtatgaatagaccacattgaaggagcacaatgccctcctgtgttgatgccacttcccagggtggagacagtggaaaagaaccgaggacaggaaaggattgggtaggtgaaggggtcaggggactggtagtcacccaatcttggagaggtgcaaaaagcactgggggctacccgttagctgcatctgccctggctgtttgcccgttcatgtcacaaactgccactactatgtacctgcagtggggttgcagagatgggggagactcaagtcttactccccaggagctcccagggcccaaggaggagaatgctgcctcctttcagtctggtctacacccactttctggtagcctctctgcttcctgtaattctggctgtttttccagactcagctcaaatagtgcccctccttaagcccatccctcgcccccagcctgaggtgatctttccctcctctgaactattagagcagttactgtctgttcagttcgtttggcaggcacacacagtggcataaattctattgttttgaactctgatttaaaattaaattgcagctgagcgtggtggctcatgcttgtaatccc

SEQ ID NO: 678 - DNA, 930 bp, Homo sapiens
ggcacgagatttttcggtcaccctgaagtttatattcttatcctaccaggcttcggaataatctcccatattgtaacttactactccggaaaaaaagaaccatttggatacataggtatggtctgagctatgatatcaattggcttcctagggtttatcgtgtgagcacaccatatatttacagtaggaatagacgtagacacacgagcatatttcacctccgctaccataatcatcgctatccccaccggcgtcaaagtatttagctgactcgccacactccacggaagcaatatgaaatgatctgctgcagtgctctgagccctaggattcatctttcttttcaccgtaggtggcctgactggcattgtattagcaaactcatcactagacatcgtactacacgacacgtactacgttgtagctcacttccactatgtcctatcaataggagctgtatttgccatcataggaggcttcattcactgatttcccctattctcaggctacaccctagaccaaacctacgccaaaatccatttcactatcatattcatcggtgtaaatctaactttcttcccacaacactttctcggcctatccggaatgccccgacgttactcggactaccccgatgcatacaccacatgaaacatcctatcatctgtaggctcattcatttctctaacagcagtaatattaataattttcatgatttgagaagccttcgcttcgaagcgaaaagtcctaatagtagaagaaccctccataaacctggagtgactatatggatgccccccaccctaccacacattcgaagaacccgtatacataaaatctagacaaaaaaggaaggaatcgaaccccccaaagctggtttcaagccaaccccatggcctccatgactttttcaaaaaaaaaaaaaaaaaa

SEQ ID NO: 679 - DNA, 3701 bp, Homo sapiens
  misc_feature (1)..(1): n equals a,t,g, or c
  misc_feature (15)..(15): n equals a,t,g, or c
  misc_feature (24)..(24): n equals a,t,g, or c
nggattcgcggccgntccgactgnccgccggggctagcactgacgtgtctctcggcggagctgctgtgcagtggaacgcgctgggccgcgggcagcgtcgcctcacgcggagcagagctgagctgaagcgggacccggagcccgagcagccgccgccatggcaatcaaatttctggaagtcatcaagcccttctgtgtcatcctgccggaaattcagaagccagagaggaagattcagtttaaggagaaagtgctgtggaccgctatcaccctctttatcttcttagtgtgctgccagattcccctgtttgggatcatgtcttcagattcagctgaccctttctattggatgagagtgattctagcctctaacagaggcacattgatggagctagggatctctcctattgtcacgtctggccttataatgcaactcttggctggcgccaagataattgaagttggtgacaccccaaaagaccgagctctcttcaacggagcccaaaagttatttggcatgatcattactatcggccagtctatcgtgtatgtgatgaccgggatgtatggggacccttctgaaatgggtgctggaatttgcctgctaatcaccattcagctctttgttgctggcttaattgtcctacttttggatgaactcctgcaaaaaggatatggccttggctctggtatttctctcttcattgcaactaacatctgtgaaaccatcgtatggaaggcattcagccccactactgtcaacactggccgaggaatggaatttgaaggtgctatcatcgcacttttccatctgctggccacacgcacagacaaggtccgagcccttcgggaggcgttctaccgccagaatcttcccaacctcatgaatctcatcgccaccatctttgtctttgcagtggtcatctatttccagggcttccgagtggacctgccaatcaagtcggcccgctaccgtggccagtacaacacctatcccatcaagctcttctatacgtccaacatccccatcatcctgcagtctgccctggtgtccaacctttatgtcatctcccaaatgctctcagctcgcttcagtggcaacttgctggtcagcctgctgggcacctggtcggacacgtcttctgggggcccagcacgtgcttatccagttggtggcctttgctattacctgtcccctccagaatcttttggctccgtgttagaagacccggtccatgcagttgtatacatagtgttcatgctgggctcctgtgcattcttctccaaaacgtggattgaggtctcaggttcctctgccaaagatgttgcaaagcagctgaaggagcagcagatggtgatgagaggccaccgagagacctccatggtccatgaactcaaccggtacatccccacagccgcggcctttggtgggctgtgcatcggggccctctcggtcctggctgacttcctaggcgccattgggtctggaaccgggatcctgctcgcagtcacaatcatctaccagtactttgagatcttcgttaaggagcaaagcgaggttggcagcatgggggccctgctcttctgagcccgtctcccggacaggttgaggaagctgctccagaagcgcctcggaaggggagctctcatcatggcgcgtgctgctgcggcatatggacttttaataatgtttttgaatttcgtattctttcattccactgtgtaaagtgctagacattttccaatttaaaattttgctttttatcctggcactggcaaaaagaactgtgaaagtgaaattttattcagccgactgccagagaagtgggaatggtataggattgtccccaagtgtccatgtaacttttgttttaacctttgcaccttctcagtgctgtatgcggctgcagccgtctcacctgtttccccacaaagggaatttctcactctggttggaagcacaaacactgaaatgtctacgtttcattttggcagtagggtgtgaagctgggagcagatcatgtatttcccggagacgtgggaccttgctggcatgtctccttcacaatcaggcgtgggaatatctggcttaggactgtttctctctaagacaccattgttttcccttattttaaaagtgatttttttaaggacagaacttcttccaaaagagagggatggctttcccagaagacactcctggccatctgtggatttgtctgtgcacctattggctcttctagctgactcttctggttgggcttagagtctgcctgtttctgctagctccgtgtttagtccacttgggtcatcagctctgccaagctgagcctggccaagctaggtggacagacccttgcagtgatgtccgtttgtccagattctgccagtcatcactggacacgtctcctcgcagctgccctagcaaggggagacattgtggtagctatcagacatggacagaaactgacttagtgctcacaagcccctacaccttctgggctgaagatcacccagctgtgttcagaattttcttactgtgcttaggactgcacgcaagtgagcagacaccaccgacttcctttctgcgtcaccagtgtcgtcagcagagagaggacagcacaggctcaaggttggtagtgaagtcaggttcggggtgcatgggctgtggtggtgttgatcagttgctccagtgtttgaaataagaagactcatgtttatgtctggaataagttctgtttgtgctgacaggtggcctaggtcctggagatgagcaccctctctctggcctttagggagtcccctcttaggacaggcactgcccagcagcaagggcagcagagttgggtgctaagatcctgaggagctcgaggtttcgagctggctttagacattggtgggaccaaggatgttttgcaggatgccctgatcctaagaagggggcctgggggtgcgtgcagcctgtcggggagaccccactctgacagtgggcacacggcagcctgcaaagcacagggccaccgccacagcccggcagaggggcacactctggagaccttgctggcagtgctagccaggaaacagagtgaccaagggacaagaagggacttgcctaaagccacccagcaactcagcagcagaaccaagatgggccccaggctcctccatatggcccagggcttaccaccctatcacacgtggccttgtctagacccagtcctgagcaggggagaggctcttgagacctgatgccctcctacccacatggttctcccactgccctgtctgctctgctgctacagaggggcagggcctcccccagcccacgcttaggaatgcttggcctctggcaggcaggcagctgtacccaagctggtgggcagggggctggaaggcaccaggcctcaggaggagccccatagtcccgcctgcagcctgtaaccatcggctgggccctgcaaggcccacactcacgccctgtgggtgatggtcacggtgggtgggtgggggctgaccccagcttccaggggactgtcactgtggacgccaaaatggcataactgagataaggtgaataagtgacaaataaagccagttttttacaaggtaaaaaaaaaaaaaaaaaaagggcggccgctctagaggatccaagcttacgtacgcgtgcatgcgacgtcatagctcttctatagtgtcaccta

SEQ ID NO: 680 - DNA, 1360 bp, Homo sapiens
ggcacgagcagctgctcgtgatgctgaaataggataatcgcttgaatccaggagggtgagattgcagtgagcagagatcgtgtcactgcactccagtctgggcgacagagggagactccatcccccagaagtagtatatccagagctgaaaatcaaatatgtctctcttcacaccagatgccttatcaaatgttgctaaataaaaccatttttatagattttatagttgtttctctttctagatgttgtgcttttcttcttgctataaatatctgtgtgctggtcatagagacaaagcaacaagctagtgtttccttctcacatgtaaagaaactttaattggtgtcagattgtgagcaaatttaaagcgcaagtgatagctgggcatggtggcacatgcctgtaacctcagccggagactgcggttgtcattgatcaattgaagaagcaaggacccgaaatcacagacattagcaatgatgtgtgaagtgatgcccacgattaatgaggacaccccaatgagccaaagggggtcccaaagcagtggctcggactcagactcccattttgagcagctgatggtgaatatgctagatgaaagggatcgtcttctagacacccttcgggagacccaggaaagcctctcacttgcccagcaaagacttcaggatgtcatctatgaccgagactcactccagagacagctcaattcagccctgccacaggatatcgaatccctaacaggagggctggctggttctaagggggctgatccaccggaatttgctgcactgacaaaagaattaaatgcctgcagggaacaacttctagaaaaggaagaagaaatctctgaacttaaagctgaaagaaacaacacaagagtaagtgtaaagcagcctttttggaattaattctatttgtagttcaatgcattacatgtaacacacatataagaagaaaatatatgcattttaaaactttataattactttaagcagatagtaactcagttacttaaagtaaaggaggatatactataaaactcaaaacaaaaagacaggaaacctaaattatagtcacagctactaaatcactatgttgctttacaaaatgttcacattccttctggcctttactttatttggctttaaaaagaagatctggatttcaataatgggtttcaaactttcaaaaggttgttttgggggtagggtaatccctcagaggttggaaatgggcaaaagaggagagttttggaaaagaggaagagtttaaattaagggctgctacaaaagagtggcctgggtttggttctcacctcctcccagcagaagatttttttaaaaaaaaaaaaaaaaaa

SEQ ID NO: 681 - DNA, 1346 bp, Homo sapiens
ggcacgagagagcttggggcttccttggtcgcacccaccacctgcctgcccactggtcagccttcagggaccctgagcaccgcctggtctctttcctgtggccagcccagaactgaagcgctgcggcatggcgcgcgcctgcctccaggccgtcaagtacctcatgttcgccttcaacctgctcttctggctgggaggctgtggcgtgctgggtgtcggcatctggctggccgccacacaggggagcttcgccacgctgtcctcttccttcccgtccctgtcggctgccaacctgctcatcatcaccggcgcctttgtcatggccatcggcttcgtgggctgcctgggtgccatcaaggagaacaagtgcctcctgctcactttcttcctgctgctgctgctggtgttcctgctggaggccaccatcgccatcctcttcttcgcctacacggacaagattgacaggtatgcccagcaagacctgaagaaaggcttgcacctgtacggcacgcagggcaacgtgggcctcaccaacgcctggagcatcatccagaccgacttccgctgctgtggcgtctccaactacactgactggttcgaggtgtacaacgccacgcgggtacctgactcctgctgcttggagttcagtgagagctgtgggctgcacgcccccggcacctggtggaaggcgccgtgctacgagacggtgaaggtgtggcttcaggagaacctgctggctgtgggcatctttgggctgtgcacggcgctggtgcagatcctgggcctgaccttcgccatgaccatgtactgccaagtggtcaaggcagacacctactgcgcgtaggccgcccaccgcccgcttctctgccaaaaggacgcccacggggagatggccgcacccacagctgcctttcccaccaccagcctcggtgctctgccccatgctgggaggagggagggagggacaggtgcctggagcccccggaaccctgtttctggaaggccctagctcaggtggcttcagggcctccggaccccccctgggaggggtggccacgtgctggctgcggaacccagggcaggggtgggaggggcctccagcactttttatatttacgtattctccaaagcagtgttcacacgggagccagcctgtggcccccagcctcctggaaaacaggttggcgctggaggagccgggtcttggcatcctggaggtggccccactggtcctggtgctccaggcggggccgtggacccctcacctacattccatagtgggcccgtggggctcctggtgcatcttaataaagtgtgagcagcaaaaaaaaaaaaaaaaaaaaaaa

SEQ ID NO: 682 - DNA, 2724 bp, Homo sapiens
ggcacgagcccatctcaagatcattatctgcaaagtcctttaaaaaaaaatgtataaggcggcattcacagcttctagggattaggatgtgggtgtcttttgggggatcattatttagcctatcacagctattattatattactactagcactgcccctctttaccaaagaggtaacaagagcaggcctggagagagggaggttgggtttgctgctctttttcttaaattctctgcctggaagggagtgaaggtcctggaggtcacctgatctagttggactccttgcccaggcttgcttccctcctctacttcaacccagaaaggctgatgtggtcggccttccccccagtaacttagaccagtatgaagaggggccctcggaggcttcagagaacaggcatttaacttcatttttgagagttgagaagaaagagcaagggcatcgggcttagctcatcagaagcttctctcttgagctttatgcctggagggctgagcataatgaaaatccaaagccccaaagagcagtgatggtctcctgggtctagaagacttggatgtgatgctttaagaaggggtaagatggttgtctcaaacctggcccttttgacagactgacattagccagggctgacagctctaggcccttttgacagagtgacagcagccagggctgacagctctagtttcccctatgggtgtaactgggtctggtggtgtgcggcagcaagaaggggcactcaggccaggctcttggtgggctggcagagagggttgaggccagcaaggctggatcccacccagcccgtgctgggctgcactgtgctgtggtcttgcaaaagtcacttagtcccctcagggccatgctgttgccctctgaggggaacgcaattaatgactgcatgcttgttaagtgcttgacagagctaagaggaccagagggctgcagggctggctcaagcagggtgacctcagggtgtgctctctctagctcattactccctggagctgggctaggttttttccattccactatatgaacttcagtccaacttagacactgctataggagaatttgcctcatggaggactgagaagtggcgatttcacggtgtgtgtgtgcgtgtgcgctcgtgtgcaagtccaagttaaggaggtgttcgggaggcatcaggaaggaaacctttcaaaggtcaaaatggccaatcgcttccttttttctatgcccactagcacttccctgttttaagggttctaaaaataagggtccagcttccttgaggctagtgaggttggttggaaggaaaagaaagaatgtattgggggcaaagacctgaggaagaggagacctcacaggccaggagagggtctgagcctaacaccggagaagatgggacaggactcagatcagagccatcactttgcacagccagatccgatgtcagagcactgtcatccccctgctgacctctggtttctggggagacaggctctcatctcttctgtagcttggggctgatgctgggccttggagcaagtcactgaataattgaattggaggaatccttgctgatacaaccctgatgagtttttttattatttttattttttgaggctgctggtggctagaactttgtctacaacaaatggctttttaatgtttccagtgattaagagataatagtcttgggaaggacactgtggcaggggtcaaaggtcctaaggtctggtctagcttctgaatgatatctgcaccttttaggtcttctatttaacctcttttccttaatatcttcaccagcttctgtgcgtggcaagacctgtcatgtgtcacgggcctttccaaagacaaaatgagataacagacagaaaagaacttgggaaagttaaagataggatcaggatgcaagatgtgattggggcattattgtgttggattgcaagaagggagaggaggtgagatggtggttgaggtgtctggcgaggatttacgtgtattattggattgtcctttttttttctactgagaatatttgaacaatgccaaattaaagagcaaggcagtggcagaaggaaagagctggaatgagcgcttttgacttggctttggacagtaagctgtgttagctatgcctcactgcccaaagataaaagcagctccaagttggctgcatgaggagttgagaagcggcatgtggagcccatgaattaaagtatctggtttccctggctttttccagcttacctgttggttgacattggatcctctgagaacacttggccaacccaacatctctgaaatgtagctgactctggcgtgggggctgcagctgctttcccagccttggatagacagaaagaggaaaaactggaacccacctggagctgaagggctcttataggtgggcagggcaaggaagtctctaatctacctgctgtgactgtgcacccacataacacgcccttctatctgtgttattatacactgtaaaaattgctcttatgtgtattagataccccacagcagtcttgtgaggtaaagcacacaacatatgctttgttttaagatgagactggaggcttagaggagttcaggacgtgtctagagtcacacagttggtatgcagggactgcattgccataagagcctcaggctaaactgcaagtctcctgaactttccaggctacacgaggtcctggttccaaaaaaaaaaaaaaaaaa

SEQ ID NO: 683 - DNA, 3049 bp, Homo sapiens
ctgcaggaattcggcacgagtgcttgtacttgtgaacaccagagtttcctgcaatggatcaaggaccagaggcagctcttggtggaagttgaacgaatggaatgtgcaacaccttcagataagcagggcatgcctgtgctgagtttgaatatcacctgtcagatgaataagaccatcattggtgtgtcggtcctcagtgtgcttgtagtatctgttgtagcagttctggtctataagttctattttcacctgatgcttcttgctggctgcataaagtatggtagaggtgaaaacatctatgatgcctttgttatctactcaagccaggatgaggactgggtaaggaatgagctagtaaagaatttagaagaaggggtgcctccatttcagctctgccttcactacagagactttattcccggtgtggccattgctgccaacatcatccatgaaggtttccataaaagccgaaaggtgattgttgtggtgtcccagcacttcatccagagccgctggtgtatctttgaatatgagattgctcagacctggcagtttctgagcagtcgtgctggtatcatcttcattgtcctgcagaaggtggagaagaccctgctcaggcagcaggtggagctgtaccgccttctcagcaggaacacttacctggagtgggaggacagtgtcctggggcggcacatcttctggagacgactcagaaaagccctgctggatggtaaatcatggaatccagaaggaacagtgggtacaggatgcaattggcaggaagcaacatctatctgaagaggaaaaataaaaacctcctgaggcatttcttgcccagctgggtccaacacttgttcagttaataagtattaaatgctgccacatgtcaggccttatgctaagggtgagtaattccatggtgcactagatatgcagggctgctaatctcaaggagcttccagtgcagagggaataaatgctagactaaaatacagagtcttccaggtgggcatttcaaccaactcagtcaaggaacccatgacaaagaaagtcatttcaactcttacctcatcaagttgaataaagacagagaaaacagaaagagacattgttcttttcctgagtcttttgaatggaaattgtattatgttatagccatcataaaaccattttggtagttttgactgaactgggtgttcactttttcctttttgattgaatacaatttaaattctacttgatgactgcagtcgtcaaggggctcctgatgcaagatgccccttccattttaagtctgtctccttacagaggttaaagtctagtggctaattcctaaggaaacctgattaacacatgctcacaaccatcctggtcattctcgagcatgttctattttttaactaatcacccctgatatatttttatttttatatatccagttttcatttttttacgtcttgcctataagctaatatcataaataaggttgtttaagacgtgcttcaaatatccatattaaccactatttttcaaggaagtatggaaaagtacactctgtcactttgtcactcgatgtcattccaaagttattgcctactaagtaatgactgtcatgaaagcagcattgaaataatttgtttaaagggggcactcttttaaacgggaagaaaatttccgcttcctggtcttatcatggacaatttgggctagaggcaggaaggaagtgggatgacctcaggaggtcaccttttcttgattccagaaacatatgggctgataaacccggggtgacctcatgaaatgagttgcagcagaagtttatttttttcagaacaagtgatgtttgatggacctctgaatctctttagggagacacagatggctgggatccctcccctgtacccttctcactgycaggagaactacgtgtgaaggtattcaaggcagggagtatacattgctgtttcctgttgggcaatgctccttgaccacattttgggaagagtssatgttatcattgagaaaacaatgtgtctggaattaatggggttcttataaagaaggttcccagaaaagaatgttcatccagcctcctcagaaacagaacattcaagaaaaggacaatcaggatgtcatcagggaaatgaaaataaaaaccacaatgagatatcaccttataccaggtagaatggctactataaaaaaatgaagtgtcatcaaggatatagagaaattggaacccttcttcactgctggagggaatggaaaatggtgtagccgttatgaaaaacagtacggaggtttctcaaaaattaaaaatagaactgctatatgatccagcaatctcacttctgtatatatacccaaaataattgaaatcagaatttcaagaaaatatttacactcccatgttcattgtggcactcttcacaatcactgtttccaaagttatggaaacaacccaaatttccattgaaaaataaatggacaaagaaaatgtgcatatacgtacaatgggatattattcagcctaaaaaaagggggaatcctgttatttatgacaacatgaataaacccggaggccattatgctatgtaaaatgagcaagtaacagaaagacaaatactgcctgatttcatttatatgaggttctaaaatagtcaaactcatagaagcagagaatagaacagtggttcctagggaaaaggaggaagggagaaatgaggaaatagggagttgtctaattggtataaaattatagtatgcaagatgaattagctctaaagatcagctgtatagcagagttcgtataatgaacaatactgtattatgcacttaacattttgttaagagggtacctctcatgttaagtgttcttaccatatacatatacacaaggaagcttttggaggtgatggatatatttattaccttgattgtggtgatggtttgacaggtatgtgactatgtctaaactcatcaaattgtatacattaaatatatgcagttttataatatcaaaaaaaaaaaaaaaaaaagatctttaatt

SEQ ID NO: 684 - DNA, 553 bp, Homo sapiens; identical to SEQ ID NO: 441

SEQ ID NO: 685 - DNA, 2332 bp, Homo sapiens
  misc_feature (4)..(4): n equals a,t,g, or c
  misc_feature (2215)..(2215): n equals a,t,g, or c
  misc_feature (2279)..(2279): n equals a,t,g, or c
ccgntctagaattagtggatccccccgggctgcaggaattcggcacgagtgtcagtttatccatctcagcttcagccttgttctgtgccctcacaggagaactgttgcgatcatttggaggagaagaggcactctggcttttggaattttcaccgttttttcattgttttttcctcatcttcgtggatttatccacctttgatctttgagactgatgacctttgaatggggtttttgtggagtcttttttgtagatgttgttgttgttactttctgtttgtttgtttatcttctaacagtcagcctttctgaggcaagtctgctgcagtttgctggggatccactccagaccctgttcacatgggtatcaccagtggaggctgcagaacagcagattgctgcctgcttcttccttcagaagttttgccccagaggggcactggcctgatgccagccggaactcttctgtatgaggtgtctggtgacccttgttgggaagtctcacccagtcaggaggcatgggatcaaggacccgcttatgtagagaatctgacattcccttagcagagctggtgtgctgtgctgggggaatcccactcatcgggttcatctggtctcttcagagccagcaggcagaaaagataagtctgctgaacctgaaactgcctctcccctcaggttctctgactcagcgagatgagagttctgtctgtaagcccctgaccagagctgctggaattcttgcagggatgacctgcctggtgaggagggatggctcagggtcccacctaaagaggcagtctggccacaacctgccacagccagtttgctgcactgtgggaaatctggcccagtccaaacctctcaggctcctttgcactgtcaggggcaaaccgccaactaatggtggtcacccctccccccaggaacttagtcattccaggcacactccagactactctgctggcagcagggatctcaagccagtgggtcttagcttgcagggatccatgggagtagaacctactgattgagactgctgggctctcctccttggcttcagccccctttccatgggactggatggttctcgtgcctcactggagttccaggcaccactggagtatgtaaaaactcctgcagctcagtgcctgcctaaacagccaccaatggcagtggctgtcattggtttgcccaggtttgtgcttgaracccagggccctggtggtgtaggctcatgagggaatcttctgatctgcagattgcaaaaatctgtggragaagcatakacacctggtgggtaggacagaccytcgccayttcccttacctcaggraggcaagtctccccaccctgtgcagctcctgggtgaaatgacaccccacctgctttcttcctgcttcctgtgggttgcaccagctgcccaatgagatgaacttggtacctcagatggagatgcagaattcacctgccttccgcattcatctcactgggagcttcagaccagagctgtttctgtttggccattttggcccctcccttcaagtatgttttcttttgtaagaaactgccaaagtggctgtagcatttcgctttcttaccagtaatgcatgagacttctggttgctccacrkccttgctagtawwtgatattgtttatgttttaatgtaacacttaagtaatatgtaatgatatctcattattttaacttgcaattctcaaaagacatatgatattaataatttgtcttttcattattttgattatgtcttttgcaggttgaaagttwttagttttaatgaagtccagtttatcagttctttctttcatggattgtgcctttggtattatatttaaaaagtcatcaccatacccaagttatctaggctttctcttatattatcttctacgagttttacagttttgtgttttacctttaggactatgatacattttgagtcattttggggaaaaatgtaaaatctgggcctagattcatttatttgtatgtgggtgtctagttattcagcatcgttagttgaaaagactgtcttttcttaattgtattgctttgcttgtttatgaaagatcagttgactatatttatctgggtctatttctttttagtctgctactctgctttctatcctttttcattaatttatttgtctattcctttttttttttttttttttaagagacggagtctcactntcttgcccaggccggagtgcagtgagccgagaccgtgccactgcactccagcctgggcaacacnagcgagactccgtctcgagggggggcccggtacccaattcgccctatagtgag

SEQ ID NO: 686 - DNA, 1707 bp, Homo sapiens
ggcacgagctggagtcggagttgtaacgctccactgactgatagagcgaccggccgaccatggcgcccggagtggcccgcgggccgacgccgtactggaggttgcgcctcggtggcgccgcgctgctcctgctgctcatcccggtggccgccgcgcaggagcctcccggagctgcttgttctcagaacacaaacaaaacctgtgaagagtgcctgaagaacgtctcctgtctttggtgcaacactaacaaggcttgtctggactacccagttacaagcgtcttgccaccggcttccctttgtaaattgagctctgcacgctggggagtttgttgggtgaactttgaggcgctgatcatcaccatgtcggtagtcgggggaaccctcctcctgggcattgccatctgctgctgctgctgctgcaggaggaagaggagccggaagccggacaggagtgaggagaaggccatgcgtgagcgggaggagaggcggatacggcaggaggaacggagagcagagatgaagacaagacatgatgaaatcagaaaaaaatatggcctgtttaaagaagaaaacccgtatgctagatttgaaaacaactaaagcgctccagcacatcagtcccgacgcttcctgtgaggtgcacgctccgcagcccagcccagccgggagaccacgtggccattgcggtctcctgaccttggccagtgaacctgccagccttccagacaggcggccggagagctgcccctgaaggacagtcctctcgtcttgcagactggtgaccttctattccctgttcatctctgtttctagatttagtcacttgaaataaaaatctttggggtttgggcttttttatactcttctcagtttgtgaaacgctaactgcacacgaaccgcctgacggcacccagcgctgtggctgtcattctcccagggcagaaccctgcgtttctctctgtccactaacaagcttcacacgcaacacagggaagtcggtttgacttttgtcatgaggagaactgaccagccctcatcattccccataaaaccacggacagcgtctgtgtgcgcatcttgagtcttcacacctgttgactcacacggcttttgctgatgacacggggctccagtacacagtctgataaggacttaacgtccttaacctcaattgtattaaatagcattggggaatagctaaacctttttaaaaaaatttattggattttcctccctgcttaaaagatttcaccagaaaaccttcatataaaaattcaggccctttttggacaatttttaaaatttgtatctttactagaacatgagaatctttttcccttggaagcttgaattataaatgtggtgtttggcctgcctcagcagcaccagttgactgctcgtgtgccagcggtgtggggaggacggggcaggaacgctgcagctctctccagccctgttggcatcctcagtgcctgcaggcctctcgctgcctgttgggctgtctggggggtggccatttagggatcgtggggacggggtccaccccaagaagaaagaaaggcccgtccacaggcccggctctgggccacgtgccccggaagccaggtgtgtgccagagtgcagctgagggctctccccacaccacccagcaggcgctggtgctccttctgcctcatgggaccagtccagcttccagccgctctgg

SEQ ID NO: 687 - DNA, 811 bp, Homo sapiens; identical to SEQ ID NO: 674
  misc_feature (807)..(807): n equals a,t,g, or c

SEQ ID NO: 688 - DNA, 2563 bp, Homo sapiens
cggcacgagccgcctgaagcttctcaactcaagccagacaggcagcaattccagagtcgaaagaggccttatgaagaaaaccggggacgggggtactttgagcaccgagaggataggaggggccgctctcctcagcctcctgctgaagaggatgaagatgactttgatgatacccttgttgctattgacacctataactgcgacctccacttcaagtggcccgagatcggactagtggctatccgctcacaattgagggctttgcatacctgtggtcaggagcccgtgccagctatggggtcagaaggggccgtgtatgcttcgagatgaagatcaatgaggaaatctccgtgaagcaccttccgtctacagagcctgacccccacgtggtccgtatcggctggtccctggactcctgcagcacccagctaggcgaagacctttctcctatggctatggagcactgggaagaatccaccaatagccggtttgaaaactacgagacaagtttgcagagaacgatgtgattggctgctttgcggattttgaatgtggaaatgacgtggaactgtcttttaccaagaatggaaagtggatgggcattgctttccgaatccagaaggaagccttggggggtcaggccctctatcctcatgtcctggtgaagaattgcgcagtggagttcaacttcggacagagagcagagccctactgttctgtcctcccggggtttaccttcatccagcaccttccccttagtgagcgtatccggggcaccgttggaccaaagagcaaggcagaatgtgagattctgatgatggtgggcctgcctgctgctggcaagaccacatgggccatcaaacatgcagcctccaacccttcccaagaagtacaacatcctgggtaccaatgccatcatggataagatgcgggtgatgggcctacgccggcagcggaactatgctggccgctgggatgtcctgatccagcaggccacccagtgcctcaaccgcctcatccagattgctgcccgcaagaaacgcaactatatcctagatcagacaaatgtttatgggtcagcccagagacgaaaaatgagaccatttgaagcttccagcgcaaagctattgtaatttgtcccactgacgaggacctaaaagaccgaacaataaagcgaaccgacgaggaagggaaggatgtcccagatcatgcggtcttagaaatgaaagccaacttcacgttgccagatgttggggacttcctggatgaggttctgttcattgagctgcagcgggaggaagcggacaagctagtgaggcagtacaacgaggaaggccgcaaggctgggccaccccctgaaaagcgctttgacaaccgaggtggtggtggcttccggggccgcgggggtggtggtggcttccagccctatgaaaaccgaggaccccctggaggcaaccgtggcggcttccaaaccgaggggagcacggtggaggagcaactaccgaggaggtttcaaccgcagcggaggtggtggctatagccagaaccgctggggtaacaacaaccgggataacaacaactccaacaacagaggcagctacaaccgggctccccagcaacagccgccaccacagcagcctccgccaccacagccaccaccccagcagccaccgccaccacccagctacagccctgctcggaaccccccaggggccagcacctacaataagaacagcaacatccctggctcaagcgccaataccagcacccccaccgtcagcagctacagccctccacagccgagttacaggcagccaccctacaaccagggaggttacagccagggctacacagccccaccgctccacctccaccaccacctgcctacaactatgggagctacggcggttacaacccggccccctataccccaccggcaccccccaccggacagacctaccctcagcccagctataaccagtatcagcagtatgcccagcagtggaaccagtactatcagaaccagggccagtggccgccatactacgggaattaggatacgggagttattccggggaaaacaaagggtggcacaagtacacagtagccagtgtgacccagaggtcccggaggccctgcggttcttcaccagcgctgctggcccttcttctgcccccgccagatcccgtggtgctggggatggggtcatcccagggctgctcctccagcccactgcttcccttgaggggcttccttcccctccatagggccaggcattttttttggattcaaacaggcaacaatgaccttttattttctgtttgtccccactccccagccttccacctcctgttcttcctaccttcttcctttttgactaaataatccccacctcccttgatcatacagtgaggctacagtgactgaggggagaatcccctcctgttcactctcccaaccctgctccagcccctcaggttcccagacccttcaagcagttggttgtaaattttcccaggagctgttttactgtttaattttcagggaaaaaaaaaaaaaaaaa

SEQ ID NO: 689 - DNA, 1960 bp, Homo sapiens
ggcacgagaaggcaggtaaagtgaggaaacatgcaactgaacaggaaaaaactgaagagggattaggccctaatataaaaagcattgtcaccatgttgatgctgatgctattgatgatgtttgctgtccactgtacctgggtcacaagcaatgcctactctagtccaagtgtagtcctggcctcatacaatcatgatggcaccaggaatatcttagatgattttagagaagcttacttttggctaaggcaaaatacagatgaacatgcacgagtaatgtcttggtgggattatggctatcagatagctggaatggctaatagaactacgttggtggataataacacctggaataacagccacatagcactggtgggaaaagctatgtcttctaatgaaacagcagcctataaaatcatgaggactctagatgtagattatgttttggttatttttggaggggttattggctattctggtgatgatatcaacaaatttctctggatggttaggatactgaaggaaacatcccaaaacattcgggaaattgactattttaccccacagggagaattccgtgtagacaaagcaggatcccctactttgttgaattgccttatgtataaaatgtcatactacagatttggagaaatgcagctggattttcgtacacccccaggttttgaccgaacacgtaatgctgagattggaaataaggacattaaattcaaacatttggaagaagcctttacatcagaacactggcttgttaggatatataaagtaaaagcacctgataacagggagacattagatcacaaacctcgagtcaccaacattttcccaaaacagaagtatttgtcaaagaagactaccaaaaggaagcgtggctacattaaaaataagctggtttttaagaaaggcaagaaaatatctaagaagactgtttaaatgcactgttctggttcctaacttgaagcagttgtccttgtgagaaccggtctttgcctttagctcatgtcgtgtttcacagcaaagagggtacagaaccatcactggtccaggttaatgtacaaaattttctggcaatgcctgattaaaaaaataaaattggcttgttgagaacagctgttttcgatttctaatgtgaagcaagacagagcactgctgtaaatgtctagcagcagattttttttttattggtacatattatccttcaaatctgagaatttggactaactgcaccaaagaaccctctaatttggtccctggcacatgcatacttgtcaatgtttttattcttttacaagacctgcattttatttgaattacccgaatagcaatatgtaaaatacaagtgccaaaatgtgatgagagcttcttgaaccggtaaactagtacaggtctgagaaagacatattagaagaatcattatacttccttgaattatatttattttcatgtttctctaatgcaaagaatgtttcatcaaatgtatattttctgttgcttactgtttgctctgagaagaagctgctgtttcaaagatggacctctgagtagctaattgattcaagtagtttttttatgttgacacattattactgctgttagctccgttttcaccaggtacttacagagcagatttcatacatcattcattcaagggctaaatttatattttttggaaatcatggcaactacacaggtgttgcttaccaggacggttttggtatcttagtactgaagttagcactatgtttacaggcaaaagattaaggaaaaaacccttaaagtgggaccggtatccaaagttccatttccgtggactccatccaaagtggaccaaaaggactggttaaccaaactttggccccgggactttttttccatttttaccaaccggttccacccattccaccaatggatttttgggtccccccggccccccaaaatttttt

SEQ ID NO: 690 - DNA, 2209 bp, Homo sapiens
ggcacgagcagcattggcccagatgtaactgacatcctttcagacattgcagaagaagcttctaaacttcccagcactagtgatgattgcccagccattggcacccctcttcgagattcttcaagctctgggcattctcagagtaccctgtttgactctgatgtctttcaaactaacaataatgaaaatccatacactgatccagctgatcttattgcagatgctgctggaagccccagtagtgactctcctaccaatcatttttttcatgatggagtagatttcaatcctgatttattgaacagccagagccaaagtggttttggagaagaatattttgatgaaagcagccaaagtggggataatgatgatttcaaaggatttgcatctcaggcactaaatactttgggggtgccaatgcttggaggtgataatggggagaccaagtttaagggcaataaccaagccgacacagttgatttcagtattatttcagtagccggcaaagctttagctcctgcagatcttatggagcatcacagtggtagtcagggtcctttactgaccactggggacttagggaaagaaaagactcaaaagagggtaaaggaaggcaatggcaccagtaatagtactctctcggggcccggattagacagcaaaccagggaagcgcagtcggaccccttctaatgatgggaaaagcaaagataagcctccaaagcggaagaaggcagacactgagggaaagtctccatctcatagttcttctaacagaccttttaccccacctaccagtacaggtggatctaaatcgccaggcagtgcaggaagatctcagactcccccaggtgttgccacaccacccattcccaaaatcactattcagattcctaagggaccagtgatggtgggcaagccttcctctcacagtcagtataccagcagtggttctgtgtcttcctcaggcagcaatagccaccatagccattcttcctcctcttcctcatctgcttccacctcagggaagatgaaaagcagtaaatcagaaggttcatcaagttccaagttaagtagcagtatgtattctagccaggggtcttctggatctagccagtccaaaaattcatcccagtctggggggaagccaggctcctctcccataaccaagcatggactgagcagtggctctagcagcaccaagatgaaacctcaaggaaagccatcatcacttatgaatccttctttaagtaaaccaaacatatccccttctcattcaaggccacctggaggctctgacaagcttgcctctccaatgaagcctgttcctggaactcctccatcctctaaagccaagtcccctatcagttcaggttctggtggttctcatatgtctggaactagttcaagctctggcatgaagtcatcttcagggttaggatcctcaggctcgttgtcccagaaaactcccccatcatctaattcctgtacggcatcttcctcctccttttcctcaagtggctcttccatgtcatcctctcagaaccagcatgggagttctaaaggaaaatctcccagcagaaacaagaagccgtccttgacagctgtcatagataaactgaagcatggggttgtcaccagtggccctgggggtgaagacccactggacggccagatgggggtgagcacaaattcttccagccatcctatgtcctccaaacataacatgtcaggaggagagtttcagggcaagcgtgagaaaagtgataaagacaaatcaaaggtttccacctccgggagttcagtggattcttctaagaagacctcagagtcaaaaaatgtggggagcacaggtgtggcaaaaattatcatcagtaagcatgatggaggctcccctagcattaaagccaaagtgactttgcagaaacctggggaaagtagtggagaagggcttaggcctcaaatggcttcttctaaaaactatggctctccactcatcagtggttccactccaaagcatgagcgtggctctcccagccatagtaagtcaccagcatataccccccagaatctggacagtgaaagtgagtcaggctcctccatagcagagaaatcttatcagaatagtcccagctcagacgatggtatccgaccacttccagaatacagcacagagaaacataagaagcacaaaaaaaaaaaaaaaaaaa

SEQ ID NO: 691 - DNA, 2127 bp, Homo sapiens
ggcacgaggaggagggtggttggcagtggctggaagcttcgctatgggaagtcgttcctttgctctctcgcgcccagtcctcctccctggttctcctcagccgctgtcggaggagagcacccggagacgcgggctgcagtcgcggcggcttctccccgcctgggcggccgcgccgctgggcaggtgctgagcgcccctagagcctcccttgccgcctccctcctctgcccggccgcagcagtgcacatggggtgttggaggtagatgggctcccggcccgggaggcggcggtggatgcggcgctgggcagaagcagccgccgattccagctgccccgcgcgccccgggcgcccctgcgagtccccggttcagccatggggacctctccgagcagcagcaccgccctcgcctcctgcagccgcatcgcccgccgagccacagccacgatgatcgcgggctcccttctcctgcttggattccttagcaccaccacagctcagccagaacagaaggcctcgaatctcattggcacataccgccatgttgaccgtgccaccggccaggtgctaacctgtgacaagtgtccagcaggaacctatgtctctgagcattgtaccaacacaagcctgcgcgtctgcagcagttgccctgtggggacctttaccaggcatgagaatggcatagagaaatgccatgactgtagtcagccatgcccatggccaatgattgagaaattaccttgtgctgccttgactgaccgagaatgcacttgcccacctggcatgttccagtctaacgctacctgtgccccccatacggtgtgtcctgtgggttggggtgtgcggaagaaagggacagagactgaggatgtgcggtgtaagcagtgtgctcggggtaccttctcagatgtgccttctagtgtgatgaaatgcaaagcatacacagactgtctgagtcagaacctggtggtgatcaagccggggaccaagggagacagacaacgtctgtggcacactcccgtccttctccagctccacctcaccttcccctggcacagccatctttccacgccctgagcacatggaaacccatgaagtcccttcctccacttatgttcccaaaggcatgaactcaacagaatccaactcttctgcctctgttagaccaaaggtactgagtagcatccaggaagggacagtccctgacaacacaagctcagcaagggggaaggaagacgtgaacaagaccctcccaaaccttcaggtagtcaaccaccagcaaggcccccaccacagacacatcctgaagctgctgccgtccatggaggccactgggggcgagaagtccagcacgcccatcaagggccccaagaggggacatcctagacagaacctacacaagcattttgacatcaatgagcatttgccctggatgattgtgcttttcctgctgctggtgcttgtggtgattgtggtgtgcagtatccggaaaagctcgaggactctgaaaaaggggccccggcaggatcccagtgccattgtggaaaaggcagggctgaagaaatccatgactccaacccagaaccgggagaaatggatctactactgcaatggccatggtatcgatatcctgaagcttgtagcagcccaagtgggaagccagtggaaagatatctatcagtttctttgcaatgccagtgagagggaggttgctgctttctccaatgggtacacagccgaccacgagcgggcctacgcagctctgcagcactggaccatccggggccccgaggccagcctcgcccagctaattagcgccctgcgccagcaccggagaaacgatgttgtggagaagattcgtgggctgatggaagacaccacccagctggaaactgacaaactagctctcccgatgagccccagcccgcttagcccgagccccatccccagccccaacgcgaaacttgagaattccgctctcctgacggtggagccttccccacaggacaagaacaagggcttcttcgtggatgagtcggagccccttctccgctgtgactctacatccagcggctcctccgcgctgagcaggaacggttcctttattaccaaaaaaaaaaaaaaaaaa

SEQ ID NO: 692 - DNA, 2213 bp, Homo sapiens
aattcggcacgagctatgactggcgccgagccccaaatgaaaacgggccctacttcctggccctccgcgagatgatcgaggagatgtaccagctgtatgggggccccgtggtgctggttgcccacagtatgggcaacatgtacacgctctactttctgcagcggcagccgcaggctggaaggacaagtatatccgggccttcgtgtcactgggtgcgccctgggggggcgtggccaagaccctgcgcgtcctggcttcaggagacaacaaccggatcccagtcatcgggcccctgaagatccgggagcagcagcggtcagctgtctccaccagctggctgctgccctacaactacacatggtcacctgagaaggtgttcgtgcagacacccacaatcaactacacactgcgggactaccgcaagttcttccaggacatcggctttgaagatggctggctcatgcggcaggacacagaagggctggtggaagccacgatgccacctggcgtgcagctgcactgcctctatggtactggcgtccccacaccagactccttctactatgagagcttccctgaccgtgaccctaaaatctgctttggtgacggcgatggtactgtgaacttgaagagtgccctgcagtgccaggcctggcagagccgccaggagcaccaagtgttgctgcaggagctgccaggcagcgagcacattcgagatgctggccaacgccaccaccctggcctatctgaaacgtgtgctccttgggccctgactcctgtgccacaggactcctgtggctcggccgtggacctgctgttggcctctggggctgtcatggcccacgcgttttgcaaagtttgtgactcaccattcaaggcccccgagtcttggactgtgaagcatctgccatggggaagtgctgtttgtatcctttctctgtggcagtgaagaaggaagaaatgagagtctagactcaagggacactggatggcaagaatgctgctgatggtggaactgctgtgaccttaggactggctccacagggtggactggctgggccctggtcccagtccctgcctggggccatgtgtcccccctattcctgtgggcttttcatacttgcctactgggccctggccccgcagccttcctatgagggatgttactgggctgtggtcctgtacccagaggtcccagggatcggctcctggcccctcgggtgacccttcccacacaccagccacagataggcctgccactggtcatgggtagctagagctgctggcttccctgtggcttagctggtggccagcctgactggcttcctgggcgagcctagtagctcctgcaggcaggggcagtttgttgcgttcttcgtggttcccaggccctgggacatctcactccactcctacctcccttaccaccaggagcattcaagctctggattgggcagcagatgtgcccccagtcccgcaggctgtgttccaggggccctgatttcctcggatgtgctattggccccaggactgaagctgcctcccttcaccctgggactgtggttccaaggatgagagcaggggttggagccatggccttctgggaacctatggagaaagggaatccaaggaagcagccaaggctgctcgcagcttccctgagctgcacctcttgctaaccccaccatcacactgccaccctgccctagggtctcactagtaccaagtgggtcagcacagggctgaggatggggctcctatccaccctggccagcacccagcttagtgctgggactagcccagaaacttgaatgggaccctgagagagccaggggtcccctgaggcccccctaggggctttctgtctgccccagggtgctccatggatctccctgtggcagcaggcatggagagtcagggctgccttcatggcagtaggctctaagtgggtgactggccacaggccgagaaaagggtacagcctctaggtggggttcccaaagacgccttcacgctggactgagctgctctcccacagggtttctgtgcagctggattttctctgttgcatacatgcctggcatctgtctccccttgttcctgagtggccccacatggggctctgagcaggctgtatctggattctggcaataaaagtactctggatgctgtaaaaaaaaaaaaaaaaaaaaaaaactcgagggggggcccgg

SEQ ID NO: 693 - DNA, 2253 bp, Homo sapiens
gcaaaattctagatgaaatggatctttactgttttgattcttaccagttgcttcttcacagctggtatctgtgaagatggaatctgtagcagaattcagctgagagataaaattgttcaatcagcattcagacagtaataaatagatgtgattttttcattagtttattaattttattgataattttttcttggtttctattttttttactgaaaatatatcagtgtgcaattgatttgatagggaaaaagataatgtggttctcagatatcttctgtcatttcaatttttgaagtgattttcagaaaccagctgaaatttatctgattaaagtgttttaaatgatcaaataaaccttttaaaatgattccaaatatcatatacacaacatttgtactattctcacaaagttatgtgtgttaaactctcacagctgataatttggctttctaggcaatgaatcgctccctggctaatgtgattcttggaggctatggcaccacttcaacagctggtggaaaacccatggaaatttctggcacacatacggaaatcaaccttgacaatgcaattgacatgattcgagaagctaatagcattattattacaccaggctatggtctctgtgcagccaaagctcaataccccattgctgatttggtaaagatgctcactgagcaaggcaaaaaagtcaggtttggaattcacccagttgcaggccgaatgcctggtcagcttaatgtgctgctggctgaggctggtgtgccatatgacattgtgttggaaatggatgagatcaaccatgattttccagatactgatttggtccttgtaattggagctaatgacactgttaattcagcagctcaagaagatcccaactctattattgcaggcatgccagtccttgaggtctggaaatcaaagcaggtgattgttatgaagaggtctttgggtgttggctatgctgcagtggacaatccaatcttctacaaacctaacacggccatgcttctaggtgatgccaagaaaacatgtgacgcgctccaggcgaaagttagagaatcctatcagaagtaaatattaaggatcaagctgttagctaataatgccacctctgcagttttgggaacaggcaaataaagtatcagtatacatggtgatgtacatctgtagcaaagctcttggagaaaatgaagactgaagaaagcaaagcaaaaactgtatagagagatttttcaaaagcagtaatccctcaattttaaaaaaggattgaaaattctaaatgtctttctgtgcatattttttgtgttaggaatcaaaagtattttataaaaggagaaagaacagcctcattttagatgtagtcctgttggattttttatgcctcctcagtaaccagaaatgttttaaaaaactaagtgtttaggatttcaagacaacattatacatggctctgaaatatctgacacaatgtaaacattgcaggcacctgcattttatgttttttttttcaacaaatgtgactaatttgaaacttttatgaacttctgagctgtccccttgcaattcaaccgcagtttgaattaatcatatcaaatcagttttaattttttaaattgtacttcagagtctatatttcaagggcacattttctcactactattttaatacattaaaggactaaataatctttcagagatgctggaaacaaatcatttgctttatatgtttcattagaataccaatgaaacatacaacttgaaaattagtaatagtatttttgaagatcccatttctaattggagatctctttaatttcgatcaacttataatgtgtagtactatattaagtgcacttgagtggaattcaacatttgactaataaaatgagttcatcatgttggcaagtgatgtggcaattatctctggtgacaaaagagtaaaatcaaatatttctgcctgttacaaatatcaaggaagacctgctactatgaaatagatgacattaatctgtcttcactgtttataatacggatggattttttttcaaatcagtgtgtgttttgaggtcttatgtaattgatgacatttgagagaaatggtggctttttttagctacctctttgttcatttaagcaccagtaaagatcatgtctttttatagaagtgtagattttctttgtgactttgctatcgtgcctaaagctctaaatataggtgaatgtgtgatgaatactcaaaaaaaaaaaa

SEQ ID NO: 694 - DNA, 1425 bp, Homo sapiens
  misc_feature (1408)..(1408): n equals a,t,g, or c
  misc_feature (1417)..(1417): n equals a,t,g, or c
  misc_feature (1421)..(1421): n equals a,t,g, or c
gtaagaataatttatcttaataaagatagctaacattattatttactatgtgagatactctacttttaaacattatctttcaatcagctcaattccacaaggtggactaattctgcagcccatgctgttcactatactgttttccagtttcatacacattgttaatgcctatccttaaattcatgttccttttcattataccttactgtttccaacttaagaactatataaataatcaggtaaatatactttccagtgattgcatatttttggataacattagtgatgtttagcagagtccccttgaatattaaaatatttatatattaattaactttgtcatttaaatgttaagtttaagcatgtagaaaaatacctagaaaatacatatattgtataaaagtgaattacaatagggaaagattgactattggaatggcagtgtgaggaccacatgaacttgctctcccagagcccccaaaaagaacaacaacaaaaatactggccaaccatataatatccaccatttcagaactctggaaattaaccaaagccacagaatggactgagtattgtctattctaaggaaaactactgatccttgataagacaccgaatctatggcatttttatcttggagcaattcccatcctgccccccttctcaactgagtagtgcagtagccatggaaagccagcggcttcacagccaatggatatgactgacctccttggagctgcatgaaaatctccatccctattactatcaacattttgtctgaactagcagctccctggaaaatcttcattctcagcatcttggctatttcatttgactagggcattaccaaaaacaacagtaatctgctggcaacatctcagctacctaagcatgtgattaaaggtggaggaaacaagatcctgatcaaaatataagaggaattcttagaaaactggaaaacatacgcagctttgaaaagctacaacatatttttggggatctagaagactttgcaaattcctagaaaggaaaacacctcattcaaataatcagctcccttctgcttcaccatgaagccctgcgtaagcaggaaatgaaaactaaggctgtcattttctgaactttgaaggcatgccttcacacacaaatcactttgacaaagggtgggagatgtacaggcaagagattyagggaaatcttacaacaaatcactggctgaccactaaataatactgacccaggtatgccaagtaggaagccagatgtagaataaaaactttaaaaataaaaattaaaaagaccctggggcaactgctgcagggaatacagaatccacagaattcactacatgaaaaaaaaaaaaaaaaaactcgagggggggcccggtacccaattcgccctaggtgantcgaaatgngttnccgg

SEQ ID NO: 695 - DNA, 1031 bp, Homo sapiens
gtttcggcacgagaaacttaaaactttacagtcagaggttcaattcctcttcttaacaacatacccatggccaacctcctactcctcattgtacccattctaatcgcaatggcattcctaatgcttaccgaacgaaaaattctaggctatatacaactacgcaaaggccccaacgttgtaggcccctacgggctactacaacccttcgctgacgccataaaactcttcaccaaggagcccctaaaacccgccacatctaccatcaccctctacatcaccgcccgaccttagctctcaccatcgctcttctactatgaacccccctccccatacccaaccccctggtcaacctcaacctaggcctcctatttattctagccacctctagcctagccgtttactcaatcctctgatcagggtgagcatcaaactcaaactacgccctgatcggcgcactgcgagcagtagcccaaacaatctcatatgaagtcaccctagccatcattctactatcaacattactaataagtggctcctttaacctctccacccttatcacaacacaagaacacctctgattactcctgccatcatgacccttggccataatatgatttatctccacactagcagagaccaaccgaacccccttcgaccttgccgaaggggagtccgaactagtctcaggcttcaacatcgaatacgccgcaggccccttcgccctattcttcatagccgaatacacaaacattattataataaacaccctcaccactacaatcttcctaggaacaacatatgacgcactctcccctgaactctacacaacatattttgtcaccaagaccctacttctaacctccctgttcttatgaattcgaacagcatacccccgattccgctacgaccaactcatacacctcctatgaaaaaacttcctaccactcaccctagcattacttatatgatatgtctccatacccattacaatctccagcattccccctcaaacctaaaaaaaaaaaaaaaaa

SEQ ID NO: 696 - DNA, 465 bp, Homo sapiens
ccacgcgtccgcggacgcgtggggaaggtttgtgccagtagacattatgttactaaatcagcactttaaaatctttggttctctaattcatatgaatttgctgtttgctctaatttctttgggctcttctaatttgagtggagtacaattttgttgtgaaacagtccagtgaaactgtgcagggaaatgaaggtagaattttgggaggtaataatgatgtgaaacataaagatttaataattactgtccaacacagtggagcagcttgtccacaaatatagtaattactatttattgctctaaggaagattaaaaaaagatagggaaaagggggaaacttctttgaaaaatgaaacatctgttacattaatgtctaattataaaattttaatccttactgcatttcttctgttcctacaaatgtattaaacattcagtttaactggtaaaaaaaaaaaaaaaaaa

SEQ ID NO: 697 - DNA, 1156 bp, Homo sapiens
gctctaatacgacgtcacttatagggaaagctggtacgcctgcaggtaccggtccggaattcccgggtcgacccacgcgtccgggaaagatgaatcctcaaccctcccaccaccaccgagctcaggggctgagtgttgtcacacttggctgtgaccctctccctctacctccccctgcccttgcctgcctcatccttaggtccaggggtttgcttctgaagctggtggttccttactgtggccagctttagtcttagtggcctagcgtggggcctgaaattgtcaaatgaatgaatgcctcatcctcttgctggtgactgtaagacatccgtctgcctctgctcttctgtctgttaagaagctttcttgccagtgcctgaggttcaagcctgatcctttgtctccgtagcgtgggatggaatgggagcttctcagaaaaccaggagacctgytccccacaatgctgtctaatggagccaagcgtctggtctcctgacggcagcagcaggagcagcagcagcggcatgaaatcccatcccttccctccagggccagaaccggtccctgtgctctgccttatgtgaggcctctgaaatcagcgttaggattgatagtgcaggcagaggtttgcgtttaagaagtggaagctactccttggctctgtacttggggtggatgtgatakccctgggacctttgctcctcagtctctgctgcagtttgcaacctccaccacttgagggcaccaagaatactgggaatctgcgctggggtggggttgtgaggtgggcagggctgggtgtgtaaaaaagttgcttttggaggccgggcatggtggctcatgcctgtaatcccagcactttgggaggccgaggcgggtggattgcctgaggtcaagagttcgagaccagccatggccaacatggtgaaaccctgtctctactaaaaawacaaaaaattagctgagcatggtggcgggcacctgtaatcccagctactggggaggctgaggcaggagaatcacttgaatccgggaggcagaggttgcagtaaggcaagatcctgccattgcactccagcctgggtgacagagcaagactccgtctcaaaaaaaaaaaaaaaaaaaaaaaaaaaaaaaaaaaaaaaaaagggcggcc

SEQ ID NO: 698 - DNA, 2203 bp, Homo sapiens
  misc_feature (2203)..(2203): n equals a,t,g, or c
ggaaagatgattctcactggtggtccaggtttcagaagggtgacattccatgggacgacaaggatttcaggatgttcttcctctggactgctctgttctggggtggagtcatgttttacttgctgctcaagagatccgggagagaaatcacttggaaggactttgtcaataactatctttcaaaaggagtagtagacagattggaagtcgtcaacaagcgttttgttcgagtgacctttacaccaggaaaaactcctgttgatgggcaatacgtttggtttaatattggcagtgtggacacctttgaacggaatctggaaactttacagcaggaattgggcatagaaggagaaaatcgggtgcctgttgtctacattgctgaaagtgatggctcttttctgctgagcatgctgcctacggtgctcatcatcgccttcttgctctacaccatcagaagagggcctgctggcattggccggacaggccgagggatgggcggactcttcagtgtcggagaaaccactgccaaggtcttaaaggatgaaattgatgtgaagttcaaagatgtggctggctgtgaggaggccaagctagagatcatggaatttgtgaatttcttgaaaaacccaaagcagtatcaagacctaggagcaaaaatcccaaagggtgccattctcactggtcctccaggcactgggaagacgctgctagctaaggccacagccggagaagccaatgtccccttcatcaccgttagtggatctgagtttttggggatggttttaatacaacaacaaatgtcgtcattttggccggcaccaatcgaccagatatcctggaccccgcgctrcttaggccggggcgtttcgacaggcagatctttattggaccaccagacataaaaggaagagcttctattttcaaagttcatctccgaccgctaaaactggacagtaccctggagaaggataaattggcaagaaaactggcatctttaactccagggttttcaggtgctgatgttgctaatgtctgtaatgaagctgcgttgattgctgcaaggcatctgtcagattccataaatcagaaacactttgaacaggcaattgagcgagtgattggtggcttagagaagaaaacgcaggttctgcagcctgaggagaagaagactgtggcataccacgaagcaggccatgcggttgccggctggtatctggagcacgcagacccgcttttaaaggtatccatcatcccacgtggcaaaggactaggttatgctcagtatttaccaaaagaacaatacctctataccaaagagcagctcttggataggatgtgtatgactttaggtggtcgagtctctgaagaaatcttctttggaagaattacaactggtgctcaagatgacttgagaaaagtaactcagagtgcatatgcccaaattgttcagtttggcatgaatgaaaaggttgggcaaatctcctttgacctcccacgtcagggggacatggtattggagaaaccttacagtgaagccactgcaagattgatagatgatgaagtacgaatacttattaatgatgcttataaaagaacagtagctcttctcacagaaaagaaagctgacgtggagaaggttgctcttctgttgttagaaaaagaagtattagataagaatgatatggttgaacttttgggccccagaccatttgcggaaaaatctacctatgaagaatttgtggaaggcactggcagcttggatgaggacacctcacttccagaaggccttaaggactggaacaaggagcgggaaaaggagaaagaggagcccccgggtgagaaagttgccaactagaggcccagagggaggccatctcagtctstccactgtggtttcagctggtgcattatttcagctgtggctttcagaagaatgggaatgctgcgctgattttagccagccactggcccagctgaaatgatggggaaaggagtccttagtcctttcagcctcagaggtcacagtgggtggcaggtgactttccggaggccttgagggaaatgcacactgtcccatagcctcattgggctcccagacgtgctggaaaggttgagcccagaatgcccaagctggaccctgtggcaccaaatggggtcggcttgacgtgtggcaaggatcgttgactggctttttgcggggggn

SEQ ID NO: 699 - DNA, 2033 bp, Homo sapiens
ggcacgagcagcactgagggctcatccctctgcagagcgcggggtcaccggaaggagacgccatgacgcccgccctcacagccctgctctgccttgggctgagtctgggccccaggacccgcgtgcaggcagggcccttccccaaacccaccctctgggctgagccaggctctgtgatcagctgggggagccccgtgaccatctggtgtcaggggagcctggaggcccaggagtaccaactggataaagagggaagcccagagcccttggacagaaataacccactggaacccaagaacaaggccagattctccatcccatccatgacacagcaccatgcagggagataccgctgccactattacagctctgcaggctggtcagagcccagcgaccccctggagctggtgatgacaggagcctatagcaaacccaccctctcagccctgcccagccctgtggtggcctcaggggggaatatgaccctccgatgtggctcacagaagagatatcaccattttgttctgatgaaggaaggagaacaccagctcccccggaccctggactcacagcagctccacagtggggggttccaggccctgttccctgtgggccccgtgaaccccagccacaggtggaggttcacatgctattactattatatgaacaccccccgggtgtggtcccaccccagtgaccccctggagattctgccctcaggcgtgtctaggaagccctccctcctgaccctgcagggccctgtcctggcccctgggcagagcctgaccctccaagtgtggctctgatgtcggctacgacagatttgttctgtataaggagggggaacgtgacttcctccagcgccctggccagcagccccaggctgggctctcccaggccaacttcaccctgggccctgtgagcccctccaatgggggccagtacaggtgctacggtgcacacaacctctcctccgagtggtcggcccccagcgaccccctgaacatcctgatggcaggacagatctatgacaccgtctccctgtcagcacagccgggccccacagtggcctcaggagagaacgtgaccctgctgtgtcagtcatggtggcagtttgacactttccttctgaccaaagaaggggcagcccatcccccactgcgtctgagatcaatgtacggagctcataagtaccaggctgaattccccatgagtcctgtgacctcagcccacgcggggacctacaggtgctacggctcacgcagctccaacccctacctgctgtctcaccccagtgagcccctggagctcgtggtctcaggacactctggaggctccagcctcccacccacagggccgccctccacacctggtctgggaagatacctggaggttttgattggggtctcggtggccttcgtcctgctgctcttcctcctcctcttcctcctcctccgacgtcagcgtcacagcaaacacaggacatctgaccagagaaagactgatttccagcgtcctgcaggggctgcggagacagagcccaaggacaggggcctgctgaggaggtccagcccagctgctgacgtccaggaagaaaacctctatgctgccgtgaaggacacacagtctgaggacggggtggagctggacagtcagagcccacacgatgaagacccccacgcagtgacgtatgccccggtgaaacactccagtcctaggagagaaatggcctctcctccttccccactgtctggggaattcctggacacaaaggacagacaggcagaagaggacagacagatggacactgaggctgctgcatctgaagcctcccaggatgtgacctacgcccagctgcacagcttgacccttagacggaaggcaactgagcctcctccatcccaggagttcgagtcagtcagatcagcattgtgaggccccatctctacaaaaaataaaaccagtccggcgtggtggcacaaaaaaaaaaaaaaaaaaaaaaaaaaaaaaaaaaaaaaaaaaaaaaaaaaaaa

SEQ ID NO: 700 - DNA, 875 bp, Homo sapiens
gtaattaaccctcactaaagggaacaaaagctggagctccaccgcggtggcgggcagcaracagtggtcagtcctttcttggctctgctgacactcgagcccacattccgtcacctgctcagaatcatgcaggtctccactgctgcccttgctgtcctcctctgcaccatggctctctgcaaccagttctctgcatcacttgctgctgacacgccgaccgcctgctgcttcagctacacctcccggcagattccacagaatttcatagctgactactttgagacgagcagccagtgctccaagcccggtgtcatcttcctaaccaagcgaagcsggcaggtctgtgctgaccccagtgaggagtgggtccagaaatatgtcagcgacctggagctgagtgcctgaggggtccagaagcttcgaggcccagcgacctcggtgggcccagtggggaggagcaggagcctgagccttgggaacatgcgtgtgacctccacagctacctcttctatggactggttgttgccaaacagccacactgtgggactcttcttaacttaaattttaatttatttatactatttagtttttgtaatttattttcgatttcacagtgtgtttgtgattgtttgctctgagagttcccctgtcccctcccccttccctcacaccgcgtctggtgacaaccgagtggctgtcatcrgcctgtgtaggcagtcatggcaccaaagccaccagactgacaaatgtgtatcggatgcttttgttcagggctgtgatcggcctggggaaataataaagatgctcttttaaaaggtaaaaaaaaaaaaaaaaaaaaaaaaaaaaaaaaaaaaaaaaaaaaaaaaaaaaaaaaa

SEQ ID NO: 701 - DNA, 967 bp, Homo sapiens
  misc_feature (942)..(942): n equals a,t,g, or c
  misc_feature (954)..(954): n equals a,t,g, or c
tgcatgacacgaagcttgcttctgcctggcatctgtgagcagctgccaggctccggccaggatcccttccttctcctcattggctgatggatcccaaggggctcctctccttgaccttcgtgctgtttctctccctggcttttggggcaagctacggaacaggtgggcgcatgatgaactgcccaaagattctccggcagttgggaagcaaagtgctgctgcccctgacatatgaaaggataaataagagcatgaacaaaagcatccacattgtcgtcacaatggcaaaatcactggagaacagtgtcgagaacaaaatagtgtctcttgatccatccgaagcaggccctccacgttatctaggagatcgctacaagttttatctggagaatctcaccctggggatacgggaaagcaggaaggaggatgagggatggtaccttatgaccctggagaaaaatgtttcagttcagcgcttttgcctgcagttgaggctttatgagcaggtctccactccagaaattaaagttttaaacaagacccaggagaacgggacctgcaccttgatactgggctgcacagtggagaagggggaccatgtggcttacagctggagtgaaaaggcgggcacccacccactgaacccagccaacagctcccacctcctgtcsctcaccctcggcccccagcatgctgacaatatctacatctgcaccgtgagcaaccctatcagcaacaattcccagaccttcagcccgtggcccggatgcaggacagacccctcagaaacaaaaccatgggcagtgtatgctgggctgttagggggtgtcatcatgattctcatcatggtggtaatactacagttgagaagaagaggtaaaacgaaccattaccagacaacagtggaaaaaaaaaagccttacgatctatgcccaagtccanaaaccaggtctnttaagaataaaac

SEQ ID NO: 702 - DNA, 877 bp, Homo sapiens
ggcacgaggaacaacccaaaaaccttcacctctcatgctgaagctcacacccttgccctccaagatgaaggtttctgcagcgcttctgtgcctgctgctcatggcagccactttcagccctcagggacttgctcagccagattcagtttccattccaatcacctgctgctttaacgtgatcaataggaaaattcctatccagaggctggagagctacacaagaatcaccaacatccaatgtcccaaggaagctgtgatcttcaagaccaaacggtgtaaggaggtctgtgctgaccccaaggagagatgggtcagggattccatgaagcatctggaccaaatatttcaaaatctgaagccatgagccttcatacatggactgagagtcagagcttgaagaaaagcttatttattttccccaacctcccccaggtgcagtgtgacattattttattataacatccacaaagagattatttttaaataatttaaagcataatatttcttaaaaagtatttaattatatttaagttgttgatgttttaactctatctgtcatacatcctagtgaatgtaaaatgcaaaatcctggtgatgttgttttttgtttttgttttcctgtgagctcaactaagttcacggcaaaatgtcattgttctccctcctacctgtctgtagtgttgtggggtcctcccatggatcatcaaggtgaaacactttggtattctttggcaatcagtgctcctgtaagtcaaatgtgtgctttgtactgctgttgttgaaattgatgttactgtatataactatggaattttgaaaaaaaatttcaaaaagaaaaaaatatatataatttaaaactaaaaaaaaaaaaaataaa

SEQ ID NO: 703 - DNA, 997 bp, Homo sapiens
  misc_feature (990)..(990): n equals a,t,g, or c
gaattcggcacagctgagaggagacacaaggagcagcccgcaagcaccaagtgagaggcatgaagttacagtgtgtttccctttggctcctgggtacaatactgatattgtgctcagtagacaaccacggtctcaggagatgtctgatttccacagacatgcaccatatagaagagagtttccaagaaatcaaaagagccatccaagctaaggacaccttcccaaatgtcactatcctgtccacattggagactctgcagatcattaagcccttagatgtgtgctgcgtgaccaagaacctcctggcgttctacgtggacagggtgttcaaggatcatcaggagccaaaccccaaaatcttgagaaaaatcagcagcattgccaactctttcctctacatgcagaaaactctgcggcaatgtcaggaacagaggcagtgtcactgcaggcaggaagccaccaatgccaccagagtcatccatgacaactatgatcagctggaggtccacgctgctgccattaaatccctgggagagctcgacgtctttctagcctggattaataagaatcatgaagtaatgtcctcagcttgatgacaaggaacctgtatagtgatccagggatgaacaccccctgtgcggtttactgtgggagacagcccaccttgaaggggaaggagatggggaaggccccttgcagctgaaagtcccactggctggcctcaggctgtcttattccgcttgaaaatagccaaaaagtctactgtggtatttgtaataaactctatctgctgaaagggcctgcaggccatcctgggagtaaagggctgccttcccatctaatttattgtgaagtcatatagtccatgtctgtgatgtgagccaagtgatatcctgtagtacacattgtactgagtggtttttctgaataaattccatattttacctaaaaaaaaaaaaaaaaaactcgagggggggcccgtacccaatngcccatt

SEQ ID NO: 704 - DNA, 778 bp, Homo sapiens
  misc_feature (613)..(613): n equals a,t,g, or c
  misc_feature (658)..(658): n equals a,t,g, or c
  misc_feature (749)..(749): n equals a,t,g, or c
  misc_feature (773)..(773): n equals a,t,g, or c
atgatcgccagctcgaaattaaccctcactaaagggaacaaaagctggagctccaccgcggtggcggccgctctagaactagtggatcccccgggctgmakgamttcggcwsggasgggaaccttccacccacagctatgcctctgattggtgaatggtgaaggtgcctgtctaacttttctgtaaaaagaaccagctgcctccaggcagccagccctcaagcatcacttacaggaccagagggacaagacatgactgtgatgaggagctgctttcgccaatttaacaccaagaagaattgaggctgcttgggaggaaggccaggaggaacacgagactgagagatgaattttcaacagaggctgcaaagcctgtggactttagccagcacccttctgccctcctttgctggcgacagcctctcaaatgcagatggttgtgctcccttgcctgggttttaccctgcttctctggagccaggtatcaggggcccagggccaagaattccactttgggccctgccaagtgaaggggttgktccccagaaactgtgggaagccttctgggctgtgaaagacactatgcaagctcaggataacatcacgagtgcccnggytgctgcagcaggargttctgcagaacgtctmggatgctgaanctggtaccttgkccacaccctgctggagtctacttgaaaactgtttcaaaaaccaccacmatagaacaagttgaagtcaggactytgaagncattctctactctgggccaacaantttgg

SEQ ID NO: 705 - DNA, 2387 bp, Homo sapiens
  misc_feature (2371)..(2371): n equals a,t,g, or c
ggcacgagctgggctggggccctggcggatggagacatgctgcccctgctgctgctgcccctgctgtggggggggtccctgcaggagaagccagtgtacgagctgcaagtgcagaagtcggtgacggtgcaggagggcctgtgcgtccttgtgccctgctccttctcttacccctggagatcctggtattcctctcccccactctacgtctactggttccgggacggggagatcccatactacgctgaggttgtggccacaaacaacccagacagaagagtgaagccagagacccagggccgattccgcctccttggggatgtccagaagaagaactgctccctgagcatcggagatgccagaatggaggacacgggaagctatttcttccgcgtggagagaggaagggatgtaaaatatagctaccaacagaataagctgaacttggaggtgacagccctgatagagaaacccgacatccactttctggagcctctggagtccggccgccccacaaggctgagctgcagccttccaggatcctgtgaagcgggaccacctctcacattctcctggacggggaatgccctcagccccctggaccccgagaccacccgctcctcagagctcaccctcacccccaggcccgaggaccatggcaccaacctcacctgtcagatgaaacgccaaggagctcaggtgaccacggagagaactgtccagctcaatgtctcctatgctccacagaccatcaccatcttcaggaacggcatagccctagagatcctgcaaaacacctcataccttccggtcctggagggccaggctctgcggctgctctgtgatgctcccagcaacccccctgcacacctgagctggttccagggctcccctgccctgaacgccacccccatctccaataccgggatcttggagcttcgtcgagtaaggtctgcagaaraaggaggcttcacctgccgcgctcagcacccgctgggcttcctgcaaatttttctgaatctctcagtttactccctcccacagttgctgggcccctcctgctcctgggaggctgagggtctgcactgcagatgctcctttcgagcctggccggccccctccctgtgctggcggcttgaggagaagccgctggaggggaacagcagccagggctcattcaaggtcaactccagctcasctggtccctgggccaacagctccctgatcctccacggggggctcaattccgacctcaaagtcagctgcaaggcctggaacatctatgggtcccagagcggctctgtcctgctgctgcaagggagatcgaacctcgggacaggagtggttcctgcagcccttggtggtgctggtgtcatggccctgctctgtatctgtctgtgcctcatcttctttttaatagtgaaagcccgcaggaagcaagcagctgggagaccagagaaaatggatgatgaagaccccattatgggtaccatcacctcgggttccaggaagaagccctggccagacagccccggagatcaagcatctcctcctggggatgcccctcccttggaagaacaaaaggagctccattatgcctcccttagtttttctgagatgaagtcgagggagcctaaggaccaggaggccccaagcaccacggagtactcggagatcaagacaagcaagtgaggatttgcccagagttcagtcctggctggaggagccacagcctgtctgggggaaaggacaagtcagggaccacttgctgaagcacgaagagcccttgtggcaatgttaacattaactgatgtttaagtgctccaagcagagcagaaagaaaacagatgatggaattagagaggtgggctcaaatctaggccctggcactgtcatcaagcaattcactgcatccctctgtgcctcagtttcccattctgtaaatcagagatcatgcatgctacctcaaaggttgttgtgaacattaaagaaatcaacacatggaaatcaaccaacatgggtcctggaacaggcgttgtgctcagtgctttctggtctctcttccttgaatagaaaggtcctgctggcaagttctctcaaggctggggatgaccaggcacaaaaaacagggcagcaatatgttggtgtcactccccttcccaaaactcttcgaagactccctaggaaagaccagcccctcagcctggcacttggttcatgatgtgggatcttatatccttgccagagtcatatctttgcccacttttacctgcaatccttgcatcatattccwttgggttccaktccttcatttatgagaccctarggawtcyttccaacagccaagagttgartytaactctttcctgcncaaacccatttcacgg

SEQ ID NO: 706 - DNA, 818 bp, Homo sapiens
  misc_feature (687)..(687): n equals a,t,g, or c
  misc_feature (712)..(712): n equals a,t,g, or c
ggcaaaaccaaaccacaagacagacttgcaaaagaaggcatgcacagctcagcactgctctgttgcctggtcctcctgactggggtgagggccagcccaggccagggcacccagtctgagaacagctgcacccacttcccaggcaacctgcctaacatgcttcgagatctccgagatgccttcagcagagtgaagactttctttcaaatgaaggatcagctggacaacttgttgttaaaggagtccttgctggaggactttaagggttacctgggttgccaagccttgtctgagatgatccagttttacctggaggaggtgatgccccaagctgagaaccaagacccagacatcaaggcgcatgtgaactccctgggggagaacctgaagaccctcaggctgaggctacggcgctgtcatcgatttcttccctgtgaaaacaagagcaaggccgtggagcaggtgaagaatgcctttaataagctccaagagaaaggcatctacaaagccatgagtgagtttgacatcttcatcaactacatagaagcctacatgacaatgmagatacgaaactgagacatcagggtggcgactctatagactctaggacataaattagaggtctccaaaatcggatctggggctctgggatagctgacccagccccttgagaaaccttattgtacntctctcatagaatatttattacctntgatacctcaacccccatttctatttatttactgagcttctctgtgaacgatttagaaagaagcccaatattataatttttttcaataaaaaaaaaaaaaaaaaaa

SEQ ID NO: 707 - DNA, 879 bp, Homo sapiens
ggcacgaggaacaacccaaaaaccttcacctctcatgctgaagctcacacccttgccctccaagatgaaggtttctgcagcgcttctgtgcctgctgctcatggcagccactttcagccctcagggacttgctcagccagattcagtttccattccaatcacctgctgctttaacgtgatcaataggaaaattcctatccagaggctggagagctacacaagaatcaccaacatccaatgtcccaaggaagctgtgatcttcaagaccaaacgggggcaaggaggtctgtgctgaccccaaggagagatgggtcagggattccatgaagcatctggaccaaatatttcaaaatctgaagccatgagccttcatacatggactgagagttcagagcttgaagaaaagcttatttattttccccaacctcccccaggtgcagtgttgacattattttattataacatccacaaagagattatttttaaataatttaaagcataatatttcttaaaaagtatttaattatatttaagttgttgatgttttaactctatctgtcatacatcctagtgaatgtaaaatgcaaaatcctggtgatgtgttttttgtttttgttttcctgtgagctcaactaagttcacggcaaaatgtcattgttctccctcctacctgtctgtagtgttgtggggtcctcccatggatcatcaaggtgaaacactttggtattctttggcaatcagtgctcctgtaagtcaaatgtgtgctttgtactgctgttgttgaaattgatgttactgtatataactatggaattttgaaaaaaaatttcaaaaagaaaaaaatatatataatttaaaactaaaaaaaaaaaaaaaaaa

SEQ ID NO: 708 - DNA, 1405 bp, Homo sapiens
aattcggcmcagagatgaggaagtggcaggcaggcaggctggccccggggacttctctctggccctgctccctccgagcgctccgccgttgcccgcctggcccctacggagtccttagccaggatggaggctgttgtgaacttgtaccaagaggtgatgaagcacgcagatccccggatccagggctaccctctgatggggtcccccttgctaatgacctccattctcctgacctacgtgtacttcgttctctcacttgggcctcgcatcatggctaatcggaagcccttccagctccgtggcttcatgattgtctacaacttctcactggtggcactctccctctacattgtctatgaggtgatctttattctccgaaagaaagacgggcaggtgaccttcctacatgtcttccatcactctgtgcttccctggagctggtggtggggggtaaagattgccccgggaggaatgggctctttccatgccatgataaactcttccgtgcatgtcataatgtacctgtactacggattatctgcctttggccctgtggcacaaccctacctttggtggaaaaagcacatgacagccattcagctgatccagtttgtcctggtctcactgcacatctcccagtactactttatgtccagctgtaactaccagtacccagtcattattcacctcatctggatgtatggcaccatcttcttcatgctgttctccaacttctggtatcactcttataccaagggcaagcggctgccccgtgcacttcagcaaaatggagctccaggtattgccaaggtcaaggccaactgagaagcatggcctagataggcgcccacctaagtgcctcaggactgcaccttagggcagtgtccgtcagtgccctctccacctacacctgtgaccaaggcttatgtggtcaggactgagcaggggactggccctcccctccccacagctgctctacagggaccacggctttggttcctcacccacttcccccgggcagctccagggatgtggcctcattgctgtctgccactccagagctgggggctaaaagggctgtacagttatttccccctccctgccttaaaacttgggagaggagcactcagggctggccccacaaagggtctcgtggcctttttcctcacacagaagaggtcagcaataatgtcactgtggacccagtctcactcctccaccccacacactgaagcagtagcttctgggccaaaggtcagggtgggcgggggcctgggaatacagcctgtggaggctgcttactcaacttgtgtcttaattaaaagtgacagaggaaaccaaaaaaaaaaaaaaaaaaactcgaggggggcccgtacccaaatcgccggtatgatcgtaaacaatc

SEQ ID NO: 709 - DNA, 1712 bp, Homo sapiens
catttctgaaccatttgaaaatgagctgcagccataatattttcccatacatatttcagtatctatcttcacagaataaggacattatcacacataactaaatccatgacacacccaagaaaatttaacacaattttctaatgttgtctcatgttgaatccgtattctagcctcctgcattggccctagaatgtcttttccatgtgcacacattgcatttggctcttatgtctctttattctccttactagaatattcccaacctcttgttttccccacaatgctgactttttgagtaggccaggccatttagtggaaggagcatctcatatctgatttgtctgattgtttccttgtaccgtcatttaacttgtacctctatctcttgtaaatcccataaactggaagtgagatctaaagtcttgactagattcagatcagacacctttgacaagacacagagctcaagtttttgttttttttttgtttttttttgagatggagtctccctctgtcgcctaggctggagtgcagtggtgctatctcggctcgctgcaggctccgcctcccgggttcaagcaattcttctgcctcagcctcccaagtagctgggactgcaggcgcgtgccaccacgcctggttaattttttgtgtttttagtagaggcggggtttcgccgtgttggccaggatggtctcgatctcctgaccttgtgatctgcctgcctcggcctcccagggtgctgggattgcaggcatgagccactgcgcccggctgacacagagctgaagttctatccttcatgtcgcattgtatctggagacagcgtctgcataggtcactagcagtgaagcgaagtttgatcacttggtggaggcagtgactgctggatctttccactgtaaaggcacacgtttcccttcgccaatgaccttcgggtaacacacccgggcacagtgtgaatatcctgcgcaatgccttactcagatatggacaataaaggatgacaggaaacggagaaaaagctttcaacatgaaagagtgagacagaaacaaacaggaaaaagctttcaacatgaaagagggagacagaaacaaacaggaaaaagccgactcagaggaaagagagaccatcgcaggaagcaaaagaaaacttcccctaaacaataaatagccttaaaagtgagaatatatattacattcataattgacaagattgctatgaaaaaaatatttatttatttattttgagacaaggtcttgctctgtcacccaggggagtgcagtggcatgatcatggctcactgcagcctcaagtgcctgggctcaggcaatcctcctgcctcggcctcccaagtagctggaactgcaggtgtgcatcaccacacccagctaattaaaaaacaatttttttgtagagatgggctctcgctgtgttgcccaggttggtcttgaattcctggcctcaagtgattctcccacctcggtctctcagagtgctggaattgcgggtatgagccactgcacctggccaaaaaaaaatttcaaaaacaagatagtgctcttgggctccacactgaaaaatccactgcaaaattggaaggtaaagtacaaacaaaaatttcttataaagtagaacaaaaaaaaggaattcgatatcaagcttatcgataccgtcgacctcgagggggggcccggtacccaattcgccc

SEQ ID NO: 710 - DNA, 2972 bp, Homo sapiens
  misc_feature (1671)..(1671): n equals a,t,g, or c
aattgggtacggggccccccctcgaggtcgacggtatcgataagcttgatatcgaattccctattttaaaggatttattttccagcagtcctgaggggcaaggacaggacaggagggagaaggagatcccaggacgcttgagggccccgttcatgggcagtaggcagattcgtccttctagtgcctgtggcaggcaggttgaccctgggttcgggagggacacaggccctggatgacactgagctggatgcctaggcagtgtcactccccacactttcaacctgagccccacagcaagcctataaggtgaacattctcactgtgatttgtcaggctgggttcagggagtgaaatggcctcctccaattccacaggttcaaataccctgcagagcggcaccagcctccctcagaaaggaccagacacttgtaacatttatgtcctttacctgggacactgctgtcccatacttgctgtatgaaaagaatatttctcaagaggaagaggaagccaggcgcagtgattcacgcctgtaatcccagcactttgggaggctgagccaggaggatcgcttgagcccaggagtttgagaccagcctgggtaacatggcaaaaccccgtctctacaaaaatcagccagaaaggcatagatagacccaaatcccagtctttagcctggcccaaccacctgagaatggtctctacccaggattccttcactcaattacaccctactctttgcctcctgccacagacagagagagagagcgctacgctaccacagccagcttcctcccagggccaggaaagcttcaccttgtccccctctcacagttcctaaaattcttccattcatctatttggcctcttaagtatttactctgttttcaaatacatatataactccagcttataataccaagtcaaaggtagtctttcacaccatagcatgaatttgattgtcagctatttaaggaaggaggcagggaaagtggaatggggggtactctgaagaggccaggcctgggtattggaggttggaggaccacccaaaaaaagcctgaggggagaaggaaatgtaagcagacacgacacataggtaaaacgaagaaaggtacaggagtctcctattaggaaaaaaagggggaggctgggtgtgatagctcacgcctgtaatctcagcactttgggagcacaaggaaggtggatcacttgaggtcaggagttcaagaccagcctggccaatatggtgaaacctgtctctactaaaaatacaaaaattagccagccgtagtggcacacacctgtaatcccagctacttgggaggctggggtgggagaatcacttgaacccaggaggtcgaggttgtagtgagccgagatcacgccactgcactccagcctgggcgacagagtgagaccctgccataaaaaaaaaaaaaaagttggggggggcagtggggagagggaagaggccaggcactgtggctcacgcctgtaatcccagcactttgggaggctgaggtgggcggattacctgaggacaggagttcgagaccagcctggccaacatggtgaagcctcgtctctactaaaaatacaaaaattagctgggcgtggtagcaggaacctgtaatcccagctactcaggaggctgaggcaagagaatcncttgaacccaggaggcagaggcttcaataagccaagaccacaccattgcactccagcgtgggtgacaagagcgaaactccatctcaaaaaaaaaaaaaaaaaagggagtgggggaagaaaggtgaatctgggcaaatttggggcttcacattgacccagctggcccatttctagtgaccttgagtctctgtattgatatgtaactgccttttggcagggagaggggagggacattagttttattgattttgtctgcagccactttctgggctctgattctgagccagggcctgtctgcagtgctctatgctagaggcttggagactagagtaacttagctagaaaccttggtccaactagtggagaggtgggggagaaaacccccaaatcccaagaatctgcggagactgtgactagggttattaagaggggacagagggccaggggacatctaatacatgaaatggaattaccagctgcttgggcgagcaatgccttggagggctggtggggctacacatgtgcaggtggtgggactttctgagtgtcagcaacatcccaggcaaagacccagaagtgggatgtgtagtatgggtttggagaacagggagctagaacccaacattcatgaagggaagtgggcaggctggagacagagatggaacccagatccagagggccacatgccaggcttgggagactgacctcagcttagggcagtggggagtcatggaagggtttaagcaggggaatcgctgatgggaacaggaccctctgactgcagggagggaggcagaggatgggttagaggggtcaggggggagatggcagtgacagcacggaggtgaccaagggtgacagccacagggatggagatcagggaatgcagagagttggcacaggcttctggcggggagcagctataatggcagggaggtagggctcctgagccttcctggaggagccaaggccacggtcatcagagtaggctcttcattggctcagcttattgagaatcatcttcacccagggcactctgggatcggcacagatctccttatccctgaaggttagcaacaccacgccaggcctcgggcaggagtctgaggtccagtagaagtgtttcaccacgcgcaggggcagacggtaacggacgtaatcacggcagcagacgctgtcttccatgttggcgccgtaggggcctgcctcagttgcttgaagcgccacagcaaggaggacgaggacaaccaggagtgcagtctgtaggcgagccatgctctggaattcctgcagcccggggg

SEQ ID NO: 711 - DNA, 249 bp, Homo sapiens
ctttttttttttacatattagaactcaatgaagaattatttaaaagagaggaaaggcagtgcagggctggaggtcctggagggtggcggcgggtcgtcctaactagcaggctgaaaggtgctggaggggatgccttcactcagaggaagttcacagccacctgccttggaacatgtacctgttcatcttttcgtaatgttagtattcattttgctatcttcctgttgccatttccaaacagtgtcaggg

SEQ ID NO: 712 - DNA, 2434 bp, Homo sapiens
acgcgtccgggaggcttaggacccagggggcgcctttcagctgaaaaacagctcgcgctgcagcaagctagctgggaagctcccagttctaaagagaggctgtttaccagaacagcataacaagggcaggtctgactgcaaggctgggactgggaggcagagccgccgccaagggggcctcggttaaacactggtcgttcaatcacctgcaagacgaaggaggcaaggatgctgttggcctgggtacaagcattcctcgtcagcaacatgctcctagcagaagcctatggatctggaggctgtttctgggacaacggccacctgtaccgggaggaccagacctcccccgcgccgggcctccgctgcctcaactggctggacgcgcagagcgggctggcctcggcccccgtgtcgggggccggcaatcacagttactgccgaaacccggacgaggacccgcgcgggccctggtgctacgtcagtggcgaggccggcgtccctgagaaacggccttgcgaggacctgcgctgtccagagaccacctcccaggccctgccagccttcacgacagaaatccaggaagcgtctgaagggccaggtgcagatgaggtgcaggtgttcgctcctgccaacgccctgcccgctcggagtgaggcggcagctgtgcagccagtgattgggatcagccagcgggtgcggatgaactccaaggagaaaaaggacctgggaactctgggctacgtgctgggcattaccatgatggtgatcatcattgccatcggagctggcatcatcttgggctactcctacaagagggggaaggatttgaaagaacagcatgatcagaaagtatgtgagagggagatgcagcgaatcactctgcccttgtctgccttcaccaaccccacctgtgagattgtggatgagaagactgtcgtggtccacaccagccagactccagttgaccctcaggagggcagcaccccccttatgggccaggccgggactcctggggcctgagcccccccagtgggcaggagcccatgcagacactggtgcaggacagcccaccctcctacagctaggaggaactaccactttgtgttctggttaaaaccctaccactcccccgcttttttggcgaatcctagtaagagtgacagaagcaggtggccctgtgggctgagggtaaggctgggtagggtcctaacagtgctccttgtccatcccttggagcagattttgtctgtggatggagacagtggcagctcccacagtgatgctgctgctaagggcttccaaacattgcctgcacccctggaactgaaccagggatagacggggagctcccccaggctcctctgtgctttactaagatggcctcagtctccactgtgggcttgagtggcatacactgttattcatggttaaggtaaagcaggtcaagggatggcattgaaaaaatatatttagtttttaaaatatttgggatggaactccctactgacctctgacaactggaaacgagtttgtactgaagtcagaactttgggttgggaatgagatctaggttgtggctgctggtatgcttcagcttgctggcaatgatgtgccttgacaaccgtgggccaggcctgggcccagggactcttcctgtttcataaggaaaggaagaattgcactgagcattccacttaggaagaggatagagaaggatctgctccgcctttggccacaggagcagaggcagacctgggatgccccagtttctcttcagggatggatagtgacctgtcttcattttgcacaggtaagagagtagttagctaacctatgggaattatactgtggggccttgtgagctgcttctaagaggctaacctggaaactaagctcagaggcaaggtaataaagcacttcagggcttgctccccaagtgggcctgatttagcaggtggtcctgcgggcgtccaggtcagcaccttcctgtagggcactggggctagggtcacagcccctaactcataaagcaatcaaagaaccattagaaagggctcattaagccttttggacacaggaccccagagaggaaaaagtgacttgcccaaggtcgtaagcaagctactggcatggcaagagcccagcttcctgacggagcgcaacatttctccactgcactgtgctagcagctcagcagggcctctaacctgtgatgtcacactcaagaggccttggcagctcctagccatagagcttcctttccagaacccttccactgcccaatgtggagacaggggttagtggggctttctatggagccatctgctttggggacctagacctcaggtggtctcttggtgttagtgatgctggagaagagaatattactggtttctacttttctataaaggcatttctctataaaaaaaaaaaa

SEQ ID NO: 713 - DNA, 2062 bp, Homo sapiens
cccgactctaggccggaagcgcgcggagaccatgtagtgagaccctcgcgaggtctgagagtcactggagctaccagaagcatcatggggccctggggagagccagagctcctggtgtggcgccccgaggcggtagcttcagagcctccagtgcctgtggggctggaggtgaagttgggggccctggtgctgctgctggtgctcaccctcctctgcagcctggtgcccatctgtgtgctgcgccggccaggagctaaccatgaaggctcagcttcccgccagaaagccctgagcctagtaagctgtttcgcggggggcgtctttttggccacttgtctcctggacctgctgcctgactacctggctgccatagatgaggccctggcagccttgcacgtgacgctccagttcccactgcaagagttcatcctggccatgggcttcttcctggtcctggtgatggagcagatcacactggcttacaaggagcagtcagggccgtcacctctggaggaaacaagggctctgctgggaacagtgaatggtgggccgcagcattggcatgattgggccaggggtcccacaggcgagtggagccccagcaaccccctcagccttgcgtgccctgtgtactggtgttctccctggccctccactccgtgttcgaggggctggcggtagggctgcagcgagaccgggctcgggccatggagctgtgcctggctttgctgctccacaagggcatcctggctgtcagcctgtccctgcggctgttgcagagccaccttagggcacaggtggtggctggctgtgggatcctcttctcatgcatgacacctctaggcatcgggctgggtgcagctctggcagagtcggcaggacctctgcaccagctggcccagtctgtgctagagggcatggcagctggcacctttctctatatcacctttctggaaatcctgccccaggagctggccagttctgagcaaaggatcctcaaggtcattctgctcctagcaggctttgccctgctcactggcctgctcttcatccaaatctagggggcttcaagagaggggcaggggagattgatgatcaggtgcccctgttctcccttccctcccccagttggggggaataggaaggaaaggggaagggaaatactgaggaccaaaaagttctctgggagctaaagatagagcctttggggctatctgactaatgagagggaagtgggcagacaagaggctggccccagtcccaaggaacaagagatggtcaagtcgctagagacatatcaggggacattaggattggggaagacacttgactgctagaatcagaggttggacactatacataaggacaggctcacatgggaggctggaggtgggtacccagctgctgtggaacgggtatggagaggtcataaacctacaatcagtgtcctgttggtcctagcccatttcagcaccctgccacttggagtggaccctcctactcttcttagcgcctaccctcatacctatctccctcctcccatctcctaggggactggcgccaaatggtctctccctgccaattttggtatcttctctggcctctccagtcctgcttactcctctattttaaagtgccaaacaaatccccttcctctttctcaaagcacagtaatgtggcactgagccctacccagcacctcagtgaagggggcctgcttgctctttattttggtcccggatcctggggtggggcagaaatattttctgggctggggtaggaggaaggttgttgcagccatctactgctgctgtaccctaggaatatggggacatggacatggtgtcccatgcccagatgataaacactgagctgccaaaacatttttttaaatacacccgaggagcccaagggggaagggcaatgcctacccccagcgttatttttggggagggagggctgtgcatagggacatattctttagaatctattttattaactgacctgttttgggacctgttacccaaataaaagatgtttctagaaaaaaaaaaaaaaaaaa

SEQ ID NO: 714 - DNA, 1370 bp, Homo sapiens
ctagtttacccatagaggaaatccttcaaaaaccttcattagaaaactgccacagtaagaagtcctgcttcttaaagcagctgcttattcagctgttaagttctactcctatggaagctattttactgaacctaaatctgtttctgtatttgtttccttcatatgacggtcaatacatcttcccttctagcattaaatgtcctcccagatctctcattcttccctcttctgctctcatttgtactgttagacttcctccctcttttttttttttttttttttaaagagatggggatctcactatgttggccggggtggtctggaactccagggctcaatcagtccttccacctaagcctccaaagtgctggaattactagtgtgagccaccgtgtccgggcccctcatttttgttcctamtcttgaytcttcatcacagtgtctttcctacatcttcctcagtgccttcacaatgtaaatagaaatgaaacccacaaataatagcaagacaacttttctttactcctgttctctgtgcttttatcaaaaatgtaatattttaaacaaatccatggctatttctgtgcagctgtgaccagtagggaaaactccagctgctgatgactgtgctttgtcatatatttggagtaatcccattattattaaaataatttgaaaattatttttgccccaagacacaaaagctgaaatactcttttcacaaagtattattggtaggttagtagtgatttataaatatataattaggatttatttttctcagtgtttcttcattgcttggcccctttctaaccttcattgactgaaagcagatgtttatatcaccatctctgattttgcagaattgatctgtccttacactgcatttagcattgattgtgtatggaacataaattgcttttctgatgcatatgattccatagctctttgaatttgtgactgtgtactataacctatttaattgaaaagaatgtgctaaaatttagtcattgtccattctgctaacaaaagcagttaaaacatgctagagaaatatatcagaattttaagaaagaggccggatttggtggctccatgcctgtaatccccagtgcttttgagaggctgaggcaagaggatcacctgaggttcaggagtttcaagatccggctgaccaacatggtgaaaccctgtctctactaaaagtaaaaaaagttagttcgggcatggaagcgcatgccggctactcaggaggctgaggcacgagaattgtttgaacctgggaggctgaagttacagtgagttgagatcaggccattgcactccagcctaggcaacaagagcaaaagtgtgtctcaaaaaaaaaaaaa

SEQ ID NO: 715 - DNA, 1347 bp, Homo sapiens
  misc_feature (1276)..(1276): n equals a,t,g, or c
  misc_feature (1289)..(1289): n equals a,t,g, or c
  misc_feature (1293)..(1293): n equals a,t,g, or c
  misc_feature (1320)..(1320): n equals a,t,g, or c
gctggagagtaaaaagaactgggggtaagagcccctctgcctagcactgctcccccaaggctcccagaaatctcaggtcagaggcacggacagcctctggagctctcgtctggtgggaccatgaactgccagcagctgtggctgggcttcctactccccatgacagtctcaggccgggtcctggggcttgcagaggtggcgcccgtggactacctgtcacaatatgggtacctacagaagcctctagaaggatctaataacttcaagccagaagatatcaccgaggctctgagagcttttcaggaagcatctgaacttccagtctcaggtcagctggatgatgccacaagggcccgcatgaggcagcctcgttgtggcctagaggatcccttcaaccagaagacccttaaatacctgttgctgggccgctggagaaagaagcacctgactttccgcatcttgaacctgccctccacccttccaccccacacagcccgggcagccctgcgtcaagccttccaggactggagcaatgtggctcccttgaccttccaagaggtgcaggctggtgcggctgacatccgcctctccttccatggccgccaaagctcgtactgttccaatacttttgatgggcctgggagagtcctggcccatgccgacatcccagagctgggcagtgtgcacttcgacgaagacgagttctggactgaggggacctaccgtggggtgaacctgcgcatcattgcagcccatgaagtgggccatgctctggggcttgggcactcccgatattcccaggccctcatggccccagtctacgagggctaccggccccactttaagctgcacccagatgatgtggcagggatccaggctctctatggcaagaagagtccagtgataagggatgaggaagaagaagagacagagctgcccactgtgcccccagtgcccacagaacccaktcccatgccagacccttgcagtagtgaactggatgccatgatgctgggtgaggcccctcccctccaggctgttggcaggcggtgggggcagcctgctgatcctgaggcctggacaaatgggaagtgacatgggacttcagcatgagcaatggagggccccgtgggaagacctatgctttcaagggggactatgtgtggactgtatcagattcaggaccgggccccttgttccgagtgtctgcctttgggaggggctccccggaaacctggatgctgctgtctactcgcctcgaacacaatgggattcnaaccctttttttncccntttttttttaaaaaagggggggggggncctttccccgggggttaacctttgggc

SEQ ID NO: 716 - DNA, 1574 bp, Homo sapiens
acagggcaggggcactcggcagttcccagaggccacccctcccaccccagacatccagacatctggaactttgggtgccaagagtccagcttaatgcaggcagcctggcttttgggggctttggtggtcccccagctcttgggctttggccatggggctcggggagcagagagggagtgggagggaggctggggaggtgcccaggaggaggagcgggagagggaggccctgatgctgaaggtgagctctggagtgtcagggagctatgggtggtgaactgtgggtctgggagggggtattgcaaggttagggaaatggacaatgaggagcgattgggatagtctcagaggagtgggagggtgatgggctcagagacaggactcaggcagcagagaatgagttatgagttggaaaggggtgaatggggcatcttggtggcaggctggggctcaccacccctcccctgccccagcatctgcaggaagccctaggactgcctgctgggaggggggatgagaatcctgccggaactgttgagggaaaagaggactgggagatggaggaggaccagggggaggaagaggaggaggaagcaacgccaaccccatcctccggccccagcccctctcccacccctgaggacatcgtcacttacatcctgggccgcctggccggcctggacgcaggcctgcaccagctgcacgtccgtctgcacgcgttggacacccgcgtggtcgagctgacccaggggctgcggcagctgcggaacgcggcaggcgacacccgcgatgccgtgcaagccctgcaggaggcgcagggtcgcgccgagcgcgagcacggccgcttggagggctgcctgaaggggctgcgcctgggccacaagtgcttcctgctctcgcgcgacttcgaagctcaggcggcggcgcaggcgcggtgcacggcgcggggcgggagcctggcgcagccggcagaccgccagcagatggaggcgctcactcggtacctgcgcgcggcgctcgctccctacaactggcccgtgtggctgggcgtgcacgatcggcgcgccgagggcctctacctcttcgaaaacggccagcgcgtgtccttcttcgcctggcatcgctcaccccgccccgagctcggcgcccagcccagcgcctcgcgcatccgctcagcccggaccagcccaacggtggcacgctcgagaactgcgtggcgcaggcctctgacgacggctcctggtgggaccacgactgccagcggcgtctctactacgtctgcgagttccccttctagcggggccggtaccccgcctccttgcccatcccaccacccggcctttccctgcgccgtgcccaccctcctccggaatcgcccttcccttcctggccacgaatggcagcgtcctccccgacccccagtctgggcgcttctgggagggctcttgcggtgccggcactcctccttgttagtgtctttccttgaaggggcgggcaccaggctaggtccggtgccaataaatccttgtggaatctgacttgaaaaaaaaaaaaaaaaaaaaaaaaaaaaaaaaa

SEQ ID NO: 717 - DNA, 2145 bp, Homo sapiens
ccacgcgtccggtgtggacctggactcgaatcccgttgccgactcgcgctctcggcttctgctccggggcttcttccctgcccgcccggggccctgaccgtggcttcttccccggcctgatctgcgcagcccggcgggcgcccagaaggagcaggcggcgcgggggcgcgctgggcgggggaggcgtggccggagctgcggcggcaagcgggctgggactgctcggccgcctcctgcccggcgagcagctcagaccatgtcgcctgaagaatggacgtatctagtggttcttcttatctccatccccatcggcttcctctttaagaaagccggtcctgggctgaagagatggggagcagccgctgtgggcctggggctcaccctgttcacctgtggcccccacactttgcattctctggtcaccatcctcgggacctgggccctcattcaggcccagccctgctcctgccacgccctggctctggcctggactttctcctatctcctgttcttccgagccctcagcctcctgggcctgcccactcccacgcccttcaccaatgccgtccagctgctgctgacgctgaagctggtgagcctggccagtgaagtccaggacctgcatctggcccagaggaaggaaatggcctcaggcttcagcaaggggcccaccctggggctgctgcccgacgtgccctccctgatggagacactcagctacagctactgctacgtgggaatcatgacaggcccgttcttccgctaccgcacctacctggactggctggagcagcccttccccggggcagtgcccagcctgcggcccctgctgcgccgcgcctggccggccccgctcttcggcctgctgttcctgctctcctctcacctcttcccgctggaggccgtgcgcgaggacgccttctacgcccgcccgctgcccgcccgcctcttctacatgatccccgtcttcttcgccttccgcatgcgcttctacgtggcctggattgccgccgagtgcggctgcattgccgccggctttggggcctaccccgtggccgccaaagcccgggccggaggcggccccaccctccaatgcccaccccccagcagtccggagaaggcggcttccttggagtatgactatgagaccatccgcaacatcgactgctacagcacagatttctgcgtgcgggtgcgcgatggcatgcggtactggaacatgacggtgcagtggtggctggcgcagtatatctacaagagcgcacctgcccgttcctatgtcctgcggtgagtgagcccgcccagtctcaggtgacactgcagaactacatctcccagcaggccccagggtagcctgcagcgtccctggctgggcccctgcccccggaggctcatgggaattgtagtttgtttagcctggttttgccctgcctctaattatagtggcagcatgccggtgtaaaatcgttccccctctcggggcctcagttgctacttctgtaaagtcagcctcactcagcagaagcaatgtactgagtcctgtggactcaatagccagccttcctggaatcttggccgtccaggttatggagaaaccttgaggagttagttgacctcttagttgcctcaagtgttgaatggagtgaatgctatttattactggtttcataggtagatagaaggactaaatgtgataaaatgtgaaatgtatttaatgtgaggcctgacaggtaagtgcgtgctgtgtattcatttttattgtttttcattcttccaatatttctcgagtggagactctgtgcttgacactgttatctgtgcagcctttagaagcagaaactcagccgggtgcggcagctcacgcctggaatcccagcactttgggaggcccaagcaggtggatcatgaggtcaggagttcgagaccagcctgaccaacatggtgacatgctgtctctactaaaaatacaaaaaattaccctggtgtggtggtgggcgcctgtagtcccagctactcgggaggctgaggcaggagaatggcttgaacccgggaggcagaggttgcagggagctgggatctcgccactgcactccagcctgggcgacagcgagactccgtctcaaaaaaaaaaaaaaaaaaaaaagg

SEQ ID NO: 718 - DNA, 3009 bp, Homo sapiens
ccgggctgggcgccgccgccggttcgtctactctttccttcagccgcctcctttcaaccttgtcaacccgtcggcgcggcctctggtgcagcggcggcggctcctgttcctgccgcagctctctccctttcttacctccccaccagatcccggagatcgcccgccatggctttacttactgcggccgcccggctcttgggaaccaagaatgcatcttgtcttgttcttgcagcccggcatgccagtgcttcctccacgaatttgaaagacatattggctgacctgatacctaaggagcaggccagaattaagactttcaggcagcaacatggcaagacggtggtgggccaaatcactgtggacatgatgtatggtggcatgagaggcatgaagggattggtctatgaaacatcagttcttgatcctgatgagggcatccgtttccgaggctttagtatccctgaatgccagaaactgctacccaaggctaagggtggggaagaacccctgcctgagggcttattttggctgctggtaactggacatatcccaacagaggaacaggtatcttggctctcaaaagagtgggcaaagagggcagctctgccttcccatgtggtcaccatgctggacaactttcccaccaatctacaccccatgtctcagctcagtgcagctgttacagccctcaacagtgaaagtaactttgcccgagcatatgcacagggtatcagccgaaccaagtactgggagttgatttatgaagactctatggatctaatcgcaaagctaccttgtgttgcagcaaagatctaccgaaatctctacagagaaggcagcggtattggggccattgactctaacctggactggtctcacaatttcaccaacatgttaggctatactgatcatcagttcactgagctcacgcgcctgtacctcaccatccacagtgaccatgagggtggcaatgtaagtgcccataccagccatttggtgggcagtgccctttccgacccttacctgtcctttgcagcagccatgaacgggctggcagggcctctccatggactggcaaatcaggaagtgcttgtctggctaacacagctgcagaaggaagttggcaaagatgtgtcagatgagaagttacgagactacatctggaacacactcaactcaggacgggttgttccaggctatggccatgcagtactaaggaagactgatccgcgatatacctgtcagcgagagtttgctctgaaacacctgcctaatgaccccatgtttaagttggttgctcagctgtacaagattgtgcccaatgtcctcttagagcagggtaaagccaagaatccttggcccaatgtagatgctcacagtggggtgctgctccagtattatggcatgacggagatgaattactacacggtcctgtttggggtgtcacgagcattgggtgtactggcacagctcatctggagccgagccttaggcttccctctagaaaggcccaagtccatgagcacagagggtctgatgaagtttgtggactctaagtcagggtaaaactggagactgggtgaaagtgactaccagaaagtgaggaagcctaaataaaaagtatacttttgtttcagggggcctttaaagacttaagattaaattatatctgaggcactgataatatgtttgaggttaaaatataaattaagactttaaaagatgaaaaatggtcccttcttccctaatcagctcccttcccctgcctggtatgagttgcccatcatacgcatggtcctggaggatgaccaggactaatgcatgtggtatgagtaggtttggccccctcactatctctagagtgagaatctggctcctgtttccatgggtcaaagccggttgcagagaatctgtagtcactttggagctttagcttctctgccaagccctcaataagccagcaaaccaggactctgccccttctgtttccataggaatcatgttggatagtcagctgtaccaagccccttggccctctcccatgcacacaaacacctcctagcaagacctgttggttagctggacatgctttggcaatttttttatactaccaagtgaccataaaggcatggcatttgttgtgactggcacccaatgtttgattttttttttaaaactatccaattaaaattaaggtctgggagtgttctgtttcccattactttaatactcacctcctcccagactttctacacctgttgcacctcaggcagaggatgttctggacctccccctcttggtccctactagagacctctcaacagatctgtgggcccagtcattgggttttatcagtgcttaatgtgaactaagttttttacttccacagaatacaagccactaccttctgacctccccaccccccaccaacccccatcttttaatatgctgtggggcatagaactccggaatgaccagcatgatattttcagagtcttgtccccggggtattagcacctctttttgaacagggaattgattcaagattggacatggtctcctctgattatcaggtactggggctgagggcattaaaaatagtaagcctccctcctcgtcccctgcctcaagaaattgcctccttatttatcaacatctttttcctccctttccctgagagctcacagtacaatgtttcagaagccccatttgcacaggttttcagcaactcagaatgctctacttctttttctttgagaaaggattaagatacactcctgctgtgcccccatctttcctccaaactcctgcctgtgtttgtgtggatacccagtcccagaaccacactgttgagttggacacactgtaaacccctgggtaactgtcaagtcatgatggagacttcaggttgttctgtataaaatgcaaaataaatgtttttattaacaatgaaaaaaaaaaaaaaaaaaaaaaaaaaaaaaaaaaaaaaaaaaaaaaaaaaaaaaaaaa

SEQ ID NO: 719 - DNA, 2152 bp, Homo sapiens
ccacgcgtccggcaggagtgtatgtgagtgtgtgtgtgcatacatgtgtgtgtatgtgtgtgcatacatgtgtgtgtatgtgtgtgcatacgtgtgtgtgtgtgcatgcatgtgtgtgggcgcatgtgtgcatgtgtgtgtgtgagtgtgtgtgttggggaggaggcatggcccttgggaaggtctgtccaggttggaagccacactccctcccctcagcatggaggtgggcgtgtgcgtggaggcctatcgccaggaggctgagacccaccggcgccacatcaacagtgcctttatgacctttgtggtcctggacgcagatgaccagccccagttgctgccctggattcggccccagcccggcgatggtgagcggcggtaccgagaggccagtgccagaaagaagatccgcctggacaggaagtacatcgtgtcctgtaagcagacagaggtgcccctctccgtcccctgggaccctagcaaccaggtgtacctgagctacaataacgtctcctccttgaagatgcttgtggccaaggacaactgggtgctgtcctcggagatcagtcaggtccgcctgtacactctggaggatgacaagttcctctccttccacatggagatggtggtgcatgtggatgcagcccaggccttcctgctgctctcggacctgcgtcagaggccagagtgggacaagcactaccggagcgtggagctagtgcagcaggtagacgaggacgacgccatctaccacgtcaccagccctgccctcggaggtcacacaaagccccaggacttcgtgatcctggcctcgaggcggaagccttgtgacaatggggacccctatgtcatcgcgctgaggtcggtcatgctgcccacacaccgagagacgccagagtacagacgcggagagaccctctgctcaggcttctgcctctggcgcgagggggaccagctgaccaaggtatcctactacaaccaggccaccccaggtgttctcaactatgtgaccaccaacgtggccggcctctcctctgagttctacaccaccttcaaggcttgtgagcagtttctcttggacaaccggaatgatctggcccccagcctccagaccctctagatgccctcagtggccacatcatgcccactcccactccatcctgtccccaaggactcacatacagtgcctggagaaagccaaagacctttatttcttcctgcctccccgtgggaagcctccgccctgaggtccgctggcccaccacccctgggtgctcagtttctaccaacatgagccagcaagtccttgtggtagccctggggtagcctgtagtagactcgggtcctgtccacagccctagctgccagcaatgctgtcctcacagaggcatagtcgcccccagctgggttgtgctccactgtgacggtggcccggggggaggatgccagcagcctgcctatggctccagctgtgctgtggcccagcagcatggcctgcatctggaaggacacaggttgccagagcccctggcacaactctagcatatctgtgagcagctgttccctgtagccactgcccagcacctcctcaggccagcctggtgccacagtcacgtgggggaagacctcagccacagctgtaagcagctctctgccagccacatggccggggaccgaaaaactcccgtgggagattttggccccaacccacacaggccaatgcaagaggccaaggctggagaggcgtgccagcaaggccagggatggccggagggctgcgggctccgctatttgcaaatggatgccccagtgtccgggatgtgtggccagctgctgcaggcaggactccagcgtcaggatgttgccacttggagtatgaacaatgggcacggggttttcagccacagttccctcgaggccagtgttcagcaggatcatgccttctgtgtctggaagaggcggcagaggcaacagtgtttaggatttgggttatcataaggtgttaagagtcccttgttaaaggggcagtgggagttatggggtcatcaaggaccttgcctctctggaatctgtcaacccagttttgggctccaggtggatgggttgctttataaatgtgcctggtgcatgagaaaaaaaaaaaaaaaaaagg

SEQ ID NO: 720 - DNA, 624 bp, Homo sapiens
  misc_feature (570)..(570): n equals a,t,g, or c
ggcacgagcgggcgcctgtagtcccagctactcgggaggctgaggcaggagaatggcgtgaacccgggaggcagagcttgcagtgagccgagatggctccactgcactccagcctgggcgacagagtgagactccgtcacttaaaaaagttccagaaggcctggcgctctttctattgtcactgcaatttctgatgatggagagaatgcatatttttttgctaaagagtccaatcctatctccttgtttggtcctctttgctctggaattgctctttctgcagaggggattttctactttaaaagaaaaagaagatcatgatgaagaaggaagtactctcaaatttcttcagcctttctcagcttactgctggactcctgccagaatattagagtatctttttagagctgcatatctagggttcaggatgcctctttttcttccactaatttcctgttaatagggtgtgttgttgtttttcccacacacatttattaagtgtgtgctctgctagtatcaaaagaaacagatatggctagagaatgagctgccaccttggtgctcccagtntagtagggaaaacaaaaataaaaattaaattatatcaaaaaaaaaaaaaaaaaa

SEQ ID NO: 721 - DNA, 2622 bp, Homo sapiens
ggcacgagtagagccgatctcccgcgccccgaggttgctcctctccgaggtctcccgcggcccaagttctccgcgccccgaggtctccgcgccccgaggtctccgcggcccgaggtctccgcccgcaccatgcggctgggcagtcctggactgctcttcctgctcttcagcagccttcgagctgatactcaggagaaggaagtcagagcgatggtaggcagcgacgtggagctcagctgcgcttgccctgaaggaagccgttttgatttaaatgatgtttacgtatattggcaaaccagtgagtcgaaaaccgtggtgacctaccacatcccacagaacagctccttggaaaacgtggacagccgctaccggaaccgagccctgatgtcaccggccggcatgctgcggggcgacttctccctgcgcttgttcaacgtcaccccccaggacgagcagaagtttcactgcctggtgttgagccaatccctgggattccaggaggttttgagcattgaggttacactgcatgtggcagcaaacttcagcgtgcccgtcgtcagcgccccccacagcccctcccaggatgagctcaccttcacgtgtacatccataaacggctaccccaggcccaacgtgtactggatcaataagacggacaacagcctgctggaccaggctctgcagaatgacaccgtcttcttgaacatgcggggcttgtatgacgtggtcagcgtgctgaggatcgcacggacccccagcgtgaacattggctgctgcatagagaacgtgcttctgcagcagaacctgactgtcggcagccagacaggaaatgacatcggagagagagacaagatcacagagaatccagtcagtaccggcgagaaaaacgcggccacgtggagcatcctggctgtcctgtgcctgcttgtggtcgtggcggtggccataggctgggtgtgcagggaccgatgcctccaacacagctatgcaggtgcctgggctgtgagtccggagacagagctcactggccacgtttgaccggagctcaccgcccagagcgtggacagggcttccatgagacgccaccgtgagaggccaggtggcagcttgagcatggactcccagactgcaggggagcacttggggcagcccccagaaggaccactgctggatcccagggagaacctgctggcgttggctgtgatcctggaatgaggccctttcaaaagcgtcatccacaccaaaggcaaatgtccccaagtgagtgggctccccgctgtcactgccagtcacccacaggaagggactggtgatgggctgtctctacccggagcgtgcgggattcagcaccaggctcttcccagtaccccagacccactgtgggtcttcccgtgggatgcgggatcctgagaccgaagggtgtttggtttaaaaagaagactgggcgtccgctcttccaggacggcctctgtgctgctggggtcacgcgaggctgtttgcaggggacacggtcacaggagctcttctgccctgaacgctcccaacctgcctcccgcccggaagccacaggacccactcatgtgtgtgcccacaagtgtagttagccgtccacaccgaggagcccccggaagtccccactgggcttcagtgtcctctgccacattccctgggaggaacaatgtccctcggctgttccggtgaaaagttgagccacctttggaagacgcacgggtggagtttgccagaagaaaggctgtgccagggccgtgtttggctacaggggctgccggggctcttggctctgcagcgagaaagacacagcccagcagggctggagacgcccatgtccagcaggcgcaggcctggcaacacggtccccagagtcctgagcagcagttaggtgcatggagagggtatcacctggtggccacagtcccccttctcacctcagcaatgatccccaaagtgagaggtggctcccccggcccccaccaccctcagcagccccaccccactcaaccctgagggtccccagggtcctgatgaagacctccgaccccagcgccaggctcctcggagcccaacagtcccaagggggcaggagacggggtggtccagtgctgaggggtacagccctgggccctgaccagccccggcacctgccatgctggttcccggaatgaatcagctgctgactgtctccagaagggctggaaaggatgctgccaggtgacccgaggtgcactcgccccagggagatggagtagacagcctggcctggccctcgggacacattgtctgccccggggctatgggcaaatgcccctccttcttacttcccagaatcccctgacattcccagggtcagccaggacctgttacagccctggtcacttggaactgacagctgtgtgaggcctgcacttctcagacccagacttagaacaaaaggaggagtgaggactcaaggctacaatgaggttccagtacttgttacaagaaattggttttctgcaaaaaaagtccctacctgagcctttaggtgaatgtgggatccactcccgcttttaacatgaaagcattagaagatgtgtggtgtttataaaaaaaaaaaaaaaaaaa

SEQ ID NO: 722 - DNA, 535 bp, Homo sapiens
  misc_feature (127)..(127): n equals a,t,g, or c
  misc_feature (420)..(420): n equals a,t,g, or c
  misc_feature (530)..(530): n equals a,t,g, or c
ggcagagccccgactgtgcgccgcggctggctcgggttcccgggccgacatgggcgccgccgcgtgggcacggccgctgagcgtgtctttcctgctgctgcttctgccgctcccggggatgcccgcnggctcctgggacccggccggttacctgctctactgcccctgcatggggcgctttgggaaccaggccgatcacttcttgggctctctggcatttgcaaagctgctaaaccgtaccttggctgtccctccttggattgagtaccagcatcacaagcctcctttcaccaacctccatgtgtcctaccagaagtacttcaagctggagcccctccaggcttaccatcgggtcatcagcttggaggatttcatggagaagctggcacccacccactggccccctgagaagcgggtggnatactgctttgaggtggcagccagcgaasccagataagaagcgtgcccatgaaggaaggaaaccctttggccattctggatmagttcatgtgrgtttcaacaagtcgggngcttt

SEQ ID NO: 723 - DNA, 1754 bp, Homo sapiens
tcgacccacgcgtccgagcgtgtctggccctaggtgggaaaagaactggctgtgacctttgccctgacctggaagggcccagccttgggctgaatggcagcacccacgcccgcccgtccggtgctgacccacctgctggtggctctcttcggcatgggctcctgggctgcggtcaatgggatctgggtggagctacctgtggtggtcaaagagcttccagagggttggagcctcccctcttacgtctctgtgcttgtggctctggggaacctgggtctgctggtggtgaccctctggaggaggctggccccaggaaaggacgagcaggtccccatccgggtggtgcaggtgctgggcatggtgggcacagccctgctggcctctctgtggcaccatgtggccccagtggcaggacagttgcattctgtggccttcttagcactggcctttgtgctggcactggcatgctgtgcctcgaatgtcactttcctgcccttcttgagccacctgccacctcgcttcttacggtcattcttcctgggtcaaggcctgagtgccctgctgccctgcgtgctggccctagtgcagggtgtgggccgcctcgagtgcccgccagcccccatcaacggcacccctggccccccgctcgacttccttgagcgttttcccgccagcaccttcttctgggcactgactgcccttctggtcgcttcagctgctgccttccagggtcttctgctgctgttgccgccaccaccatctgtacccacaggggagttaggatcaggcctccaggtgggagccccaggagcagaggaagaggtggaagagtcctcaccactgcaagagccaccaagccaggcagcaggcaccacccctggtccagaccctaaggcctatcagcttctatcagcccgcagtgcctgcctgctgggcctgttggccgccaccaacgcgctgaccaatggcgtgctgcctgccgtgcagagcttttcctgcttaccctacgggcgtctggcctaccacctggctgtggtgctgggcagtgctgccaatcccctggcctgcttcctggccatgggtgtgctgtgcaggtccttggcagggctgggcggcctctctctgctgggcgtgttctgtgggggctacctgatggcgctggcagtcctgagcccctgcccgcccctggtgggcacctcggcgggggtggtcctcgtggtgctgtcgtgggtgctgtgtcttggcgtgttctcctacgtgaaggtggcagccagctccctgctgcatggcgggggccggccggcattgctggcagccggcgtggccatccaggtgggctctctgctcggcgctgttgctatgttccccccgaccagcatctatcacgtgttccacagcagaaaggactgtgcagacccctgtgactcctgagcctgggcaggtggggaccccgctccccaacacctgtctttccctcaatgctgccaccatgcctgagtgcctgcagcccaggaggcccgcacaccggtacactcgtggacacctacacactccataggagatcctggctttccagggtgggcaagggcaaggagcaggcttggagccagggaccagtgggggctgtagggtaagcccctgagcctgggacctacatgtggtttgcgtaataaaacatttgtatttaaaaaaaaaaaaaaaaaaaaaaaaaaaaaaaaaaaaaaaaaaaaaaaaaaaaaaaaaaaagggcggcc

SEQ ID NO: 724 - DNA, 646 bp, Homo sapiens
ggatctcctgacctcatgatccgctcacctcagcctctcagtgtgctgggattacaggcgtgagccaccgctcccggccctaaaatggaatttcagcccctccttgccaaactctgaacttctggaatcaaacaggttgtgaattatttatttgtagactcttggtgtacaaattgtagtctaaacattctgtgatggtaatagaatgttttctatatctcatgtgtgggttaagtttgtaacagttataaatgttacaattctctgggcacattgcttgagttcaggagttcgagaccagcctgggcaacatggcgaacccccgtctctacaaaaaatagaaaaattagtgcatggtggctcacgcctgtaatcccaacacttgggaggctgaggcgggtggatcacatgatgccaggagtttgagaccagcctggccaacaaagcgaaaccccatctctaccaaaaatacaaaaattagccaggtgtagtagtgcatgcctgtaatcccagctactcgggaggctgaagcacaagaattgcttgaacccaggaggtgatggttgcagtgagccgagatcacaccactgcacccagcctgggcgacagagcaagactgtctcaaaaaaaaaaaaaaaaaactcga

SEQ ID NO: 725 - DNA, 890 bp, Homo sapiens
ggcacgagctgggactgggtgcactggttcctgaggatgcgcgcctatgactacatgtgcatgggcttcgtgctgctctccttggccgacacccttcggtactgggcctccatctacttctgtatccacttcctggccctggcagccctggggctggggctggctttaggtgggggcagccccagccggcggaaggcagcatcccagcccaccagccttgccccggagaagctccgggaggagtaagctgtcacgacgctccctctgccagctggtcccgggaattctgtgaaccaggctgctgtctcctccccagaaagagtccttaccttggagagggtcctggagagaatttcctcttccccagctaaataccctgcctgcaactgaagcagacccgggggtgtcctccctgccctctgcccagaggccacctccactcctacaaaatcaaagtattgtccagacaagagtcactggcccctgctccagcttctgggtatccagagagcactgcacttccccaaaacggaaggggcccctgggcagtgggttttgggcaaattccctttgtttgcatccacaatgtggggtcggagcttgggggcaggtcctgggagtgggaagcctcttccttgtgtctttcgctccacttttagctcatcgcaccaatattgcagacttggaaggaagcataagcttcccatttcacaaaggggaaactgaggtgcgggtgcgcgggcctggggacggccgtcccatggcttccatctgagccacctcgggaccccagcgctcctggcgccctcttctcatcgcttggcctatgacaggtcaccgtgtgtaaatctttcccaataaagtgttgcacaaaaaaaaaaaaaaaaaaa

SEQ ID NO: 726 - DNA, 2356 bp, Homo sapiens
  misc_feature (2356)..(2356): n equals a,t,g, or c
gaaacacaccatttacattccatgttgaacactatcttttataaaacattactttcaaagaattaataccttaatgatctacaagtttagagtataaggttaggaatatctggtgatatagattatagaatggactggccaaaaacaaaatcatagtatactaaatgatgaaaacacaattactctttacagttttatatgtatttgttttagctgagaggtttttaataagcactatgattaattctgatcatttccccactagtaccacatcatccaaaggtaaggtcattctctataccctgagaattagtagtttaaatcttttgttaatgctcctccgaagtttttcagggggtaaaagtaacatcagtggagggtattattttaaataaattttaattgagaatttgttgcattttcagcaaattttaaaacatttttaggttttacagagattttaacctttaaacaacagatctttaaaaaacaggtgaatacaagtgagtttaacaaagaaacatttagaatagatctgaatgtaagaactacagaactgtttcagaaataaaacatactaccttgatgtgacatttttttcttaaccttgttgagctggttttgttcagcttaatttactgttcaaaggcattatctgttggtcacaccagtgggtatatgattgaatttagggaacagggttgacacagcagggctagtcctgcatattttttcttaaatatttcccaattgtgtttttcattatttcttttcaatatataacttttataacaaattattagctttgatcttgtagtttaaaattgcagggaactggggtaatcttttactgagctggatcttagagaaaatgaatatttaaattttaaagtttgcacatttcatctttgtcctaacatgagtgcttgtaacaaaataaacaacaaaaacaaagccaaaaactacctttatccatatgtgaaattatagatgaggcatacgaatttgtttaatgcttcccttcccttcccacatatcatctcactgcctattatctggtgtcacctcatgtatcgtaagttaatactaaaagaagagaaagcacttaagtttcacagaagccgttatgtttgtagtaatgggtcattgcctactaatgaactccatcactgtacacagaatgaagaataatgcatgttaattttcttgtattaaagatgccgtgatttgtaaaaagtctgtattttgcggaatgtctggattaagaagcattaccaataggaatggatcgatagttgaataatgattttttatacatagatatataaaatacagccaggaaaacttaaattacttttcttttaaaatatctcacaatttatgtggtatttttaaagactgatcttagaccaagtcaaattcccatttatcatttagttattttttgaggttagagaataatttgtacatatttatttagacctttgatatttattaaagcaattactcacaatggaagtgaaagaatcaggagaaaagccttttaaaaagtattctccaggtttgtcagggtcactctaaagataaaaatgtaactaagtcttctgtgaaatatcatccatctaatcttgatgctgttgcagatggtggtgacacaagttaattgacaaactactgccaaatggtgcacaatattttgtaaaaagtacccagtagccccatttcatacaatgtacctaaattatgcagtaacttggcatcatcgttccctccttgttgctgtgtaattagtcagtgttgccacagtgtgtggcgctgatggagatgtcagaaccgagaacacttaaccttctttgattgtttttcaagttttaagacttcgatccacccctatgagagcaagtaattgtggaaatatttttggtgtaaaatcattccagagtatgtaatatttaactgatagctgcatgaaagtgagattcgtgttactttggcttttctgtctctgttgacacggttgcacatttccaagttactacagcgtgaaaactgtgtgtttaaaaaaaaacaaaattaaaaaaagagattgtggcctggttttgtaaaagttttaggtaaaattacaattgattgttttaggaatcattattaaaaattttctgcaaatcataaagctatatcgaggtgttgagcttagccactatgcacattgtaattattcattgtggctgtccagttctatgatgcattctggcattttgtaagctgctctgactagcaatatatagattcatttaatgtgttaacattggttaataaatgtatttaaaaaaaaaaaaaaaaaaaaaaaaaaaan

SEQ ID NO: 727 - DNA, 775 bp, Homo sapiens
  misc_feature (627)..(627): n equals a,t,g, or c
  misc_feature (715)..(715): n equals a,t,g, or c
  misc_feature (758)..(758): n equals a,t,g, or c
  misc_feature (772)..(772): n equals a,t,g, or c
tgttttctaatcacgtggctgccacccaggtaagaagaggccgctcttcctggggttgtttctccgtgtgacgtgtggcctttgagatcaactctcctgtaccagcgtaggccgcatgagtggggggcgggctcccgcggtcctgctcggcggagtggcctctctgctcctgtcttttgtttggatgccggcgctgctgcctgtggcctcccgccttttgttgctaccccgagtcttgctgaccatggcctctggaagccctccgacccagccctcgccggcctcggattccggctctggctacgttccgggctcggtctctgcagcctttgttacttgccccaacgagaaggtcgccaaggagatcgccagggccgtggtggagaagcgcctagcagcctgcgtcaacctcatccctcagattacatccatctatgagtggaaagggaagatcgaggaagacagtgaggtgctgatgatgattaaaacccaaagttccttggtcccagctttgacagattttgktcgttctgtgcacccttacgaagtggccgaggtaattgcattgcctgtggaacaggggaactttccgtacctgcagtgggtgcgccaggtcacagagtcagnttctgactctatcacagtcctgccatgatgagccctgktcctgctcatcatgaagatccccgsgatacttcaacgccttctgactttncaaggtgaatgactgggcccccaataaatcccggcttttgggnctcttcaaaaaaanaaa

SEQ ID NO: 728 - DNA, 518 bp, Homo sapiens
tttttttttttttttttttttaagaacaggagtggaggtttaaaaggctttaggacaggaaagaaaggaaagaaaagtatgcttagaagagacccaaacaggcatcaaggtcaagtgcctctaaaccataattcttaatgtaccaacagtgggaccatagaaaaaggacttactgctttcaaacaccatatttatcttctagagctagctggataatacctattagaagtaagttcccgatagaagttactcacacccaatacttgttcatttttatcttcctataagtatacagattttgtgcagtattattttgacaacacactgaagtagtcccaataggacaaaaaaaagggggtggtggtgtgagggtcttaatggaaacatattgaaatctagattatcctgaacagaaggccactttttcaaatagaaattttaggacatagtgatctcttttaaaaaaaaagtgcgacatttcagcatctgtagattgaagtggttacaaacctcgtgcc

SEQ ID NO: 729 - DNA, 1397 bp, Homo sapiens
  misc_feature (898)..(898): n equals a,t,g, or c
  misc_feature (1381)..(1381): n equals a,t,g, or c
gctttacctcactgaagaggttaatattatatggcactgatggtagtggcacacgggttggtctattaaatgccaaccgcgaaggaataatctctaccctggggtatgtggcaatacacatggctggtgtgcaaacagggttatatatgcataagaaccgatcacatatcaargacttgataaaagtagyckgttktcttttactggcagctattagcctcttcatatctctttacgtagttcaagtaaatgtagaagcagtatctcgaagaatggcaaatttagccttttgtatttggatagttgcttctagcctgatccttcttagtagtttattactgggtgatataattttgagttttgccaaatttctaattaaaggagctctagtaccatgttcttggaaacttatccagtcacctgktacaaataaaaagcattcagaatctctagtccctgaagccgaaagaatggaacccagtctttgtttaatcacagctctaaacagaaaacagttaatatttttcttgctgtcaaatataacaactggcctgatcaacctgatggtagatacattacacagcagtaccttgtgggccttatttgtggtcaatctctatatgttttccaactgtttaattgtatatgtactatatttgcaagataagactgtacaattttggtgatcagcaggagtaggatatataagtatttgggcaatatttaatgaggaatattaattgtaaagaaattgtgcttttggcaacagtgttaaccatattttattataaaatagtttcagtcatctaaacagcagtgatgcttaawtattttttttttttgagacagagtcttgctctgktacccaggctggarygkagtggygccatctcagctnactgcaacctccacctcccgggttcaagcaattctcctgcctcagcctcctgagtagctggcactgtaggcatgtaccaccatgcccagctaatttttatatttttagtagagatggggttttgccatattggccaggctggtctcaaactcctgaactcaagtgataacacccaccttggcctcccaaagtgctgggattacaggtgtgagccaccacactgggccaatgcttaatattttaatgtatctcaacaataaaaccaagaagaaacaaagccttttgacttgttagaatgtattaagtagtattttaaagaaactttatagttgtgacattgaaagactgttggggtggggggaggaaaatttttactttccatcttaatgtaaccttatgctattctgtatttttactgtatattgcttttacaataaatataaaatgaaatgtttatgttgacatttcagtgtgaaaaaaaanaaaaaagggcggccgc

SEQ ID NO: 730 - DNA, 1614 bp, Homo sapiens
ggagaatatctacttccagcagtacatttaaagtttggtttataggaattaatttgagaatcaaaatgtaggaattttaaaataatttgctcactaaaaaaattaagatgttaaataatgggttattctttgtacttatctctgtcagaaactcttgctttactctttgttctcccagcagtttttggtttaatttctaatgtgtctaatttgtgtaggcgtcgaccagaagattatgatattcataacagcagaaagaaaccaaggattgactatccccctgagtttcaccagagaccagggtatttaaaggatccacgataccaggaagtggacagacgattttcaggagttcgccgagatgtgtttttaaatgggtcctacaatgattatgtgagggaatttcataacatgggaccaccaccaccttggcaaggaatgcccccttacccaggaatggaacaacctccacaccatccttactatcagcaccatgctccacctcctcaagctcatcccccttactcaggacatcatccagtaccacatgaagcaagatacagagataaacgagtacatgattatgatatgagggtggatgatttccttcgtcgcacacaagctgttgtcagtggccggagaagtagaccccgtgaaagagaccgggaacgagagcgagaccgccctagagataacagacgagacagagagcgagatagaggacgtgatagagaaagagaaagagagcgattatgtgatcgagacagagaccgaggggagagaggtcgatatagaagataatgggcttttggaagcactgattgtttaaagatacaaaaaatcttgtattttttttttgtgtgtgtttacaagtagtaaatttattttcagctgtctgcctatgaagttcattgtgtagaaggatttattatgaccccctttgttccaagcatgcagtatcataagaactggaaaaactcaaatccgccaaaaatccacagctgacagttgaattgacacttttattggggcagaatggaacagtccaagaatgtagatactgattctttctccataaatgttcttatagtgtgttcatcctagagttatttttttgtttgtttttttcctttttggatcttgattgataactgccatgatattttgctttgatgtgtttctacatgtagttgcacacggttcagtaaaaataatgctgctatcgagtatgcaaatattgaagtatgatggtttgactgtatggcagtgttgtagcagcctcttgtttttttccccattgcctctttttttaaaaaacttataaagtcactttttatttttcctcagtcttcaatgacgagagcaatattaagaagacattgctatctaatttttaatctttttaaatgaaaaattcctatgttcagtagcgtggttgatgctattgtttagccttcccctccaaattgtatacattggcttggaatgttcacaacttgcgtgcgtggcagcggaagacgattcccatattctacattgctactgttttgtataaaataaattggtaaagattgacggttaaaaaaaaaaaaaaaaaaagggcggccgttttag

SEQ ID NO: 731 - DNA, 2731 bp, Homo sapiens
  misc_feature (2430)..(2430): n equals a,t,g, or c
  misc_feature (2442)..(2442): n equals a,t,g, or c
ggcagcgcgcgccgcggtcagctgactgctgggctggcacgtgacttgttctgtgttcgcttgggtagaggaagccgtgaggccggagcttaggtcgggaagggatggatcgctgagccgatagcgtccgctaggctgtctgcctcggtacctgttactgctgctacttcctcgtttgacaccttcctggaatctctcttgatttttgaggaaatacctagtaacaaacatgactgagttctggcttatatctgctcctggggagaaaacctgtcagcaaacatgggagaaattgcatgcggcaacttcaaagaacaataatcttgctgtcacttccaagttcaatattcctgacttaaaggttggcacgttggatgtcttggttggcttgtcagatgaactggctaaactggatgcatttgtagaaggagtggttaagaaagtagctcaatacatggctgatgtattggaagatagcaaagacaaagttcaagagaatctgttggctaatggagtggacttggttacttatataacaaggttccagtgggacatggccaaatatccaatcaagcagtccctgaaaaatatttctgaaataattgccaagggagtaactcagattgataatgacctgaaatctcgagcatctgcatacaataacctgaaaggaaatcttcagaatttggaacgaaagaatgcaggaagtttgctaactagaagtctagcagaaattgtgaagaaggatgactttgttcttgattcagagtatctcgtcacattactggtagtagttcccaagttaaaccacaacgactggattaagcagtatgaaacactagccgaaatggtagttccaaggtctagcaatgttctttcagaggaccaagacagttacctgtgtaatgtcaccttgtttaggaaggcagttgatgacttcagacacaaagccagagaaaacaaattcattgttcgtgacttccagtataatgaagaggagatgaaagcagataaagaagaaatgaacaggctttctactgataagaaaaaacaatttggaccacttgtacggtggctgaaagtgaattttagtgaagcatttattgcatggattcacgtgaaagcattacgggttttcgttgagtctgttttaaggtatggcttgccagtgaacttccaagcaatgctacttcagcccaataagaaaactttgaagaaactgagagaagtattacatgaattgtataaacatctagacagcagtgcagcagctattattgatgctcctatggatattccaggtttaaacctgagtcaacaagaatactacccctatgtgtactacaagattgattgcaacttgctggaattcaagtgaaaatgggctcctcccccgacaatcctgtccttgtgtttgtgtgtgctaacagaaataagttgcagtatggtcgtacttttaactctagtatcctttgcttgcttcttaccccctttcctaggtgaattctcccacagtggtctgtatctcaacattttctttttaaaggaaaaaatatatatatatagtttctttttattgatcaggtctgtaaatgtgtactaaaaaaatcagagtttatttataaacaraatagtttatttaaagagaaggtctcttccttattgatatcatggtatgcattaattccatttgttactattgtgcacaaaagccctgttcacaggggaatggtgtaaacatttatactgttttgttcactgtatttagtagacataactgttgaatagttactgaatcatgatgtaaagaatatgtgaccatcttcaggtatgggatttctgaacgtttcaaatttcaatcaatgagcactgtcaacacccacaggagagaataaaattacctgtgcaaaggtgtattgtggtgtgtgtaacttaagattacagttctgtttgagagttaaatgatgtcatagctcacttgctatgctgcttccaggattttgttatatgctgaggtgtaaccatttgtgttgtctgactttcgtatgatttaattgagccaaatttgggtcagaacacaaatttgaagatgacttttcagtatatgatgggtatttacatttgaacactagaattttaggtctctcaaataattaagaatagagccagttttgaataaagtctagcagaactatgcagctttagtcatttgytttgtctaagtctgtattttatgtgttgtcttcttaagatctataattttggcatttatgtcatttgtgacatagtctgaaaatagagacattgttggcctttaaaatctcagaaatgaatgacttaatttagtgtcctgaaagagcttttaaaagaggattttgtggcaatgyttctcttactacgtactcacaggtttgcaaatgggaaaaaagnttacatttcagnttaggggcatatytaagctatgctattccctttagaaaattagcctccaaaatcttttgtttcaaaatattatattatttcataaataatttcaagcaaatacagacatccmcaatgtagaacatgagagaccccctccctcaatttccacctcccaagggaagtttatgtatttttctaggcccttttctatgtctttacatctctgtctcacacacacacacgtatacacacacmcagtttattyytaataaaataggattatacccccaaaaaaaaaaaaaaaaaa

SEQ ID NO: 732 - DNA, 1118 bp, Homo sapiens
gcagaaaggcagaaaggagaaaattcaggataactctcctgaggggtgagccaagccctgccatgtagtgcacgcaggacatcaacaaacacagataacaggaaatgatccattccctgtggtcacttattctaaaggccccaaccttcaaagttcaagtagtgatatggatgactccacagaaagggagcagtcacgccttacttcttgccttaagaaaagagaagaaatgaaactgaaggagtgtgtttccatcctcccacggaaggaaagcccctctgtccgatcctccaaagacggaaagctgctggctgcaaccttgctgctggcactgctgtcttgctgcctcacggtggtgtctttctaccaggtggccgccctgcaaggggacctggccagcctccgggcagagctgcagggccaccacgcggagaagctgccagcaggagcaggagcccccaaggccggcctggaggaagctccagctgtcaccgcgggactgaaaatctttgaaccaccagctccaggagaaggcaactccagtcagaacagcagaaataagcgtgccgttcagggtccagaagaaacagtcactcaagactgcttgcaactgattgcagacagtgaaacaccaactatacaaaaaggatcttacacatttgttccatggcttctcagctttaaaaggggaagtgccctagaagaaaaagagaataaaatattggtcaaagaaactggttacttttttatatatggtcaggttttatatactgataagacctacgccatgggacatctaattcagaggaagaaggtccatgtctttggggatgaattgagtctggtgactttgtttcgatgtattcaaaatatgcctgaaacactacccaataattcctgctattcagctggcattgcaaaactggaagaaggagatgaactccaacttgcaataccaagagaaaatgcacaaatatcactggatggagatgtcacattttttggtgcattgaaactgctgtgacctacttacaccatgtctgtagctattttcctcctttctctgtacctytaagaagaaagaatctactgaaaataccamaaaaaaaaaaaaaaaa

SEQ ID NO: 733 - DNA, 1744 bp, Homo sapiens
  misc_feature (1701)..(1702): n equals a,t,g, or c
  misc_feature (1710)..(1710): n equals a,t,g, or c
  misc_feature (1713)..(1713): n equals a,t,g, or c
  misc_feature (1733)..(1733): n equals a,t,g, or c
ccccctttggaaaaaccctcactaaagggaacaaaagctggagctccaccgcggtggcggccgctctagaactagtggatcccccgggctgcattaattcggcacgagtttaaacatttcgttagaatgagggcaaataagctccacctgttttataagttgatgtatcttttgtattcttttgatctgtgggtaccctttccaattctcttcttgctttttttgcaggttatttttgaaaggaactgagttgtttgtcttatagcttttttaccattggtctttgttttttcaaacagtcaaatatagaaatatgtttcattaaagaatattaactgattgcttttaagtttttagatattctttcaatatcagattatatttgaatatacatttgttgcctaacatatctctgtttatggctttgacttgtatgggttactaattaagcacatgtttattgatttgaagtasggtatacttttkgmmataaaaactcacaagaaaaaatagttcaaaatcagataaaattactttgaaaacatcttagagagagagatgctgttttagtctgtttgtgcttgctgtaacaaaacacctgagactggataatttataaaggaacagaaatttctttttcacagttctgggggctgggattccaagatcaaggtggcagcactggtgagggccctcttgctgtgtcttcacatggaggaaggcagaaggttaagagaaggacaaaccctgtgtcctcacatggctgaagagcggaagagagtaaacccactcctgcagtccttttttatatcagcataggtccatcatgagggtggagccttcatgacctaaacaccgcccagtagaccctgcctcccattgctgttgcattgtggattaagtttccaacacatgcattttggaggggacaaaaacatcgagaccacagcagacagccatatcagtgcaacaggtagtgagtgaatttgtctgccaaatttctgattggggctgaaggaaagagaattcttgtttcacttttaattagaatatagtcagctacttaacgttacatgagagaggccttttcagagtctctgtgatgtgagcatagattacctagagtaagttttccgtagaggtggatcttgctggagggatgatgtatatcaaataggaagccagggccctaaactacaacttacaaagccccaggaggagcccagaaacttctcttactgacagagttttcttcctaagtgaattatctgaagcattgtgaacccgagtcatatgcagtgaggcctcaattataactggattatgtaacaaaaattcagttttaaatctgtggtttggtgcccagaccacatttgcccttagtaataatgtgtcatatcagattaggttttcagcatagcctgcaaaaggtatttaatttgcgatgtacctgactattgtcactggcaatacagagctcatcctgctaacgtcatccctggtggcgatgccattgtgtccagagggacgctttgktcagggttacattcaagactccaggtgggtgctctcgtgccatgggatcctggacaggagctctgaagtccttggcgtccttgtcataagtcatctgcacttgtcatctttcgtaggcatgtgatggggaagtgagagcttcctgaagtaaggagccttctcagnnaatgtgtnaancttacaaggggaagatgggnctggagatccg

SEQ ID NO: 734 - DNA, 840 bp, Homo sapiens
  misc_feature (1)..(2): n equals a,t,g, or c
  misc_feature (10)..(10): n equals a,t,g, or c
  misc_feature (765)..(765): n equals a,t,g, or c
nntgtgagancgatacgccagctcgaaattaaccctcactaaagggaacaaaagctggagctccaccgcggtggcggccgctctagaactagtggatcccccgggctgcaggcccgtccttgacacctcagcctctacaggactgagaagaagtaaaaccgtttgctggggctggcctgactcaccagctgccatgcagcagcccttcaattacccatatccccagatctactgggtggacagcagtgccagctctccctgggcccctccaggcacagttcttccctgtccaacctctgtgcccagaaggcctggtcaaaggaggccaccaccaccaccgccaccgccaccactaccacctccgccgccgccgccaccactgcctccactaccgctgccacccctgaagaagagagggaaccacagcacaggcctgtgtctccttgtgatgtttttcatggttctggttgccttggtaggattgggcctggggatgtttcagctcttccacctacagaaggagctggcataactccgagagtctaccagccagatgcacacagcatcatctttggagaagcaaataggccaccccagtccaccccctgaaaaaaaggagctgaggaaagtggcccatttaacaggcaagtccaactcaaggtccatgcctctggaatgggaagacacctatggaattgtcctgctttctggagtgaagtataagaagggtggccttgtgatcaatgaaactgggctgtactttgnatattccaaagtatacttccggggtcaatcttgcaacaacctgccctgagccacaaggtctacatgaggaactct

SEQ ID NO: 735 - DNA, 1701 bp, Homo sapiens
ggccttacggcacagtagagagcttccagggctggctggcgtgggatacccgtaccacagaaatgcagggaccattgcttcttccaggcctctgctttctgctgagcctctttggagctgtgactcagaaaaccaaaacttcctgtgcctcctcctggcggccctcacttttctcctgtgtaaagccatccagaacaccagcacctcactgcatctgcagctctcgctctgcctcttcctggcccacctcctcttcctcgtggggattgatcgaactgaacccaaggtgctgtgctccatcatcgccggtgctttgcactatctctacctggccgccttcacctggatgctgctggagggtgtgcacctcttcctcactgcacggaacctgacagtggtcaactactcaagcatcaatagactcatgaagtggatcatgttcccagtcggctatggcgttcccgctgtgactgtggccatttctgcagcctcctggcctcacctttatggaactgctgatcgatgctggctccacctggaccagggattcatgtggagtttccttggcccagtctgtgccattttctctgcgaatttagtattgtttatcttggtcttttggattttgaaaagaaaactttcctccctcaatagtgaagtgtcaaccatccagaacacaaggatgctggctttcaaagcaacagctcagctcttcatcctgggctgcacatggtgtctgggcttgctacaggtgggtccagctgcccaggtcatggcctacctcttcaccatcatcaacagcctccaaggcttcttcatcttcttggtctactgcctcctcagccagcaggttcagaaacaatatcaaaagtggtttagagagatcgtaaaatcaaaatctgagtctgagacatacacactttccagcaagatgggtcctgactcaaaacccagtgagggggatgtttttccaggacaagtgaagagaaaatattaaaactagaatattcaactccatatggaaaatcatatccatggatctctttggcattatgaagaatgaagctaaggaaaagggaattcattaaacatatcatccttggagaggaagtaatcaacctttacttcccaagctgtttgttctccacaataggctctcaacaaatgtgtgggaagggagggatgtgtgcatcctggaagagaagcaggctgtccctgaaggttctcaaaggttcagtgggaagaactcacgtgctcagcaaagctattgatgatgaccaagtgagagtaattctcctggcagaacatccgggcctcatcccatgacttggtgcttggggagaagtagtaacacttgccctcaaagggcagccagccttcaggacagagatggggtcttgctatgttgccccggctggtctcaaactcctgtcctcaagcgatcctcccacctcggcctcccaaagtatcaagactacagatgcacaccactgcagctggcccaaacctccactttaacaaccacttatcagtctcctgttggaccctgtaccatgccttgggtttgtgatccaagtctaaataaaacctgggctttgggtagaaaggtgaggagattgggagcccacagtccactcccagtttctcaagcaccagcttttgtaactcagggactttgcacctaaaaaaaaaaaaaaaaaa

SEQ ID NO: 736 - DNA, 733 bp, Homo sapiens
tagactcacacccaccgacaggccccggtgtgtgacgttgccctccctgtgtccatgtgttctcattgttcaactcccacttatgagtgagaacatgtggtgtttggttttctgttcttgtgttagtttgctgagagtgatggtttccagcttcatccatgtccccacaaaggacatgaactcacccttttttatggctacatagtattccatggtgtatatgtgccacattttctttatccagtctatcattgatgggcatttgggttggttccaagtctttgctattgtgaacagtgccacagtaaacatacgtgtgcatgtgtccttatggtagaatgatttataatcctttgggtatatacccagtaatgggattgctgaatcaaatggtatttctagttctagatccttgaggaattgccacactgtcttccacaacggttgacctaatttacactcccaccaacagtgtaaaagcgttcctatttctccacatcctctccagcatctgttgtttcctgattttttaatgatcgccattcaaatgggcatgagatgttatttttaacatttaaaaaattattatgggccaggcacagtggctcacacctgtcatcccagcaacttgggaggccaaagcggggtgatcacctgaggtcaggggttcaagaccagcctgaccaacgttgtgaaaccccgtctctactaaaaaaaaaaaaaaaaaaaaaaa

SEQ ID NO: 737 - DNA, 1950 bp, Homo sapiens
gagcgcacggtcggggcacagcagggccggtgggtgcagctggctcgcgcctcctctccggccgccgtctcctccggtccccggcgaaagccattgagacaccagctggacgtcacgcgccggagcatgtctgggagtcagagcgaggtggctccatccccgcagagtccgcggagccccgagatgggacgggacttgcggcccgggtcccgcgtgctcctgctcctgcttctgctcctgctggtgtacctgactcagccaggcaatggcaacgagggcagcgtcactggaagttgttattgtggtaaaagaatttcttccgactccccgccatcggttcagttcatgaatcgtctccggaaacacctgagagcttaccatcggtgtctatactacacgaggttccagctcctttcctggagcgtgtgtggaggcaacaaggacccatgggttcaggaattgatgagctgtcttgatctcaaagaatgtggacatgcttactcggggattgtggcccaccagaagcatttacttctaccagccccccaacttctcaggcctcagagggggcatcttcagatatccacacccctgcccagatgctcctgtccaccttgcagtccactcagcgccccaccctcccagtaggatcactgtcctcggacaaagagctcactcgtcccaatgaaaccaccattcacactgcgggccacagtctggcagttgggcctgaggctggggagaaccagaagcagccggaaaaaaatgctggtcccacagccaggacatcagccacagtgccggtcctgtgcctcctggccatcatcttcatcctcaccgcagccctttcctatgtgctgtgcaagaggaggagggggcagtcaccgcagtcctctccagatctgccggttcattatatacctgtggcacctgactctaatacctgagccaagaatggaagcttgtgaggagacggactctatgttgcccaggctgttatggaactcctgagtcaagtgatcctcccaccttggcctctgaaggtgcgaggattataggcgtcacctaccacatccagcctacacgtatttgttaatatctaacataggactaaccagccactgccctctcttaggcccctcatttaaaaacggttatactataaaatctgcttttcacactgggtgataataacttggacaaattctatgtgtattttgttttgttttgctttgctttgttttgagacggagtctcgctctgtcatccaggctggagtgcagtggcatgatctcggctcactgcaacccccatctcccaggttcaagcgattctcctgcctcctcctaagtagctgggactacaggtgctcaccaccacacccggctaattttttgtatttttagtagagacggggtttcaccatgttgaccaggctggtctcgaactcctgacctggtgatctgcccacccaggcctcccaaagtgctgggattaaaggtgtgagccaccatgcctggccctatgtgtgttttttaactactaaaaattatttttgtaatgattgagtcttctttatggaaacaactggcctcagcccttgcgcccttactgtgattcctggcttcattttttgctgatggttccccctcgtcccaaatctctctcccagtacaccagttgttcctcccccacctcagccctctcctgcatcctcctgtacccgcaacgaaggcctgggctttcccaccctccctccttagcaggtgccgtgctgggacaccatacgggttggtttcacctcctcagtcccttgcctaccccagtgagagtctgatcttgtttttattgttattgcttttattattattgcttttattatcattaaaactctagttcttgttttgtctctcaaaaaaaaaaaaaaaaaaaaaaaaaaaaaaaaaaaaa

SEQ ID NO: 738 - DNA, 2219 bp, Homo sapiens
  misc_feature (2206)..(2206): n equals a,t,g, or c
aaagtgacaacagcaagggtttctctttttggaaatgcgaggagggtatttccgcttctcgcagtggggcagggtggcagacgcctagcttrgagacgatctgccgaccctctgggagaaaatccagcaagatgcaagccttcagaatctgggatgttaaccagaagaccttctatctgaggaacaaccaactagttgcyggatacttgcaaggaccaaatgtcaatttagaagaaaagatagatgtggtacccattgagcctcatgctctgttcttgggaatccatggagggaagatgtgcctgtcctgtgtcaagtctggtgatgagaccagactccagctggaggcagttaacatcactgacctgagcgagaacagaaagcaggacaagcgcttcgccttcatccgctcagacagtggccccaccaccagttttgagtctgccgcctgccccggttggttcctctgcacagcgatggaagctgaccagcccgtcagcctcaccaatatgcctgacgaaggcgtcatggtcaccaaattctacttccaggaggacgagtagtactgcccaggcctgcctgttcccattcttgcatggcaaggactgcagggactgccagtccccctgccccagggctcccggctatgggggcactgaggaccagccattgaggggtggaccctcagaaggcgtcacaasaacctggtcacaggactctgcctcctcttcaactgaccagcctccatgctgcctccagaatggtctttctaatgtgtgaatcagagcacagcagcccctgcacaaagcccttccatgtcgcctctgcattcaggatcaaaccccgaccacctgcccaacctgctctcctcttgccactgcctcttcctccctcattccaccttcccatgccctggatccatcaggccacttgatgacccccaaccaagtggctcccacaccctgttttacaaaaaagaaaagaccagtccatgagggaggtttttaagggtttgtggaaaatgaaaattaggatttcatgatttttttttttcagtccccgtgaaggagagcccttcatttggagattatgttctttcggggagaggctgaggacttaaaatattcctgcatttgtgaaatgatggtgaaagtaagtggtagcttttcccttctttttcttctttttttgtgatgtcccaacttgtaaaaattaaaagttatggtactatgttagccccataattttttttttccttttaaaacacttccataatctggactcctctgtccaggcactgctgcccagcctccaagctccatctccactccagattttttacagctgcctgcagtactttacctcctatcagaagtttctcagctcccaaggctctgagcaaatgtggctcctgggggttctttcttcctctgctgaaggaataaattgctccttgacattgtagagcttctggcacttggagacttgtatgaaagatggctgtgcctctgcctgtctcccccaccgggctgggagctctgcagagcaggaaacatgactcgtatatgtctcaggtccctgcagggccaagcacctagcctcgctcttggcaggtactcagcgaatgaatgctgtatatgttgggtgcaaagttccctacttcctgtgacttcagctctgttttacaataaaatcttgaaaatgcctaaaaaaaaaaaaaaaaaaaacctctccgaattcggccgtaggggaaatgggaagaggattgccatggcctggccatcttgttgctgcttggttagatcatatagctaatgaattaggcaggggagctattttttgaagatgatgaactaaatgttgaagacaagtttgagatctgtaaaatgtgattttttacttccacttataatacttgtgattggggaggtttgtggaaattcaattatgatgaaaaacctatcttttttgtaatgttggcatacttggggaatttagtggcaaatacattccccagcaggccttttgttggttgcactaactgcaaggttgctgggaagtagagtccatttggttgatgagctttgactgcggttttggaaccttacctctcctccttagcccaatatgctgtcttgggtcctattcaaataaagttatttctcctggaaaaaaaaaaaaaaaaaaaaaaaaaaaaaaaaacccnggggggggcccgg

SEQ ID NO: 739 - DNA, 1071 bp, Homo sapiens
  misc_feature (1067)..(1067): n equals a,t,g, or c
ggcacagcttcagagtcaaaggccagagagcatggagctgagtggagccaccatggcccggggtctcgctgtcctgctagtcttgttcctgcatatcaagaacctgcctgcccaggctgcggacacatgtccagaggtgaaggtggtgggcctggagggctctgacaagctcaccattctccgaggctgcccggggctgcccggggccccagggccaaagggagaggcaggtgtcattggagagagaggagaacgcggtctccctggagcccctggaaaggcaggaccagtggggcccaaaggagaccgaggagagaaggggatgcgtggagagaaaggagacgctgggcagtctcagtcgtgtgcgacaggcccacgcaactgcaaggacctgctagaccgggggtatttcctgagcggctggcacaccatctacctgcccgactgccggcccctgactgtgctctgtgacatggacacggacggagggggctggaccgttttccagcggaggatggatggctctgtggacttctatcgggactgggccgcatacaagcagggcttcggcagtcagctgggggagttctggctggggaacgacaacatccacgccctgactgcccagggaagcagcgagctccgtgtagacctggtggactttgagggcaaccaccagtttgctaagtacaaatcattcaaggtggctgacgaggcagagaagtacaagctggtactgggagcctttgtcgggggcagtgcgggtaattctctaacgggccacaacaacaacttcttctccaccaaagaccaagacaatgatgtgagttcttcgaattgtgctgagaagttccagggagcctggtggtacgccgactgtcatgcttcaaacctcaatggtctctacctcatgggaccccatgagagctatgccaatggtatcaactggagtgcggcgaaggggtacaaatatagctacaaggtgtcagagatgaaggtgcgcccgcctagacgggccaggacccctccacagyacccaattcgccytatagtgagtcgtcttacanatac

SEQ ID NO: 740 - DNA, 885 bp, Homo sapiens
ggcacgaggaaggatgaggaagaccaggctctgggggctgctgtggatgctctttgtctcagaactccgagctgcaactaaattaactgaggaaaagtatgaactgaaagaggggcagaccctggatgtgaaatgtgactacacgctagagaagtttgccagcagccagaaagcttggcagataataagggacggagagatgcccaagaccctggcatgcacagagaggccttcaaagaattcccatccagtccaagtggggaggatcatactagaagactaccatgatcatggtttactgcgcgtccgaatggtcaaccttcaagtggaaaattctggactgtatcagtgtgtgatctaccagcctcccaagacctcacatgctgttcgatcgcatccgcttggtggtgaccaagggtttcagggaccccttctccaatgagaattctacccagaatgtgttaaattcctcctaccaccactaaggccttgtgcccactctataccagccccaaactgtgacccaagctccacccaagtcactgccgatgtctccactcctgactctgaaatcaaccttacaagtgacaatatcatcatggttccggtgttaacattgtcattctcctggctggtggattcctgagtaagagcctggtcttctctgtcctgtttgctgtcacgctgaggtcatttgtaccctaggcccacgaacccacgagaatgtcctctgacttccagccacatccatctggcagttgtgccaagggaggagggaggaggtaaaaggcagggagttaataacatgaattaaatctgtaatcaccggctattaaaaaaaaaaaaaaaaaaaaaaaaaaaaaaaaaaaaaaaaaaaaaaaaaaa

SEQ ID NO: 741 - DNA, 761 bp, Homo sapiens; identical to SEQ ID NO: 590

SEQ ID NO: 742 - DNA, 957 bp, Homo sapiens
  misc_feature (908)..(908): n equals a,t,g, or c
  misc_feature (916)..(916): n equals a,t,g, or c
  misc_feature (928)..(928): n equals a,t,g, or c
  misc_feature (931)..(931): n equals a,t,g, or c
atacgcccgctcgaaattaaccctcactaaagggaacaaaagctggagctccaccgcggtggcggccgctctagaactagtggatcccccgggctgcaggaattccccggggttggcatcagcttgggcaggtgtgcgggctcattggggcggccgtggtgaggaaccctggactctcagcatcacaagaggcaacaccaggagccaacatgagctcggggactgaactgctgtggcccggagcagcgctgctggtgctgttgggggtggcagccagtctgtgtgtgcgctgctcacgcccaggtgcaaagaggtcagagaaaatctaccagcagagaagtctgcgtgaggaccaacagagctttacggggtcccggacctactccttggtcgggcaggcatggccaggacccctggcggacatggcacccacaaggaaggacaagctgttgcaattctaccccagcctggaggatccagcatcttccaggtaccagaacttcagcaaaggaagcagacacgggtcggaggaagcctacatagaccccattgccatggagtattacaactgggggcggttctcgaagcccccagaagatgatgatgccaattcctacgagaatgtgctcatttgcaagcagaaaaccacagagacaggtgcccagcaggagggcataggtggcctctgcagaggggacctcagcctgtcactggccctgaagactggccccacttctggtctctgtccctctgcctccccggaagaagatgaggaatctgaggattatcagaactcagcatccatccatcagtggcgcgagtccaggaaggtcatggggcaactccagagagaagcatcccctggcccggtgggaagcccagacgargaggacggggaacccgggggnaaaacccngggattttaccnctnggaaaattggggggaaaaggttgggc

SEQ ID NO: 743 - DNA, 1789 bp, Homo sapiens
  misc_feature (65)..(65): n equals a,t,g, or c
  misc_feature (89)..(89): n equals a,t,g, or c
ggaagtttgtggcggaggaggttcgtacgggaggagggggaggcgcccacgcatctggggctgantcgctctttcgcaaaacgtctggnaggagtccctggggccacaaaactgcctccttcctgaggccagaaggagagaagacgtgcagggaccccgcgcacaggagctgccctcgcgacatgggtcacccgccgctgctgccgctgctgctgctgctccacacctgcgtcccagcctcttggggcctgcggtgcatgcagtgtaagaccaacggggattgccgtgtggaagagtgcgccctgggacaggacctctgcaggaccacgatcgtgcgcttgtgggaagaaggagaagagctggagctggtggagaaaagctgtacccactcagagaagaccaacaggaccctgagctatcggactggcttgaagatcaccagccttaccgaggttgtgtgtgggttagacttgtgcaaccagggcaactctggccgggctgtcacctattcccgaagccgttacctcgaatgcatttcctgtggctcatcagacatgagctgtgagaggggccggcaccagagcctgcagtgccgcagccctgaagaacagtgcctggatgtggtgacccactggatccaggaaggtgaagaagggcgtccaaaggatgaccgccacctccgtggctgtggctaccttcccggctgcccgggctccaatggtttccacaacaacgacaccttccacttcctgaaatgctgcaacaccaccaaatgcaacgagggcccaatcctggagcttgaaaatctgccgcagaatggccgccagtgttacagctgcaaggggaacagcacccatggatgctcctctgaagagactttcctcattgactgccgaggccccatgaatcaatgtctggtagccaccggcactcacgaaccgaaaaaccaaagctatatggtaagaggctgtgcaaccgcctcaatgtgccaacatgcccacctgggtgacgccttcagcatgaaccacattgatgtctcctgctgtactaaaagtggctgtaaccacccagacctggatgtccagtaccgcagtggggctgctcctcagcctggccctgcccatctcagcctcaccatcaccctgctaatgactgccagactgtggggaggcactctcctctggacctaaacctgaaatccccctctctgccctggctggatccgggggacccctttgcccttccctcggctcccagccctacagacttgctgtgtgacctcaggccagtgtgccgacctctctgggcctcagttttccccagctatgaaaacagctatctcacaaagttgtgtgaagcagaagagaaaagctggaggaaggccgtgggccaatgggagagctcttgttattattaatattgttgccgctgttgtgttgttgttattaattaatattcatattatttattttatacttacataaagattttgtaccagtggacaaggccagwacgctcactctggggaagctggttgccatgtaaaagtactactgccctgagaccaccatgctgtgaggaagcccaagctactcatgtataaatgccatgtggagatagagccccagatgtttcagccatctcagcccaggcaccagacaagtgggtgaagaagccaccttggacatgtagccccagcagatgtgatatagagaagaaacaggaaacttggctatattagtttcctagggctgcctgtgataaattattacaaactttawaaactaaa

SEQ ID NO: 744 - DNA, 2267 bp, Homo sapiens
ggcacagctgggttggctgtgaccgccccccgaccactggatggtcatggctgtagctcctgtacgagtagctggctgttggggtaaatgccacagagtccttttatgtgttcatgttttagttgcagtgccaaggtcatgtatagtcaacccttgaacaacctggaggtagaggtgtgaccctctgcacagttgaaaatccacacataacttttgattccccaaaaacttcaccactaaaatagcctcctgttgaccaatagcatgccagtcaatgaacacatattttgtatatacattacatactgtattcctaatgataaaggaagccagagaaaagaaaatattatgaagaaaatcataagggagaggcaatatatttactattcattaggtggaagtggatcattataaaggtcatcatccttgccatcttcacgttgagtagactgaggaggagaagggggggtcttgctgtttcagggatggcagagaaaatcatatataaatgcactcatgcagttcaaacacgtgttgttggaggttaagctatacatatcgtctggtgtggaaatgtttgttttttcattgctttaggtcctacatctcttttgatatcttgagaagagtgttgaaggattacttcaaatttgatgtcttttattgcatgaacattacggatattgatgacaagatcatcaagagggcccggcagaaccacctgttcgagcagtatcgggagaagagcctgaacggcacagctcttggaggatgttcaggccgccctgaagccattttcagtaaaattaaatgagaccacggatcccgataaaaagcagatgctcgaacggattcagcacgcagtgcagcttgccacagagccacttgagaaagctgtgcagtccagactcacgggagaggaagtcaacagctgtgtggaggtgttgctggaagaagccaaggatttgctctctgactggctggattctacacttggctgtgatgtcactgacaattccatcttctccaagctgcccaagttctgggagggggacttccacagagacatggaagctctgaatgttctccctccagatgtcttaacccgggttagtgagtatgtgccagaaattgtgaactttgtccagaagattgtggacaacggttacggctatgtctccaatgggtctgtctactttgatacagcgaagtttgcttctagcgagaagcactcctatgggaagctggtgcctgaggccgttggagatcagaaagccttcaagaaggggaaggtgacctgagcatctctgcagaccgcctgagtgagaagcgctctcccaacgactttgccttatggaaggcctctaagcccggagaaccgtcctggccgtgcccttggggaaagggtcgtccgggctggcatatcgagtgctcggccatggcaggcaccctcctaggggcttcgatggacattcacggaggtgggttcgacctccgttcccccaccatgacaatgagctggcacagtcggaggcctactttgaaaacgactgctgggtcaggtacttcctgcacacaggccacctgaccattgcaggctgcaaaatgtcaaagtcactaaaaaacttcatcaccattaaagatgccttgaaaaagcactcagcacggcagttgcggctggccttcctcatgcactcgtggaaggacaccctggactactccagcaacaccatggagtcagcgcttcaatatgagaagttcttgaatgagtttttcttaaatgtgaaagatatccttcgcgctcctgttgacatcactggtcagtttgagaagtggggagaagaagaagcagaactgaataagaacttttatgacaagaagacagcaattcacaaagccctctgtgacaatgttgacacccgcaccgtcatggaagagatgcgggccttggtcagtcagtgcaacctctatatggcagcccggaaagccgtgaggaagaggcccaaccaggctctgctggagaacatcgccctgtacctcacccatatgctgaagatctttggggccgtagaagaggacagctccctgggattcccggtcggagggcctggaaccagcctcagtctcgaggccacagtcatgccctaccttcaggtgttatcagaattccgagaaggagtgcggaagattgcccgagagcaaaaaggactgcccacagtggtgaaactggtagacagaaacaccttattaaaaaagaaaaaaaaaaa

SEQ ID NO: 745 - DNA, 1721 bp, Homo sapiens
ttttttttttttttttttttttttctggggcaagcattttatttgttaatacaagaatagaaattctgcaataaatatcatctaataaataacatctccaaataaataaatattaatacaacacacttagagtcatgagtgggtggggctggggggcagggccttggggagctgccaccctacaccccaaaatgctactgcattgtaaactttcaggaaatcctgtggtgtggctatggttgccctccccagcctggcaacccacagataccctgggaaagggggcagagaagaggcaccgtaatactggaagacaattcgaggcaaggtcctgatgctcagctcgggttttgtttgccactctgtgctttggagactcctgggtctggtctggtctgtccctgcccctgtgctttcagtattttctcttctggtttatagggcacctccaatgcagaccccaaccctgcactgttaatctcatctctttttgtgtagaattgccaccatgtttgtttcctgaattggatgtatagagtgatttggggataagggagcaacacccatccaaggagagtggggcagccaaagggcttcaccccagaaaggcatgtgtggtggtggcccctcaacccctgccctccagatgtgccacctgaggggctgggtgggcactggccaagtggtaggcaagaagcaggaggccatgagcgcctctgcaccaacctgaaccacttcacactccctcgagcatgacttcctgtagaaacaggacaggacagggcctactgtacctcctccccagctcggtagacctttgggaggtggggaggagacagggctgatcgcatcacacgcccagccggtccaggaaagggccagaggctcacagcttctgtctcctggctcaacaggtgttggcatacagggctggctctcacaaagtgggagcagggtttgaagggggagcgaagaggagaaggtcagaagtcagaagccatgagcccccaggtgcagggtgactgcagctgctggaggctgcatcttcttcttgagccggttgaagtccttggccgagcgccacagccaggtctgcagctccttcagcagccagaagtcgtccatcttctggaggaagtcactgtgggcagggccaggagtccaagtgggttcagtcccaggcagcggctggggcagtgggtagcccagagctgccatgacgcccgcaatgctgcccagcaggccctggaggctggtgcagaagtgggccaggctgcggcgcagctcagcagtggcagcctgacggttgaggccacgcaagtaacacagaaggtggctgtaggcctcgtagttctgggtcagccgcagtttgtcattgaggcttcgccacacctccaagtcaacagtggccctgggcagagtctctgcccccaggcggggagggttgaagtctggctcgttgaaaggggggcccaggtagttcagataggtcccagccaagctgcggagttggtgctccaggtagcgggtgaggtcataggttttctggatggaggggccaggccctgggtcccctgtgcgattgagagctggcactgcagggaggtgccagagcaccgtgcacaggcacgctaacatcccccacgagtcccctgctcggaggtccatggggctggggccgggccggccgggtgcggctcctctcccggaggcctcgtgcc

SEQ ID NO: 746 - DNA, 1214 bp, Homo sapiens
ggctcactcacctcaacccccaggcggcccctccacagggcccctctcctgcctggacggctctgctggtctccccgtcccctggagaagaacaaggccatgggtcggcccctgctgctgcccctactgcccctgctgctgccgccagcatttctgcagcctagtggctccacaggatctggtccaagctacctttatggggtcactcaaccaaaacacctctcagcctccatgggtggctctgtggaaatccccttctccttctattacccctgggagttagccacagctcccgacgtgagaatatcctggagacggggccacttccacgggcagtccttctacagcacaaggccgccttccattcacaaggattatgtgaaccggctctttctgaactggacagagggtcagaagagcggcttcctcaggatctccaacctgcagaagcaggaccagtctgtgtatttctgccgagttgagctggacacacggagctcagggaggcagcagtggcagtccatcgaggggaccaaactctccatcacccaggctgtcacgaccaccacccagaggcccagcagcatgactaccacctggaggctcagtagcacaaccaccacaaccggcctcagggtcacacagggcaaacgacgctcagactcttggcacataagtctggagactgctgtgggggtggcagtggctgtcactgtgctcggaatcatgattttgggactgatctgcctcctcaggtggaggagaaggaaaggtcagcagcggactaaagccacaaccccagccagggaacccttccaaaacacagaggagccatatgagaatatcaggaatgaaggacaaaatacagatcccaagctaaatcccaaggatgacggcatcgtctatgcttcccttgccctctccagctccacctcacccagagcacctcccagccaccgtcccctcaagagcccccagaacgagaccctgtactctgtcttaaaggcctaaccaatggacagccctctcaagactgaatggtgaggccaggtacagtggcgcacacctgtaatcccagctactctgaagcctgaggcagaatcaagtgagcccaggagttcagggccagctttgataatggagcgagatgccatctctagttaaaaatatatattaacaataaagtaacaaatttaaaaaaaaaaaaaaaaaaa

SEQ ID NO: 747 - DNA, 989 bp, Homo sapiens
  misc_feature (7)..(7): n equals a,t,g, or c
  misc_feature (20)..(20): n equals a,t,g, or c
ccccccngggcttgccgggnatttcggcacgagacaaaatctcttattggatatatgatttcgaaaaattgcttcccacgtggattgtcttttcgctttcttgatgctgtcttttgaagagcaaatgtttttaatttttgtaatgttcagtttacctattttttcttttgttgttgtttgtacttttggtgccatatgtaagaaacctaaagtcatgaagatgtacacttatgtatgcttctaagaatttatagttttaacttttaaatttatgggttttttttttccattttgagttaatttttcatgtggttgaggtaggggttcaatgtcattcttttacgtgtaaatatccaattgtcccacaaccaatgtgacatgttaaaaagattattttcccattaaattgtcttgggacatttgctgaaaatcaattgactataatgtaaacatttatttctggattttcaattctattccattgatctacatgtctacgcctatgtcagtattacatagtcttgattattgtagctatgtttgttttgaaattagaaaatgtgagtcccggctgggcgcggtggctcacgcctgtaatcccagcactttgggaggctgaggcgggcggatcacgagatcaggagacagagaccatcctggttatcatggtgaaaccccgtctctataaaaatatgaaaaattagccaggcatggtggcgggcgcctgtagtcccagctactccgaaggctgaggcaggagaatggcgtgaacctcggaggcagagcttgcagtgaaccgagattgtgccactgcactccagcctggggtgacagagcgagactccctctcaaaaaaaaaaggaatgtgtgagtcctccaactttattctttttcaagattgttttcgctactctcagtttcttgcatttccacaggaatttgagatcagcttgtcaatttccattaaaaaaaaaaaaaaaaaactcgta

SEQ ID NO: 748 - DNA, 643 bp, Homo sapiens
ggcacgagtctacatatattttgtgaattcatgccatacttaacattttctttttttaaatatttctgtgctatgcagtttatctgcaactttttttcaaatttttccaaatctccaaaaaatgtttccatatatttattcaaaaaatctgcatgtagttgaacccatggagtttatttacatggtgctggtcacaggtctactgtattttcttgaggtttgttgagcttcctcaaaataattactttaaattatttatcaggcggtttatacatctccatttctttggagtcagctattgggagattattgtgttctttcagtggtgttaatatttcctaggtttttttcatgtttcctgttaccttacattgatgtctgtgcattttgtgaagtaggaacttatttgaatttttgcagactggttttgtctaggaaagcccttaagcagtgagacagtccagagattaagggaaggttatctggcatggtccatgggatggactgctgctggagtcatcaggcaggctggcctagttcctgagtcagcaggtgtgtgggcctgggacctggttacatggggttggacctggagcctggatctactggggtgggtctgttgtttgggtttgtgggattgggc

SEQ ID NO: 749 - DNA, 1143 bp, Homo sapiens
  misc_feature (8)..(8): n equals a,t,g, or c
  misc_feature (12)..(12): n equals a,t,g, or c
  misc_feature (21)..(21): n equals a,t,g, or c
  misc_feature (29)..(29): n equals a,t,g, or c
caaattgncaanaaccttttngcttcctntggtaggcattttgaaaaygtkgcttgggtcaggcacagacgtcccccacaccctccgggtcccaggtgttgtttgwttttccttggcrttgacggaaakgtcacccgtttcccccttccaccggcayatgcmtggaccccacccttcgtttcgccgtcgccccgtatgcctccggtgacacacattaacaccaactgctgtgggattggccagtgccacgcgtggtcacatggtctccccctggrtttcgcctctsttcctctttgcagttgtcctgtwaagcrcgktcggctttccggaacccctgggcttttacaagcggggyaggccactgctctttcaaaggaggagggaggcagagggctgatggatsrgtgaatttgctctgacactaggccttgagacctatgggrtcattktgtgctgcagcgaggccctgccggcctgaccacatgtggtgagcccatcctatgtcactcggagggggccagaatgggatctcaacgggagtccagagaacacagcaggcgtcctgaagctccccctcccttggtggaagtcggctcaagcaggtcctgaggacaggagccctgggggtttgggcctgggacaggacgagacacccgcggtcccctctcccatgccrccccaaacaggacccaggacacagccgccgcggcggcagcaggagcatcgcggccgccgcgcggcggtggcratatttaaaggggacgcagcctatctgtcaggagtggagcgtgagtcggctcagccaatgcgcatgcgcgaggccccagcggtttctccsgtcacagtggttcccacggttgtcttagamaccagtccccgaggcttkgcagagcaggagccctccgtggcagtgcttgggtatcgaggctctgaggctccggyctcacctctccacgggstcgaagggaamctctcctgatgmcagcagtcgcaaagggccgacyatgawgatgaaaccccaggyggagacsggggaagcagcacgggatcccagcctcaggcctgcacggacggtgttkgttggggtgagtctcgccaaaagtcgcgccgckgtcmgtgatctcgaggacgggtcggcctgcg

SEQ ID NO: 750 - DNA, 654 bp, Homo sapiens
  misc_feature (638)..(638): n equals a,t,g, or c
  misc_feature (641)..(641): n equals a,t,g, or c
  misc_feature (649)..(649): n equals a,t,g, or c
ggcacagaaaagatcccataagctctgtttctttcttttaatttttctacttatttttcactctttgttcctatgactttttatgcatgttgaaggatggttttggtctttatgttgtggttcatagtatgcacatcattttactgcagacctttccctccatttttctgctgatggtgttgctgggatggaaaarggyacaaaatacacaggaatatgcattaaaagactgggttccacttttagctctacttgactaaaagaagcatttttttaaattactaagaaagtaataatttgttttcatattccatatattaagcttgtgtagtatccatattaccacattactacaagtccatattaccacattactacagccaaacacaaacttaaaaaacacttaaagtaatagctaacattgtaaagtattagagtgatgtcaccaaratggcagagtagacattaatccactcatatcttctcacaacaataagaattctatgcccatccacagtcaaaattctctctgtgggagcatcaattttcaggtatgagtttgtgaaaccttcatggagtccaaaatcttggagggctgtgttgagagtatagaccaatatacaggtgtctgatccacngangtggtccnagaaa

SEQ ID NO: 751 - DNA, 156 bp, Homo sapiens
  misc_feature (144)..(144): n equals a,t,g, or c
gaattcggcacgagtgggaatataggcacatgccactgtacccagctcatctttttactttcttgataatgtcttttgaggcacaaaagtggggttttgttttggtcgtgtttttttttttttkggtttttttttttttttccnaaaaaagggccc

SEQ ID NO: 752 - DNA, 1643 bp, Homo sapiens
  misc_feature (1560)..(1560): n equals a,t,g, or c
  misc_feature (1566)..(1566): n equals a,t,g, or c
  misc_feature (1631)..(1631): n equals a,t,g, or c
  misc_feature (1643)..(1643): n equals a,t,g, or c
tacggttcctggccttttgctggccttttgctcacatgttctttcctgcgttatcccctgattctgtggataaccgtattaccgcctttgagtgagctgataccgctcgccgcagccgaacgaccgagcgcagcgagtcagtgagcgaggaagcggaagagcgcccaatacgcaaaccgcctctcaccgcgcgttggccgattcattaatgcagctggcacgacaggtttcccgactggaaagcgggcagtgagcgcaacgcaattaatgtgagttagctcactcattaggcaccccaggctttacactttatgcttccggctcgtatgttgtgtggaattgtgagcggataacaatttcacacaggaaacagctatgaccatgattacgccaagctcgaaattaaccctcactaaagggaacaaaagctggagctccaccgcggtggcggccgctctagaactagtggatcccccgggctgcaggaattcggcacgagcacgcttgagacatgcctcacctcgagaccccagtggatgtcaaatgttatccttgttgcacagaggaggaaactgaggcttagattaagcaacctgcccaaggacctccggccggttccactgttagagttcatgcccttcaccctagtatgggcctgcgtgtatggacagaggggcagacagggaggctcacctcaaactccaggtaggcctccttctgccgctgctcttcagcctccttgccccggcccttcttgcccagctgggcggcccggtgctcccgcagctcacttgccatggccttcagcttggcctcgtgggtccgcacctgctcctcctagcggccagggggaggcatggtcatggtcactctgccctatacagtgcctctgcagatttttaaaaagataccccttccagccgggcgcagtggctcacgcctgtaatcccagcactttgggaggccaaggcgggcggatcacgaggtcaggagatcgagaccatcctggctaacacggtgaaaccccgtctctactaaaaatataaaaaattagccaggcgtggtggcaggtgcctgtagtcccagctactcaggaggctggggcaggagaacggcgtgaacccgggaggcagagcttgcagtgagctgagatcgtgccacggcactcccacctgggcaacagagcgagactccatctcaaaaaaaaaaaaaaaaaactcgagggggggcccggtacccaattcgccctatagtgagtcgtattacaattcactggccgtcgttttacaacgtcgtgactgggaaaaccctggcgttacccaacttaatcgccttgcagcacatccccctttcgccagctggcgtaatagcgaaraggcccgcaccgatcgcccttcccaacagttgcgcagcctgaatggcgaatggcaaattgtaagcgttaatattttgttaaaattcgcgttaaatttttgttaaatcagctcattttttaaccaataggccgaaatcggcaaaatcccttataaatcaaaagaatagaccgagatagggttgagngttgtnccagtttggaacaagagtccctattaaagaacgggggactccaacgtcaaaggcgaaaaacccgnttatcaggggcn

SEQ ID NO: 753 - DNA, 514 bp, Homo sapiens
  misc_feature (492)..(492): n equals a,t,g, or c
  misc_feature (499)..(499): n equals a,t,g, or c
cgaattcggcacgagctcgtgccgaattcgcacgagatcaagattccatcatcgcaactccagaaatcgctctatgttttacatcgaaactaccaaagttcacgaggctaattccacaaagcaaatttctctgctttacgtagtgcagctggtagtatttggagaacttggaagttcttttacttcctctgtccttcccgtagctttctgcacctttggagatctctttctgtcctattcttctgtctccagtcatcagagggcaactccagtgcacttgaagtcctagagtatcttggggggattttttcagctttcctctcatgctcagcatttgtagagcagctcctgtgcatttcgtgaagccctggcatactttgagggattctctcagctattctgccctgctcctgatttgtactgggccatgtccctgcacttggcaaaggccctgcacacctcgagggggggcccggtacccaattcgkcctnatagkgnagtcgtattacaatt

SEQ ID NO: 754 - DNA, 512 bp, Homo sapiens
gatttggcacgagcagaaaagggctgagatwacaatgatttaataatttgctgagtaktttacsattgttgaagstgtattttatctggtacccacaaccttagctctggatgaaaagcgtcctgatgkgcttcaracytccatctagaargttgtatttacatagatggaagatatgaattgagatgaactgtactgataagaattactcaaytcytctttatttgctgtatgtagaaatcacttactggccgggcgtggtggctcaagcctgtaatcccagcactttgggaggccttggtgggtggatcacgaggtcaggagatcaagaccatcctggctaacgcggtgaaaccctgtctctgctaaaaatacaaaaccaaaattagggcgcctgtagtcccagctactgcggaggctgaggcaggagaatggcgtgaacccgggaggcggaacttgcagtgagccgagattgcgcgccactgcactccagcctgggcgacagagcgaga

SEQ ID NO: 755 - DNA, 2520 bp, Homo sapiens
aattcggcacgagcagtggtacagccgtgctctggggagggcagcagccgtgcctgtgagcacatctgcacctgctggaggaccaggatacatgaggctgccacatgtgcatcccatgctgccccctccaccctttcaacgaggcagctgtgtccagttggtgccttttagtcaggggaattgagactctgagagtgggatggggaagagacaagatcttgaacatgccaacggcatgcttgggcagaaactggttgcctgcacttttgtgctgtgcgtcacttttcccaagcatgcatggccttgtgtgcccctgtgtactcttcttcagatctcatctgggaggcccagaatctccacacctgcccatgcagtctcctgtggccattgtgtgatggaggacacaccttggcccccttgtgcagggcagaatccgaacccccatatatgacagtcctgagaatgcaggtggttgaggggagcggtagatctaagtaccccacgtgctggaggcttgccaaggttgtcttgatgcctgctcagaccctcgggatatgagcatattgggtttctatattagactaaattcccgtttgattaactagaagggagaccgggggcatctgatgcttgactggccagtgtctggacgatcccacagggctttggagaacagattggagacttttcaagccacctgtgagagggatgtcatatggcagagaatgtggcatgtgtgcctcactacagagctgcactcattgtcgcagtggcttgcccagagtcagggaagtgagatctagtttcccatgtccacagaattctttcattcaaccaccttcctattcctgggcacagttgacctagggcttcagcatcgtctttacagagacacggagctctttttctgaatagaaagcgataaagactagtttactatcaagggaatgcaggggactgtgctttgtcaccactgtctcattctatcattttgcaatttaatgatttttacggttggctctgaaatgcattacacactgcagaaactttctctcagagggaagagggagatttgccatggcaaaggacaaatcatatgctgtgtaaaccttaaaatactatacacaggagctaaattttcaggctttaaaatttccagatgaattcaattaaaagtaatcaccacacaccctatactttcctttcttcaaatgctggaatgtgtattaatatgtatggtaacccaaggaggctcacagaaagttacagagagtaacactatatgcctgtctagaaattgcacgcagtatgtgcaaggccctggtctgtttttacactcaaatgtgaaaggggaaaaggacaccgcagcttgttattgcacctgagcacatcggctgatggggatgtggtctgacgtctttgttgtgaggcttttgtgctgcacttgccgcctgccccacttcacaggtcagtggcagacgcactgatgctgtgctgcttttgtgctgggggtgaggaggaaagcagcatgtagaagctagagcatgggcaagccattgtgcattaataggacacttttatttatggaactgtgtccccacataggaagagtctggcccaattagccaaggcacccttttgatggcacacatcctctttaaaatccaactcgcagctacaaggcttagcatgtcctgcatgtgttgtctttccggtttcacattagaatttgatgttaaaaagtgagctggtttgtatctaggtgaacacacctagtttgaagctgtaagttcaatcatgtacaagcaactccaagatactggccaagacttctggaaggctgggtacagtggcccacacctgtagtcccagcactttggaaggctgaggtgggaggatcacttgaagacaggagttcaagaccaaccggggtaagaaattgagacccctctacaaaaaataaaaaataaaaaaaattagccgggcctggtggcacatgcctgtggttccagccactcaggaggctgaggcaggaggatcgcttgagcccaggcggtcgaggctgcagtgagctatgattgcatcactgcactccagcctgggtgacaggaataccctgtctctagaaacaaacaaacaacagacttctgaggccacaggtggatggattttcctgccaaaagcacccagcttgtagagatttgagtgacccagtgacttccttgttccagtgctggtggtggctttttgactgggacagcagactgaggacagtgatcatggagttcccgacaagtgtgagaccgcatgttgtgaggatactttgcctgttaaatgtattggagcctggggagaatggggtgttaagccgtgaccgtcttttcccatggagcagtgagcacccatcacctccaagcccagagagaccaagcgagaaagtgggagaggaaagtgtatcgaacaagcgctttctccctcaggtctcaagttcttccctgaccccaacttgttcatacactc

SEQ ID NO: 756 - DNA, 1720 bp, Homo sapiens
aaatgcatgctctcactacttctatttagtatagtactgggaccagcaacagcaatcagacaagagaaagaagtaaaaggcatccaaacaggagaggaagaaataaaattatccctggttgcatatgacatagtcctatatatagaaaaacagactctaccaaaatatagcaaatacataagaaacaaaggaacaaaaggctgttagaactaataagtaaatttaataagattgcaggatataaagtcaatcagttgccttctttataccagtaaaaatctacacaaaaacaaaatcaagaaaatgatctcatttacagtagcataaaatatagctaagcatagtggcatttacccgtaatcccagctactgcagaggctcaagtggtaggatcgcttgagccggagagattgaggctacagtgagacattatcgcactattgcactccagcctggatgacaaagcaagaccctgtctcaagcaaacaaatgaataaataaacaaagggcacaagatctgaataatcacttctccaaaaaagaaataagaagccaacaggtatatgaaaaagtgctcagcatcgctaatcatcaggaaaatgtatatcaaaaccacaacaacataataccccacatctgttatgatagctattattgaaaagacacaaaataacaagtgttggttagggtgtagagaaaagagaacccttgcacactgttggtgggaatatataaatgtttattaaaaattaaaaatagaattgccatgtgacacagtgatctctctcttgagtatatactcattggaaatgaaatcagcccttcatacaaatatctgggctctcattttcactgaagcattattcacaataccaaagatatggaaacaacctaagtgtccatggatggataaatgaattctaaactttggtactattccgcctttaagaaggaagtcctgccattttcatggcaatatagatgaacctggaggacattatgctgagtgaaataaaccagacacagaaataaaaatatttgattatcccacttaacatattgaatcttaaaataaaaagtcaaatacatagaaattgagagtagacagtagttaccaggggtaggggttggagagaaatctggagtcatatgtcagggtacaaagttgcaattatgtaggataaataagtctagagatataacctatgccatgatagctatggataatagtattatataacatactggaaatttacaaagagaaatttcaggcattcttgttacaaaaaaaagattaaataaagatctacctatgtaaggagatagatatattaatttacttgactatagtaatcacttcacaatgcttatatatatcaaaacatcatttataccttaaatatttacaattttaaaattaaggaagtaacaattcaaaaaaacaaggcacagttatcattgggagacaaagatatgctttttaattgattctgatctcatacaagcaaaatgggaagttaaattttgattttgaacctgttttctgttttaagttgcattccattttgtttatatttgaatgaatgcattgctttgttttattctgagtaattattataagatagagagtagaaaaacaataaaaaataacaatgtaacttaagagtatttgaaaagaaacaaaatcaacaaacttgctagactaaaaagagacagaagg

SEQ ID NO: 757 - DNA, 832 bp, Homo sapiens
ggtcatttagaaaatgttttataaattgaatcacatattatgcaaccttttgggactggcttttttgactcagtataattccctggaaattcatcaaagctgtcacacatatcaagagttcattcctttttattgctaagtagcagtactccattgtagagctctttcacagtttgactattcacctgttgaaggtcatatgagtggatttctttctttattttttttatttttttttttgagatggagtctcactctgtcacccaggctggagtgcagtggcgcgatctcagctcactgcaagctccgcctcccaggttcacgccattctcctgcctcagcctcccgagtagctgggactacaggcgcccgctaccacacccggctaatttttgtatttttagtagagacagggtttcaccatgttagtcaggatggtctcgatctcctgacctcgtgatctgcctggctcagcctcctgaagtgcagggattacaggcgtgagccaccgcgcccagcccatatgcttatttttcatctgtatatcttatttagtgaggtgtctgttaaggtcactggcccatttttaatcaggttgtctttttcttattgttgagtttaaagcattctttgtatattttagataacagtcttttattagacttatcttttgcaaatattttctcctagcctgtggcttttctccttattctcttgacagtgtctttcacagaacagaaagttttaacttcaatgaagtccaacttatcaattctgtctttcatggatcatgctgttgatgttgtatctaaaaaataatcacaaaactcga

SEQ ID NO: 758 - DNA, 367 bp, Homo sapiens
ggcacgagcatccttagtgctaatgagcatgcctagaatagatatactctgtgtgtatgcgtgtgtgtgtgcgcgcgctccatgtgtgtgctctgttgcgtgtctacaaagcagatgtctacacacctgcccttaggtgacctcaccaatgtccatgaactggtgctgctagatcagctaagaggtccctggacggaagacggaaatggataacaattgacctgtctcaaaatactgccttactgggtacccatgctcccccatcagaatccaatctacctttcaacgtctagctcagcccatcttaccaggaagcctcacttgaccaccttctgaacttagaccaaggctagaaaatatgttttat

SEQ ID NO: 759 - DNA, 769 bp, Homo sapiens
ggcacgagtgttgaattgatccctttaccattatgtaatggccttgtctcttttgatctttgttggtttaaagtctgttttatcagagacgtggattgcaacccctgccattttttgttttccagttgcttggtagatcttcctccatccttttattttgagcctatgtgtgtctctgcacatgagatgagtttcttgaatacagcacactgatgggtcttgactaaccctatttgccagtctgtgtcttttaactggagcatttagtccatttacatttaaagttaatattgttatgtgtgaagttgatcctgtcattatgatgttagctggttactttgctcgttagttgatgcagtttcttcctagcctcgatggtctttacaatttggcatgattttgcagtggctggtaccggttgttcctttccatgtttagtgcttccttcaggagcacttttagggcaggcctggtggtgacaaaatctctcagcatttgcttgtctgtaaagtattttatttctccttcacttatgaagcttagtttggctggatatgaaattctgggttgaaaattcttttctttaagagtgttgaatattggcccccactctcttctggcttgtagagtttctgccgagagatctgctgttagtctgatgggcttccctttgtgggtaaccggacctttctctctggccgcccttaacattttttccttcatttcaactttggtgaatctgacaattatgtgtcttggagttgctctt

SEQ ID NO: 760 - DNA, 465 bp, Homo sapiens
ggcacgaggtgaatttgatcctgccattatgatgttagctggttattttgccctttagttgatgcagtttcttcatatcctcaatggtctttacaatttgacatgtttttgcagtggctgctaccgattgttcttttccatgtttagtgcttccttcaggagctcttctaggtgacaaaatctctcagcatttccttgtctgtaaagtattttatttctccttcacttatgaagcttagtttggctggatatgaaattctgggttgaaaattcttttctttaagaatgttgaatattggcccccactctcttctggcttgtagggtttctgccgagagatccgctgttagtctgatgggctttcctttgagggtaacccaacctttctctctggctgcccttaatattttttccttcatttcaactttggtgaatctgacaattatgtgtcttggagttgctctt

SEQ ID NO: 761 - DNA, 1030 bp, Homo sapiens
ggcacgagaaaaaatgtacattctgttgatttgcggtggagagttctgtagatgtctattaggtccgcttggtgcagagctgagttcaattcctggttatccttgttgactttctctctcgttgctctgtctaatgttgacagtggggtgttaaagtctcccattattaatgtgtgggagtctcactctctttgtaggtcactcaggacttactttatgaatctgggtgctcctgtattgggtgcatatatatttaggatacttagctcttcttgttgaattgatccctttaccattaagtaatggccttctttgtctcttttgatctttgttcatttaaagtctgttttatcagagactagatttgcaatccctgcctttttttgttttccatttgcttcgtagatcttcctccatccttttattttgagcctatctgtgtctttgcacgtgagatgggtttcctgaatacagcacactgatgggtcttgactctttatccaatttgccagtctgtgtcttttaattggagcatttagtccatttacatttgaagttaatattgttatgtgtgtatttgatcctatcattatgatgttattttgctgattagttgacgcagtttcttcctagtctcgatggtctttacaatttggcatgtttttgtagtggctggtactggttattcctttccatgtttagcgcttccttcaggagctcttttagggcagtcctggtggtgtcagaatctctcatcatttgcttgtctgtaaagtattttatttctccttcatttatgaagcttagtttatctggatacgaaattctgggttgaaaattcttttctttaggaatgttgaatattggcccccactctcttctggcttgtagagtttctgccaagagatctgctgttagtctgatgggcttcctttgtgggtaacccgacctttctctctggctgccttaacattttttcttcatttcaactttggtgaatctgacaattatgtgtcttggtggtgctctt

SEQ ID NO: 762 - DNA, 339 bp, Homo sapiens
gctcatccttagttttcatttgtgagcgttcaacatgcatctggcgagttctccatttttttctggctgtaccacattccttgtaaacagattcataggattccatggtgtggataaaccagagtttactaagccactccctgtcagtgggctttaggttgctttctgttttcctgcttttatacataatacgatggggagcatccctgtttgtactttcttgtacccttgtgcagatggttcctgagggtagatctaaaaacgggaaataggccaggcgtggtggctcacgcctgtaatcccagcactttgggaggccgaggcaggcgaatcactcga

SEQ ID NO: 763 - DNA, 1288 bp, Homo sapiens
  misc_feature (1172)..(1172): n equals a,t,g, or c
  misc_feature (1186)..(1186): n equals a,t,g, or c
tttttttttgttttatataatttattcttatttgtgattacaagtatacctctacagaaagttagtatactcacacaaaggcaacttgtgcagaagagaatgttaaatgtgtaacgtctcagaaacccaataatgataattatcaaattatccaatttttgtggagatggggttttgccatgttggttgtaaaaggagagaccaagtaagtgggggttgaagtcagattagaccaaaagtgaatggcagagagtaytataatgtccatgaagggctgctagagtcaccgtgatcatagcccaagcagagatagggaaaggaagatgtgagcagagtttggggtctcgaacaatggaggttattcgtgcagcccaggaaaggctccccaaagccaggatcaacctcccttggaggcggtccctcatggaggcatggtcaggcaccttagatttgagamcagctatgttgctgctgaccagctgtgtgaccctgggctggtttccttccacacaatgggagtgccaatggctgcatgcatgcaaagaccgtctgaggataggaggaagcaatctgttgagcacccgtgtacctgagtgtcatcacctcccaagggcatccttcgttccagagctggcrccttggaaggcccttggtcactgaaggcagtgatgatggtaacagcagtaaatcatcatttacggctgatgagggaaggccaggggtagggctcctaggtcctggataagaatgagggtctgggcactcctggggacagctgagtggtaggactcctgggtccccagggggaaggtccatcttcagtggcattgggcctaggctgggatgctgagttatccactggagcatcagcagtacaggcaggcacagaggcagtggatccatcggaggtggcaggtgtaggatcgtctggtgagcaagtagagtcaccaaatctggctgaccactacccccactacccccactatccccacagacgatgccctgtcccttgcctcatgctccggcagggtacaggctcgcacctggggcctcaaggarcatctctctwagacctctgtgtcctggtcattgaatgggcacttgagtcacccrgggccattggaamaaagaggaagaatcaggccccacgatgttttgggagaatgtttaancacaggaaaatgcncagaatacatgcacgacacgggggcactgtcagtgtgggaacaatggtttacaacctccaagcctaatctgaacactctcccctgtgcaatctgaaaggaac

SEQ ID NO: 764 - DNA, 666 bp, Homo sapiens
tctgtgggctattccggcactgggtgtggttctgccgctgctgaccatcctgactgcacgtatggataaagccgcgtgggcgtttgtgttctcctccctgacgctggcctgcatcatcctgacagccggtatcgcaatgttcccgtttgtgatgccgtccagcaccatgatgaacgcaagtctgacaatgtgggatgcaacttccagccagctgacgcttaacgtcatgacctgggttgcggtggttctggtaccgatcattctgctctacaccgcctggtgttactggaaaatgttcggtcgtatcaccaaagaagatattgaacgtaacacccactctctgtactaagtaaggagctaaaaatgtggtatttcgcatggattctgggaacgcttcttgcctgttcgtttggggtaatcaccgcctggcgcttgaacacgtcgaatcaggcaaagccggtcaagaagacatctgatgagtaagattatcgcgactttgtatgcggtaatggacaagcgcccctgcgggcgctttccttcgtgatggcgctcacccctttcgccctcgcggtacgcatataatcttcgcttaaaacatcgacaaacgacgcgcgggtaaagcgcgccatcacggcggccactgccgcgccgagcgtcagggggggt

SEQ ID NO: 765 - DNA, 281 bp, Homo sapiens
cggcacgagctgtaaagtattttatttctccttcacttatgaagcttcgtttggctggatatgaaattctgggttgaaaattcttttctttaagaatgttgaatattggcccccactctcttctggcttgtagagtttctgccaagagataagctgttagtctgatgggcttccttttgagggtaacccaacctttctctctggctgcccttaacatttgttccttcatttcaactttggtgaatctgacaattatgtgtcttggagttgctcttctcgag

SEQ ID NO: 766 - DNA, 484 bp, Homo sapiens
ggcacgagctcggagacgtttgatcatctgaagccttcttctctcaactcgtcagtcattctccgtccagctttgttccattgctggcaaggagctgcattcctttggagagagagaggcgctctgatttttagaattttcagctcttctgctctgttttttccctatctttgtggttttatctacctttggtctttgatgatggtgacatacagatggggttttggtgtggatgtcctttctgtttgttagttttccttctaacagtcaggaccctcagctgcaggtctgttggagtttgctggaggtccactccagaccctgtttgcctgggtatcagcagcagaggctgcagaacagtgaatattgctgaatagcaaatgttgctggctgatcattcttctggaagtttcatctcagaggagtacccggccgtgtgaggtgtcagtctgcccctactggggggtgcctcccagttaggcta

SEQ ID NO: 767 - DNA, 2424 bp, Homo sapiens
acggcatcctgtgctgtgggggctacgaggaaagatctaattatcatggacctgcgacagtttcttatgtgcctgtccctgtgcacagcctttgccttgagcaaacccacagaaaagaaggaccgtgtacatcatgagcctcagctcagtgacaaggttcacaatgatgctcagagttttgattatgaccatgatgccttcttgggtgctgaagaagcaaagacctttgatcagctgacaccagaagagagcaaggaaaggcttggaaagattgtaagtaaaatagatggcgacaaggacgggtttgtcactgtggatgagctcaaagactggattaaatttgcacaaaagcgctggatttacgaggatgtagagcgacagtggaaggggcatgacctcaatgaggacggcctcgtttcctgggaggagtataaaaatgccacctacggctacgttttagatgatccagatcctgatgatggatttaactataaacagatgatggttagagatgagcggaggtttaaaatggcagacaaggatggagacctcattgccaccaaggaggagttcacagctttcctgcaccctgaggagtatgactacatgaaagatatagtagtacaggaaacaatggaagatatagataagaatgctgatggtttcattgatctagaagagtatattggtgacatgtacagccatgatgggaatactgatgagccagaatgggtaaagacagagcgagagcagtttgttgagtttcgggataagaaccgtgatgggaagatggacaaggaagagaccaaagactggatccttccctcagactatgatcatgcagaggcagaagccaggcacctggtctatgaatcagaccaaaacaaggatggcaagcttaccaaggaggagatcgttgacaagtatgacttatttgttggcagccaggccacagattttggggaggccttagtacggcatgatgagttctgagctacggaggaaccctcatttcctcaaaagtaatttatttttacagcttctggtttcacatgaaattgtttgcgctactgagactgttactacaaactttttaagacatgaaaaggcgtaatgaaaaccatcccgtccccattcctcctcctctctgagggactggagggaagccgtgcttctgaggaacaactctaattagtacacttgtgtttgtagatttacactttgtattatgtattaacatggcgtgtttatttttgtatttttctctggttgggagtatgatatgaaggatcaagatcctcaactcacacatgtagacaaacattagctctttactctttctcaaccccttttatgattttaataattctcacttaactaattttgtaagcctgagatcaataagaaatgttcaggagagaggaaagaaaaaaaatatatgctccacaatttatatttagagagagaacacttagtcttgcctgtcaaaaagtccaacatttcataggtagtaggggccacatattacattcagttgctataggtccagcaactgaacctgccattacctgggcaaggaaagatccctttgctctaggaaagcttggcccaaattgattttcttctttttccccctgtaggactgactgttggctaattttgtcaagcacagctgtggtgggaagagttagggccagtgtcttgaaaatcaatcaagtagtgaatgtgatctctttgcagagctatagatagaaacagctggaaaactaaaggaaaaatacaagtgttttcggggcatacattttttttctgggtgtgcatctgttgaaatgctcaagacttaattatttgccttttgaaatcactgtaaatgcccccatccggttcctcttcttcccaggtgtgccaaggaattaatcttggtttcactacaattaaaattcactcctttccaatcatgtcattgaaagtgcctttaacgaaagaaatggtcactgaatgggaattctcttaagaaaccctgagattaaaaaaagactatttggataacttataggaaagcctagaacctcccagtagagtggggatttttttcttcttccctttctcttttggacaatagttaaattagcagtattagttatgagtttggttgcagtgttcttatcttgtgggctgatttccaaaaaccacatgctgctgaatttaccagggatcctcatacctcacaatgcaaaccacttactaccaggcctttttctgtgtccactggagagcttgagctcacactcaaagatcagaggacctacagagagggctctttggtttgaggaccatggcttacctttcctgcctttgacccatcacaccccatttcctcctctttccctctccccgctgccaaaaaaaaaaaaaaaaaaaaaa

SEQ ID NO: 768 - DNA, 426 bp, Homo sapiens
  misc_feature (388)..(388): n equals a,t,g, or c
  misc_feature (394)..(394): n equals a,t,g, or c
  misc_feature (423)..(423): n equals a,t,g, or c
ggcacgagcggcacgagctcgtgccgaattcggcacgaggtttctccctcaggccttgtctgagccctgcagtggtttgccaccatatagatcgatccgatttttcgaggacagtctctagtgctctgtctcttttcgtcgsagctgtgtgggacagccagctctaggccatgtttatcaagttgattttcctggtggctttgcctcttataggaaagaaagggggcaagaaaagctctttaattgtccatcgttaaggcccatgtcccagaaagaagacgctttcagatgctttcagctgcatctgcatcgtgagggaatggctgtgtgtttgagccgcctgggctggaagagtcattgcatgctgtgcatccagcctccccagcangtttgnctttgtcctgcaagttgttggtggggacnttt

SEQ ID NO: 769 - DNA, 272 bp, Homo sapiens
acgttgtagaaatggctgggggcgaaaatgctgataataaaacgtagcgtggcgatcatcgcgatactgttcagtccgttaagtacggcgagcaatctcacatcgcaattgcacaacttttttagcgcccaactcgcgggggtaagtgatgaggttcgtgtttctattcgtacagcgcccaatctactaccgccatgcgagcagccattgctttcgatgagcaataattcccgcctgtggggcaatgtgaatgtgttggcacgctgcggtaa

SEQ ID NO: 770 - DNA, 955 bp, Homo sapiens
ggcacgagctgcaccaaccaaactcagaaacacaagcacattctcaggccccagagcaattatgtgcccaggccctagtgcatggttttttgtggggcttttaagggttgttttgtttgtttgtttgtttgtttgtttgttttgcaggggtagaaggtggaagaaaaaaaccttctacacaggttcaaggtgcagagagagatgtcatggagggccagcgctcagccgcagtgcctcaggtgtacctggctccatgcaggttctccagccacacttctgctgctgcttgtgggcctcatctcatctgtgttcctcctacatgtcattatcagtgagcagctcacggcagcatagcgggaggaatttgtcttgcttaaccagggaaggttcagttgcgttggaagaggggatggcaaggcatctccatgtcagtctcctcctcaaggctcaaaagacacatggggcacttgagctgtgcaggaatcccatggctaatgccagcatcatactgtggcagaaactaagtggtatctgcaagaagagagaaagccttgacttcacaagtgggagaaatctctcgtggagtgactaatgttggcattaagtttgccttcagagggtgggtcatgtatacagcctcttctttcaaagtgggggcttaggatatttctatcatcttatgatatttagaagtttaagcttgattcaatcataccacaatgtatacatatatcgaaacatcacattgtaccccttaaatgtatacaactatgatttgtcaattaaaaaattaaaaatttttagaaaacatagaatctcagacgtgactagatctatttgtttcacgcatgtattccctttagagtgtatttcatcttctcagtaattctgtggcatgcttcctcaggacatgggcagtaacagcccccaaacccccaaaaaaaaaaaaaaaaaa

SEQ ID NO: 771 - DNA, 1476 bp, Homo sapiens
  misc_feature (1145)..(1145): n equals a,t,g, or c
  misc_feature (1168)..(1168): n equals a,t,g, or c
  misc_feature (1273)..(1273): n equals a,t,g, or c
agctggagctccaccgcggtggcggccgctctaaaactagtggatcccccgggctgcaggaattcggcacgagaggtgctccccaccctcctttctgtctgtctcaccccggggccacaacctttcctccctgcaactctggccactgtgctgcctcccctgaccccagttaccaggaaactttccctgctcagctttccctgtccatggttctgtgccagcatctcagctgggcgggatgcccaaaatgctcttggcagcctcacccttttctagtctccattcccagggtagggggcctccgttttgccagcctctaggccttttgtttgttttttgtttttgttttgtacaaggtctccctctgtcacccaggctagagtgcagtggtatgatcttggctcatggcaacctcctgggctcaagcagtcctcccgtctcagcctccagagtagctaggaccacagccaccacacccaactaattttkgtatatttkgtagagatggggtgytgctgtgttgcccaggctggtcttaaattcctgagctcaagtgatccacctgctgcggcctccccaagtgctgggattccaggcgtgagccaccacgcctggccacctccaggcctcttcttttcctccgagccccatctccagtgytttcaggaaccagagcacccagcctcccagctcttacctgaccttcatccatcctttccacagttttgccgytgcctattctccagcccgagatgcaggcaacagagagatgccctctctaccccgggcaggtcctgagggctccaccagacatgcagccagcaaacaggtgggaccagatgccaggtcctccgggaaggcatkggaggtgcaaatggctcggtcccatctgtctctctctctctctcatctccacttcagaaatacctggagaattacctcaaccgtctcttgaccatgtctttctatcgcaactaccatgccatggtaaggtccaggggccgattttagatgtggagcaggattatcagaccctcggggaggagggccaggggccccagggtctgaggggctgaaagccaggtgtctcctccgggcttttgktttcctctgcagacagagttcctggaagtcagtcaagctgncctttatcccggacttgggccsnaaaggactgtgagtgyctggcccccttcacccaggcatccgtagacatcactcttaatttctccctgcctgagattggggcaagcagtgcagggtgggctggggntctggagtcctcatcccgcctctcttcctgattgtcccacagggaggggatgatccggaagcgctcaggtggccaccgtgttcctggcctcacctgctgtggccgagaccaagtttgttatcgctggtccaagaggtacgggctatggccaagcagctgggcagtgggtgggggtgaggaagaaaattttgagggcagagagg

SEQ ID NO: 772 - DNA, 1408 bp, Homo sapiens
ataatacgactcactatagggaaagctggtacgcctgcaggtaccggtccggaattcccgggtcgacccacgcgtccggataagagagcggtctggacagcgcgtggccggcgccgctgtggggacagcatgagcggcggttggatggcgcaggttggagcgtggcgaacaggggctctgggcctggcgctgctgctgctgctcggcctcggactaggcctggaggccgccgcgagcccgctttccaccccgacctctgcccaggccgcaggccccagctcaggctcgtgcccacccaccaagttccagtgccgcaccagtggcttatgcgtgcccctcacctggcgctgcgacagggacttggactgcagcgatggcagcgatgaggaggagtgcaggattgagccatgtacccagaaagggcaatgcccaccgccccctggcctcccctgcccctgcaccggcgtcagtgactgctctgggggaactgacaagaaactgcgcaactgcagccgcctggcctgcctagcaggcgagctccgttgcacgctgagcgatgactgcattccactcacgtggcgctgcgacggccacccagactgtcccgactccagcgacgagctcggctgtggaaccaatgagatcctcccggaaggggatgccacaaccatggggccccctgtgaccctggagagtgtcacctctctcaggaatgccacaaccatggggccccctgtgaccctggagagtgtcccctctgtcgggaatgccacatcctcctctgccggagaccagtctggaagcccaactgcctatggggttattgcagctgctgcggtgctcagtgcaagcctggtcaccgccaccctcctccttttgtcctggctccgagcccaggagcgcctccgcccactggggttactggtggccatgaaggagtccctgctgctgtcagaacagaagacctcgctgccctgaggacaagcacttgccaccaccgtcactcagccctgggcgtagccggacaggaggagagcagtgatgcggatgggtacccgggcacaccagccctcagagacctgagctcttctggccacgtggaacctcgaacccgagctcctgcagaagtggccctggagattgagggtccctggacactccctatggagatccggggagctaggatggggaacctgccacagccagaactgaggggctggccccaggcagctcccagggggtagaacggccctgtgcttaagacactcctgctgccccgtctgagggtggcgattaaagttgcttcacatcctcaaaaaaaaaaaaaaaaaaaaaaaaaaaaaaaaaaaaaaaaaaaaaaaaaaaaaaaaaaaaaaaaaaaaaaaaaaaaaaaaaaaaaaaaaaaaaa

SEQ ID NO: 773 - DNA, 1471 bp, Homo sapiens
  misc_feature (1326)..(1326): n equals a,t,g, or c
gcaatggcttttcttccttcctgggtttgtgtactagttggttccttttctgcttccttagcagggacttccaatctctcagagacagagccccctctgtggaaggagagtcctggtcagctcagtgactacagggtggagaacagcatgtacattattaatccctgggtataccttgagagaatggggatgtataaaatcatattgaatcagacagccaggtattttgcaaaatttgcaccagataatgaacagaatattttatgggggttgcctctgcagtatggctggcaatataggacaggcagattagctgatccaacccgaaggacaaactgtggctatgaatctggagatcatatgtgcatctctgtggacagttggtgggctgatttgaattattttctgtcttcattaccctttcttgctgcggttgattctggtgtaatggggatatcatcagaccaagtcaggcttttgcccccacccaagaatgagaggaagttttgttatgatgtttctagctgtcgttcatccttccctgagacaatgaacaagtggaacaccttttaccagtatttgcagtcaccttttagtaagtttgatgatctgttgaagtacttatgggctgcacacacttcaaccttggcagataatatcaaaagttttgaagacagatatgattattattctaaagcagaagcgcattttgagagaagttgggtactggctgtggatcatttagctgcagtcctctttcctacaaccttgattagatcatataagttccagaagggcatgccaccacgaattcttcttaatactgatgtagcccctttcatcagtgactttactgcttttcagaatgtagtcctggttcttctaaatatgcttgacaatgtggataaatctataggttatctttgtacagaaaaatctaatgtatatagagatcattcggaatctagctctagaagttatggaaataactcctgaaacatttaacttcaaacttcaggaaatgattaatgaattaaaaatgaaaaactcgaacttgacaatcagtaatttcaaaaaattaatgtcatcatgaccatgtagtttattctttctgatatttttgatttatgcttatttgttaagatcttgtacatgtattaaaaacttaaattaaatgcattcaagttaaaawaatgattattttgctcatgattttaaaattcattaatgattaaaatgtttaagataaaaggatattgcattatgctaccaaaaaataactgagaaattaacaaacatattaaacttgtgtagctcttttgttgntatcctatcatcaaatttcatgacatttagactaatatatattgctgatttataaccaaaatccagatcattttgaaataaaatactgacaggcagttcaaatttttaaaattcataaaactgacctggaaagtagaatacacta

SEQ ID NO: 774 - DNA, 2377 bp, Homo sapiens
  misc_feature (2320)..(2320): n equals a,t,g, or c
  misc_feature (2322)..(2322): n equals a,t,g, or c
  misc_feature (2376)..(2376): n equals a,t,g, or c
gagatgagctgtcgcgggcggcgcccggccttgctcaacgcccagcagtccccaccgtcgctgccgccgccaccgccctcggccgctgccgaggcctcctgcagccatcatgtccgccagcgccgtctacgtgctggacctgaagggcaaggtgctcatctgccggaactaccgtggcgacgtggacatgtcagaggtggagcacttcatgcccatcctgatggagaaggaggaggaggggatgctgtcgcccatcctggcccacgggggggtccgtttcatgtggatcaaacacaacaacctgtatctggttgccacatccaagaagaacgcgtgcgtgtcgctggtcttttctttcctctataaggtggtgcaggtgttttccgagtacttcaaggagctggaggaggagagcatccgggacaactttgttatcatctacgagctgctggacgagctcatggacttcggctacccccagaccaccgacagcaagatcctgcaggagtacatcactcaggaaggccacaagctggaaacaggggccccgcggccaccagccaccgtcaccaacgcggtgtcctggcggtccgaaggcatcaagtatcggaagaatgaggtgttcttggacgtcatcgagtctgtcaacctcttggtcagcgccaacggcaatgtcctgcgcagcgagatcgtgggctccatcaagatgcgagtcttcctctcgggcatgcccgagctgcgcctgggcctcaacgacaaggtcctctttgacaacacgggccgcggcaaaagcaaatccgtggagctggaggatgtgaagttccaccagtgtgtgcggctatcacgcttcgagaatgaccgcaccatctccttcatcccacccgacggcgagttcgagctcatgtcctaccgtctcaacacccacgtcaagcctttgatatggatcgagtcggtgatcgagaagcactcccacagccgcatcgagtacatgatcaaggccaaaagccagttcaagcggcggtcaacagccaacaacgtggagatccacattcccgtgcccaatgatgccgactcacccaagttcaagacgacggtggggagcgttaagtgggtccccgagaacagcgagatygtgtggtccatcaagtccttcccgggcggcaaggagtacctgatgcgggcccacttcggcctgcctagtgtggaggccgaagacaaggagggcaagcccccgatcagtgtcaagttcgagatcccttacttcactacctccggcatccaggtgcgctacctgaagatcattgagaagagtgggtaccaggccctgccctgggtgcgttatatcacgcagaatggagattaccagctccggacccagtgaggggctgtcgcagccaacaccccggcctcggggctcctggtggcagcaccaggggacacacctgccaaacccaccagatggaggggccctccctggtctctggccaccctcccagcctctgcccagggacccctgccttccccaggccatctgctctgccgtcgacactcgtctcagaagcccctttcccagaagaggctggtcttcaagaagtctcgtttctttgcccctgaagtcagtttcaggggaaggatgtgaaatttttccgtgtagaggttacagccttttatgctgttgagctcccaggtaccaaaaagcttggccaacgcttgccagccagccagctgcaggtggcatctgccacgaaggaagcgccagcctcgccaggccagcaggggcgtcgttttgttgccattttgttgaacgttatgggtttatgggtgttcctggaacttgtctttgtgcattcgttgctgtttgtgttaccctcactgtccccatgtcccacccacgtcctacggcactcaggaagcacttggtgaggacgagccctcacccttcttgtcttccttcccagcagcgcccgcagcgggccatttacacgtcgaggctggcacctggcgcgctcgggggccactgtagcgtctgcctgctccctggactcgcaggcctcgcctgtggcgccttcccagggccagcctgggtcacgagatgctgtcactcagccagatcagtattgacccaccaggggaggtggggtttggtgagagacgccagcctcagactttttcccactgagggtccagagagcggggccacgtgtcacccacgtctgcgcttggtcacccgtcctccccaccctgtgtgtgtttatgtcatagttacattaaattccattcattgaataaaaaaaaaaaaaaaaaaactcgggactagttntntcctcgggccgatttggaagggttttttttttttttttgaaaaatttaaaaaant

SEQ ID NO: 775 - DNA, 285 bp, Homo sapiens
  misc_feature (283)..(283): n equals a,t,g, or c
tcccgggtcgacccacgcgtccgggaaagcctggtcatgcaatttagcagaaggtttgcggtgaggtggaaggcatttatttgctttgtcttgctaaccctcaaaatcaaagcctgtcccagcctgacagcttccagcagaaagtgtcagaaccagaggcccagccaaggcccaggcagggcaggcggtcctcctgggccctggcattgttcttacamatggagggcatggccatcttytytttmagggacaggctggcctgacatggaaggtgaaacaaggnaa

SEQ ID NO: 776 - DNA, 1334 bp, Homo sapiens
  misc_feature (14)..(14): n equals a,t,g, or c
  misc_feature (16)..(16): n equals a,t,g, or c
  misc_feature (21)..(21): n equals a,t,g, or c
  misc_feature (236)..(236): n equals a,t,g, or c
  misc_feature (1242)..(1242): n equals a,t,g, or c
  misc_feature (1313)..(1313): n equals a,t,g, or c
  misc_feature (1316)..(1317): n equals a,t,g, or c
  misc_feature (1325)..(1325): n equals a,t,g, or c
gtcaatgggagttngnttggnccccaaaatcacgggactttccaaaatgtcgtacaactccgccccattgacgcaaatggscggtaggcgtgtacggtgggaggtctatataagcagagctsgtttagtraaccgtcagatcgcctggagacgccatccacgctgttttgacctccatagaagacaccgggrccgatccagcctccggactctagcttaggccgcgggacggatancaatttcacacaggaamcagctatgaccactaggcttttgcaaaaagctatttaggtgacactatagaaggtacgcctgcaggtaccggtccggaattcccgggtcgacccacgcgtccggccgtgtggaccaggaggagcgctttccacagggcctgtggacaggggtggctatgagatcctgccccgaagagcagtactgggatcctctgctgggtacctgcatgtcctgcaaaaccatttgcaaccatcagagccagcgcacctgtgcagccttctgcaggtcactcagctgccgcaaggagcaaggcaagttctatgaccatctcctgagggactgcatcagctgtgcctccatctgtggacagcacccgaagcaatgtgcatacttctgtgagaacaagctcaggagcccagtgaaccttccaccagagctcaggagacagcggagtggagaagttgaaaacaattcagacaactcgggaaggtaccaaggattggagcacagaggctcagaagcaagtccagctctcccggggctgaagctgagtgcagatcaggtggccctggtctacagcacgctggggctctgcctgtgtgccgtcctctgctgcttcctggtggcggtggcctgcttcctcaagaagaggggggatccctgctcctgccagccccgctcaaggccccgtcaaagtccggccaagycttcccaggatcacgcgatggaagccggcagccctgtgagcacatcccccgagccagtggagacctgcagcttctgcttccctgagtgcagggcgcccacgcaggagagcgcagtcacgcctgggacccccgaccccacttgtgctggaaggtgggggtgccacaccaggaccacagtcctgcagccttgcccacacatcccagacagyggccttggcattgtgtgtgtgcctgcccaggaggggggcccaggtgcataaatgggggtcagggagggaaaggaggagggagagagatgganaggaggggagagagaaagagaggtggcgacaggggagagagatatgaaggagagagagacagaggaggcanaanngggaaganaaaaccaga

SEQ ID NO: 777 - DNA, 459 bp, Homo sapiens
ccacgcgtccgctttccttcaaatagctccaaataaccccgtgattttggatgattgattatgggaatgctgctttcactgtacatccaagctctcctggcctcagcggataagtatatgagagcacagttttcctggtgtcaggatatgaagatccagggaacaaagaacctcaaagaacaacacctggattgtcaaggtttggccagcagtgcactttctccaaccttacagtcatacgcaagcagttgtggttctcctgtccagcctgccaccactggaccatccctgtatacattccttctccctttgaagaaatccacaaaagaaaaagcatggtatgtagaatcataagactcatagtctggggtcacctctaaaaaaaaaaaaaaaaaaaaaaaaaaaaaaaaaaaaaaaaaaaaaaaaaaaaaaaaaaaaaaaaaaaaaaaaaaaaaaaaa

SEQ ID NO: 778 - DNA, 2085 bp, Homo sapiens; identical to SEQ ID NO: 306
  misc_feature (2062)..(2062): n equals a,t,g, or c
  misc_feature (2065)..(2065): n equals a,t,g, or c
  misc_feature (2084)..(2084): n equals a,t,g, or c

SEQ ID NO: 779 - DNA, 436 bp, Homo sapiens
  misc_feature (380)..(380): n equals a,t,g, or c
  misc_feature (385)..(385): n equals a,t,g, or c
  misc_feature (415)..(415): n equals a,t,g, or c
ggaacatgttggcctcgagcagccggatccgggctgcgtggacgcgggcgctgctgctgccgctgctgctggcggggcctgtgggctgcctgagccgccaggagctctttcccttcggccccggacagggggacctggagctggaggacggggatgacttcgtctctcctgccctggagctgagtggggcgctccgcttctacgacagatccgacatcgacgcatctacgtcaccacaaatggcatcattgctacgagtgaacccccggccaaagaatcccatcccgggctcttcccaccaacattcggtgcagtcgcccctttcctggcggattggacacgaccgatggctggggaaagtttattatcgagaagatttntcccntccatcattcacgagcacagatgtgtccanaaggttcccggaattttttta

SEQ ID NO: 780 - DNA, 1006 bp, Homo sapiens
  misc_feature (993)..(993): n equals a,t,g, or c
  misc_feature (996)..(996): n equals a,t,g, or c
  misc_feature (998)..(998): n equals a,t,g, or c
aattcggcacgagtgaaaatcggaaagttggcggggctgcgggagcygagcctagagtccggctgttggctagagtgggcgcggatctggtgtggggaaggcggcgggactcaggcctgcctgcgaagcattgtcctacataatggtagaggacgaactggcacttttcgataaaagcataaatgaattttggaataaattcaaaagtacggacacctcctgtcagatggcgggactaagagatacctacaaggattccatcaaagcatttgcagaaaagctgtctgtgaaattaaaggaagaagaacgaatggttgagatgtttctggaatatcaaaatcagatcagcaggcaaaataagctcattcaagaaaaaaaggataacttgttaaaattgattgctgaagtaaaaggcaaaaagcaggaattggaagtactgactgcaaatatccaggatcttaaggaagaatattctaggaagaaggaaactatttctactgctaataaagcgaatgcagagaggttgaaaaggctgcagaaatctgcagacttgtataaagatcgacttggactagaaattcgaaaaatttatggtgagaaattgcagtttattttcactaatattgaccctaagaatcctgagagcccatttatgttttccttacatctcaatgaagcaagggactatgaagtgtcagatagtgcccctcatcttgagggcctagcagaatttcaagagaatgtaaggaagaccaacaatttttcagcttttcttgccaatgttcggaaagcttttactgccacggtttataattaacatacaaatagtgtatataaaaacggtttatttttcttctctaacatatctctttttttcttggttttattattattatactttaagttttagggtacatgtgcacaatgtggcaaggttggtacatatgtatacatgtgccatattgtgtgctgcacccattactcgcatttcantangnatatctcc

SEQ ID NO: 781 - DNA, 1566 bp, Homo sapiens
  misc_feature (1532)..(1532): n equals a,t,g, or c
ccacgcgtccgccttgagtacaatgcaaatgcaaatatcctccaaatgcggtgaaagtattttagacatgcaaggggacatattaaatgatttggggatggacagaagagcccttgaaagatggggatatcatcatccagctttcaccggcagattgagcagggctcatcacctcaggagaactttcttcagcttgggagtactttttttaaaaatagctttaggagacaccatgcaatttaccaacttaagttgtgcaattctgttgttttcagtgtatgctcagagttctgcaatcatcaacacaatcagtttcagaacattttcatcaagccatcagaaaactcctgaactgattgcagtcactgcccattttccccctaagctctcagatctaggcaaccactaatctactttctatctctatggacgtgcctatgatgggtgtttcatataagtagagttatataatattaataccttgtcttttgtgactggcttctttcacttagcataatattttcaagtgtcattcatgttatattgcatatcagaacttcatttctttttatggccacgtaatattttattgtatagatatactactttttgtttatatatcagttaatggatatttaggktcgttctttcttggctcttgggctgctaggaacatttgkttatagtgcttttttgtgggtatatattttcatttctcttgggtatatacctaggagtagagttgcttgatgatatgataactcaaattaaggaactcacaaactgttttccaaagcagctgkgcttttacatcctcactaaaaatctatgagaattccagtttctccacatcctcatcagtgctcgttactattttttaattatatccatcatagtgggtgtgaaatggtgttcattgcagcttagatttgaattccccgagtgactaatgattcgagcatcttttcatgtgtttattgtccatttctgtcttatttgaagaagtgtctgttcaaaggtttgcccgttttgattagattatttttatcgtttaattatgggagttctcggtaccagtttttttaaatcagatatatgattgcaaatactttctcccaatctgtagggttgtctttttacctttttgatggtgtccttttaagtcccaaaattgatgaagtccagtttatctgttttgttcctttgttgcttatgctttgaatgtcacatctaagaaaccactccctaatcaaaggccacaaagattaactcttatgcttccttctaagagcactgtaggtgtagctgttgtatttagatcataactctatgattcattttgagttaatttttgtatatggtgtgaggcatagggttttcttctttattcttttgcatgtagataatgcaaaagactttcaacctcaggcctggcatggtsgctcmcacctgtcatcctagcactttgggagrccaaggtggttggatcacttgaggtcagaggagttcaagaccaggctggccaacatggnctttactaaaaatacaaaaattagctgggcatgg

SEQ ID NO: 782 - DNA, 848 bp, Homo sapiens
ccacgcgtccgggctggagcacccctgtccctcaccagtcagctgacagtgccggggcacagccttgggcatgaggctcccagcctggtgcaggcacaccacattggcgatctcctgctggcactgcttggtgctggcccgggccagtgcagacagtgcgtccttgcccacgatctcgcacttgggggtgaagccattgtccgtgggctggggggcgccctccacgctccctgtatctccgtgtggtgggaagccagctgcccctaccagcgcctccccagctgctgccccactcaggttctggcggcctggggcttccgggggtggggcaggtgggacccgccggctggctctctgccggctggttactgcccgtaccaccttggccacgggcactcctgggctctcagcacggccccgccagcgcccatgccttctgcctgtgctgccccgtcgccctgctgaactgtctgtgtccttggaaccctcgccagggtccagtggccgtggcttcctctgccttcctttctgtaagagagatgcagacacatcactggggcagaccctcacctcctcctgttccttgagttccatcttggttgggggcaccctcagacctagatgttcctgcccaccttttacccagagaagcgcttttcacctaaggactccgcacaatcagtaccaccatgggagcacctccctggccagccactgagggcgcactgggcctccctccatcataccaacacccccgtcccccactggctctcagattacatggcagtgtgcttggttaaaaaaaaaaaccaaaaaaaaaaaaaacaaaaaaaaaaaaaaaaaaaaaa

SEQ ID NO: 783 - DNA, 1951 bp, Homo sapiens
  misc_feature (1938)..(1938): n equals a,t,g, or c
aggtgttaggggccggtttggccggcggcggytgcgggcctctcgggtgcttcttgtcggcttgaaaggacttggggctgaaattgccaagaatctcatcttggcaggagtgaaaggactgaccatgctggatcacgaacaggtaactccagaagatcccggagctcagttcttgattcgtactgggtctgttggccgaaatagggctgaagcctctttggagcgagctcagaatctcaaccccatggtggatgtgaaggtggacactgaggatatagagaagaaaccagagtcatttttcactcaattcgatgctgtgtgtctgacttgctgctccagggatgtcatagttaaagttgaccagatctgtcacaaaaatagcatcaagttctttacaggagatgtttttggctaccatggatacacatttgccaatctaggagagcatgagtttgtagaggagaaaactaaagttgccaaagttagccaaggagtagaagatgggcccgacaccaagagagcaaaacttgattcttctgagacaacgatggtcaaaaagaaggtggtcttctgccctgttaaagaagccctggaggtggactggagcagtgagaaagcaaaggctgctctgaagcgcacgacctccgactactttctccttcaagtgctcttaaagttccgtacagataaaggaagagatcccagttctgatacatatgaggaagattctgagttgttgctccagatacgaaatgatgtgcttgactcactgggtattagtcctgacctgcttcctgaggactttgtcaggtactgcttctccgagatggccccagtgtgtgcggtggttggagggattttggcacaggaaattgtgaaggccctgtctcagcgggaccctcctcacaacaacttcttcttcttcgatggcatgaaggggaatgggattgtggagtgccttggccccaagtgaactcaagatttggcagccccagagatgccaactgcagcatgcccacctgtattccctgtccccttccttcatgaaggcatctccaggcaaggaaaactgaagtcattggcccgatacaaaacatttcctgcaacgaaggaggtggtgccgacgtgctgcttcccatcaccagcagctgctcgacaaggggcgcagggtggctgtctttgttccagcactgttcaggctgcctgtcatcccgggcctgccagctcccctgagtgatgagcacttccaagcacccctctgccctttctctgtccttatgctgtcccggcctcgccagccctctggggcattgtgggagatgcctgccaggaatgagcaagctctgttgctcgggagcctcttgtcaccttcttggacttattccccacctgataccttatagagaaaagtgtgaattcaggtggagagtaggcccaggccccatgaggcaccagtggaagcacagctccaagttcagacaggtgcccttagagaggaaaaccatgacaggcaaatgcatttcctctggagtttgagaccctgacaaacaacaggtggcatctggtgtgctgttcttgagttttcgtttaggattagttgagttccagctgggttttgggagaaaggagatgctaccaagtcttggatgttagggcgagaccctgcaagttgagtattagagagcttgtctttcaaggcaggttcctggggcttcagggctaggagggaggagcctgcccttttaacagaaccccagtcacatgcggctcaagtcactcagaggctgttgcatttcagggctatgttggtcctttgtttacctcctaaaccacagctgtttgtgtttcacatatgttgtgaattttccttggttctttttaaaggaatgataataaagttacttgctttaggaaaaaaaaaaaaaaaaatcgccgganggggggggccccg

SEQ ID NO: 784 - DNA, 1479 bp, Homo sapiens
agacggtggatgttgcagctgatcatgcagttgggttcggtgctgctcacacgctgccccttttggggctgcttcagccagctcatgctgtacgctgagagggctgaggcacgccggaagcccgacatcccagtgccttacctgtatttcgacatgggggcagccgtgctgtgcgctagtttcatgtcctttggcgtgaagcggcgctggttcgcgctgggggccgcactccaattggccattagcacctacgccgcctacatcgggggctacgtccactacggggactggctgaagcggtgctggggagctgtaccgccggaaacctcgcagccgctccctgcagtccaccggccaggtgttcctgggtatctacctcatctgtgtggcctactcactgcagcacagcaaggaggaccggctggcgtatctgaaccatctcccaggaggggagctgatgatccagctgttcttcgtgctgtatggcatcctggccctggcctttctgtcaggctactacgtgaccctcgctgcccagatcctggctgtactgctgccccctgtcatgctgctcattgatggcaatgttgcttactggcacaacacgcggcgtgttgagttctggaaccagatgaagctccttggagagagtgtgggcatcttcggaactgctgtcatcctggccactgatggctgagttttatggcaagaggctgagatgggcacagggagccactgagggtcaccctgccttcctccttgctggcccagctgctgtttatttatgctttttggtctgtttgtttgatcttttgcttttttaaaattgttttttgcagttaagaggcagctcatttgtccaaatttctgggctcagcgcttgggagggcaggagccctggcactaatgctgtacaggtttttttcctgttaggagagctgaggccagctgcccactgagtctcctgtccctgagaagggagtatggcagggctgggatgcggctactgagagtgggagagtgggagacagaggaaggaagatggagattggaagtgagcaaatgtgaaaaattcctctttgaacctggcagatgcagctaggctctgcagtgctgtttggagactgtgagagggagtgtgtgtgttgacacatgtggatcaggcccaggaagggcacaggggctgagcactacagaagtcacatgggttctcagggtatgccaggggcagaaacagtaccggctctctgtcactcaccttgagagtagagcagaccctgttctgctctgggctgtgaaggggtggagcaggcagtggccagctttgcccttcctgctgtctctgtttctagctccatggttggcctggtgggggtggagttccctcccaaacaccagaccacacagtcctccaaaaataaacattttatatagaaaaaaaaaaaaaaaaaaaaaaaaaaaaaaaaaaaaaaaaaaaaa

SEQ ID NO: 785 - DNA, 809 bp, Homo sapiens
ggcacgagaagggttgctagatcttccagcttagttctcctctacactccctgttgtacaagtaccctagaaccacaaggccattgcagtgtaaaagtattgagttaatgtgttcagatgaatttgggcctttggagcaaaaacaattatccattctcaaactgatgaaattagtgccatgctttgtaatttggccctcaaactacttaactgtgtatctgcctggaatatgaatataagactgaaatgtctgttaaaacccaaaaatgtctccaaagtctgttcccggggcctttatttcatatatgttatggactctctttaattcagccatagatggcaagccatttgttagaaattatggccaggtgcagctgctcacgcctatagtcccagcactttgggaggctgtggcgggcagatcacctgaggtcgggagtttgagaccagcctggccaacatgatgaaaccctgtctctactaaaaatacaaaaattagccgggcgtggtggtgtgtgtctgtcatgccagctactcaggaggctgagacaggagaatcgcttaaacccaggaagtggagttgcagtgagtcaagattgcgccattgcactgcagtctgggtgacagaacgaaactccattacaaaaaaaaaaagagagaaattatgctcaagggcgagcaaggtggctcacgcctgttatcccagcactttgggaagctgaagtggacaaactgcttgagcccaagaatttgagaccagcgtgggcaacatggtgagaccttgtctctacaaaaaaaaaaaaaaaaaa

SEQ ID NO: 786 - DNA, 1253 bp, Homo sapiens
  misc_feature (370)..(370): n equals a,t,g, or c
ggtatttttgatgtttctgacaaatctgccctagtgagctcagtggatgcagcttgaagccaaccttaatgacagtgaatagtgacagaatatttgccacagtcatttttgttttactttgttgtttttcttttttgttctgttttgattttggtgctaaaccaaaaagaagattggaatcaggatctaaattcaccaagtatttaggttatctgtacacaaattttagtgatgactaatataaggaagtttttaaaaatgggtatctttaaaagaaatttgaaataattccttactaacctgatcctttttagttgctaagattatatttcacaaggtatatggtggtttggtggttaaattttcattntaaagtggtgatagttgcaaatattctaaaatagactaattataattactttcattcaaatactgaatgtgagagtatataatcatcttatttgtatgtggtaagaaagactactatgtatttttctgacaacatttagtggtagttatgattatttccatttctttggacttgttcacagaaatataactgtggttacttaagraaacatgttctagataaacataaagattatatcccatcttttttaaaaataggagcagatgtctcaagtattagatgccatgtttgaaaaattggtcaaagatggggagcatgtaattgatcaaggtgacgatggtgacaacttttatgtaattgataggtaagttttgcccaaccttactattgaaattgaaagaaccttttgtataaaatctcaaccttattacggcaactgacaggttaatataggatagttgttattgccgctactcttattattacataataggcactgtaaacctgttgtgagtacatgcagtgaaaccacagtggatcatgaaaagagacatagtttatagaggaactaatgacttttggttagtctaatctgtaaatgtcagtcatttaacatgagcatcttcatttgctgaattctaattgagagatattatgtagtagtattagtatgtactagatgcctgttacagtgagaacagcagtataatataacatctgagatattaattcacagtagacctcaattggtatttcttaaaaggttctttttttataaactgtgtaaaacatgctcatggtttaaaaaattcaaaaaaaaatctattttaaaaaaaaaaaaaaaaaactgcgagggggggacccgtacccaatagtccctaat

SEQ ID NO: 787 - DNA, 1120 bp, Homo sapiens
ggaggagaacgccacctccatcgaacccatccgcgacttcctggccatcgttttcttcgcctccatagggctccacgtgttccccacgtttgtggcgtacgagctcacggtgctggtgttcctcaccttgtcagtggtggtgatgaagtttctcctggcggcgctggtcctgtctctcattctgccgaggagcagccagtacatcaagtggatcgtctctgcggggcttgcccaggtcagcgagttttcctttgtcctggggagccgggcgcgaagagcgggcgtcatctctcgggaggtgtacctccttatactgagtgtgaccacgctcagcctcttgctcgccccggtgctgtggagagctgcaatcacgaggtgtgtgcccagaccggagagacggtccagcctctgatggctcggagatgatggaccgtggaagggaagcgtctgtggggagtgagcgcttagatggccagcagctgctccttctgggaagctcgcaccttggcaacagaacagccctctagcagagcgtcagtgcagtcgtgttatcccggcttttacagaatattcttgtcctattttagaattttccggagtagtttatttgcagtctgttgattatgtgcagtagacccgggacactgcgttttaccgatcaccttgaatgtggtgcctggatgtgccttttttttttttccctgaaattattattaattttctattgtgagttcatcagttcatagtttttttagtaaagaagcaaaattaaaaggcttttaaaaatgtacaacttcagaattataatctgttagtcaaatatttgttattaaacatttctgtaatatgaagttgtaatcctggccgtgagcttggaagcttacttttgattcttaaagcctatgttttctaaaatgagacaaatacggatgtctatttgccttttattgtaacttttaaatgaaataatttcatgtcaatttctattagatatatcacttaaaatatttggttttaaatcacaagaatatgtattctttaataaagataatttatgatcatggtataattaattgaaatttattaaaatctgtttttattaaaaaaaaaaaaaaaaaaa

SEQ ID NO: 788 - DNA, 357 bp, Homo sapiens
atgtttttgagaaagatgttaatgttttgccatggtaaaagatttcaaacctcattttttttgttccttttcttgttacttttaagaaaactcatgctctgtttctctgaatcaaatgaagtagaagtttacaaagctaactttcttcttgtctagctattaacatgatttgtcaaatgcatgtttttttcagccaaagccttgtttccatttttgttgatgtgtactcttgctcttttagctagagtgtatgtgaaaataaagaaatacatcattgtattcacaaaaaaaaaaaaaaaaaaaaaaaaaaaaaaaaaaaaaaaaaaaaaaaaaaaaaaaaaaaaaaaaaaaaaaaaa

SEQ ID NO: 789 - DNA, 827 bp, Homo sapiens
ccacgcgtccgggcaggataaggtgttccagaccctgcctgacacctgatccgaagaggttgctcatgtttgctcaggaggtgaggttcacacaataaagggcaggaggagggcttggacctggtataaaacatctggaagtttccagggggctgctttgcatctgaaactgtcagccccagaatgttgacagtcgctctcctagcccttctctgtgcctcagcctctggcaatgccattcaggccaggtcttcctcctatagtggagagtatggaagtggtggtggaaagcgattctctcattctggcaaccagttggacggccccatcaccgccctccgggtccgagtcaacacatactacatcgtaggtcttcaggtgcgctatggcaaggtgtggagcgactatgtgggtggtcgcaacggagacctggaggagatctttctgcaccctggggaatcagtgatccaggtttctgggaagtacaagtggtacctgaagaagctggtatttgtgacagacaagggccgctatctgtcttttgggaaagacagtggcacaagtttcaatgccgtccccttgcaccccaacaccgtgctccgcttcatcagtggccggtctggttctctcatcgatgccattggcctgcactgggatgtttaccccactagctgcagcagatgctgagcctcctctccttggcaggggcactgtgatgaggagtaagaactcccttatcactaacccccatccaaatggctcaataaaaaaatatggttaaggctaaaaaaaaaaaaaaaaaaaaaaaaaaaaaaaaaaaaaaaaaa

SEQ ID NO: 790 - DNA, 1471 bp, Homo sapiens
ggaattcggcacgagtggacacctcatacctcagtctcccaattacgccctcctcctccccctcctcctccctcttttctctcctcctcctcccctttctctcctcctcgcccccctgaaaacctgtggctcggagagaccttggcttctctgggactctacccctggggacttcccacatctgctcctgagcttgggggcaggggggcaaccgmctgtaggaacctctccagcgatgggagccgcccgcctgctgcccaacctcactctgtgcttacagctgctgattctctgctgtcaaactcagggggagaatcacccgtctcctaattttaaccagtacgtgagggaccagggcgccatgaccgaccagctgagcaggcggcagatccgcgagtaccaactctacagcaggaccagtggcaagcacgtgcaggtcaccgggcgtcgcatctccgccaccgccgaggacggcaacaagtttgccaagctcatagtggagacggacacgtttggcagccgggttcgcatcaaaggggctgagagtgagaagtacatctgtatgaacaagaggggcaagctcatcgggaagcccagcgggaagagcaaagactgcgtgttcacggagatcgtgctggagaacaactatacggccttccagaacgcccggcacgagggctggttcatggycttcacgcggcaggggcggccccgccaggcttcccgcagccgccagaaccagcgcgaggcccacttcatcaagcgcctctaccaaggccagctgcccttccccaaccacgccgagaagcagaagcagttcgagtttgtgggctccgcccccacccgtcggaccaagcgcacacggcggccccagcccctcacgtagtctgggaggcacggggcagcagcccctgggccgcctccccacccctttcccttcttaatccaaggactgggctggggtggcgggaggggagccagatccccgagggaggaccctgagggccgcgaagcatccgagcccccagctgggaaggggcaggccggtgccccaggggcggctggcacagtgcccccttcccggacgggtggcaggycctggagaggaactgagtgtcaccctgatctcaggccaycagsctctgycggyctcccagccgggctcctgaagccmgctgaaaggtcarcgactkaaggccttgcagacaaccgtctggaggtggctgtcctcaaaatctgcttctsggatctccctcagtctgcccccagcccccaaactccycctggctagactgtaggaagggacttttgtttgtttgtttgtttcrggaaacaaagaamgggagagagrggrmaatagagggttgtccacycctcacattccacgmcccaggcctgcaccccacccccaactcccagccccggratwaamccattttcctgcraaaaaaaaaaaaaaaaaaaaactcga

SEQ ID NO: 791 - DNA, 835 bp, Homo sapiens
  misc_feature (40)..(40): n equals a,t,g, or c
  misc_feature (46)..(46): n equals a,t,g, or c
  misc_feature (52)..(52): n equals a,t,g, or c
taacctttggcttgctagtttgaaccaaagagttgtttgngcattngctgtnttgccatttctggggtagggagggagactcaggcccacacttgggtattttctaatttcagacaaacacacactcagcgcgcactcactgattcctacacattgccaagatttcacacatgtgaccaggggccaccaaagtccctgtgacctttgtgactaggatcctaatttctctattttctcctgggtgcctgggtctgtgtcacctggggcagtgtggataatgtttagttctgtgacactgttttttgggggtggcacctggttctccgatgcctgggctggtgtcaggcccaggactgtagtgctgggagcagtaaagctcagctctgtgtaatgagtgatgctatggcttgctcgtgtcttatgatccaatccttttctacatcagcccttgttttgttttatggctagtcttatctggcctggttatttccttgcggggaggagagggtttgctaatctgctcccagcccaacctattaccaccccacctcgctgggacctactgctcgggaggcagcagacagggagccaccagcagtggcttcctggccctgtgctgggggtggggggaagctgggggcacatgtggcccttgccttctgagcagctcccagtgccagggctttgagactttcccacatgataaaagaaaagggaggtacagaagttccaattccctttttattttgctggttggtatctgtaaatgtttaataaatatctgagcatgtaaaaaaaaaaaaaaaaaaaactcgagggggggcccgtacccaat

SEQ ID NO: 792 - DNA, 2231 bp, Homo sapiens
ggcacgaggttctcccttgtttttcctgaaatcctgtttttggtttcaacacggaagggctaatcatgtggtccttgagaatgaaacagattctgatcctacacctaatgactgttttgaaccagtgtctccagaattctgtgggaaagaagccatcagaatcaaaaatcttaaaaaagaatatgcagggaagtgtgagagagtagaagctttgaaaggtgtggtgtttgacatatatgaaggccagatcactgccctccttggtcacagtggagctggaaaaactaccctgttaaacatacttagtgggttgtcagttccaacatcaggttcagtcactgtctataatcacacactttcaagaatggctgatatagaaaatatcagcaagttcactggattttgtccacaatccaatgtgcaatttggatttctcactgtgaaagaaaacctcaggctgtttgctaaaataaaagggatttgccacatgaagtggagaaagaggtatgtgagcatattagatgtcacacagccataaaaaagagaactctttgttaaagaagagaataagatttttggaagaaaagctaatagctcgatttgaagaagaaacaagttccgtgggacgagaacaagtaaataaggcctatcatgcatatcgagaggtttgcttgatagagataatttgaagagcaaactggacaaaatgaataaagacaactctgaatctttgaaagtattgaatgagcagctacaatctaaagaagtagaactcctccagctgaggacagaggtggaaactcagcaggtgatgaggaatttaaatccaccttcatcaaactgggaggtggaaaagttgagctgtgacctgaagatccatggtttggaacaagagctggaactgatgaggaaagaatgtagcgatctcaaaatagaactacagaaagccaaacaaacggatccatatcaggaagacaatctgaagagcagagatctccaaaaactaagcatttcaagtgataatatgcagcatgcatactgggaactgaagagagaaatgtctaatttacatctggtgactcaagtacaagctgaactactaagaaaactgaaaacctcaactgcaatcaagaaagcctgtgcccctgtaggatgcagtgaagaccttggaagagacagcacaaaactgcacttgatgaattttactgcaacatacacaagacatccccctctcttaccaaatggcaaagctctttgtcataccacatcttcccctttaccaggagatgtaaaggttttatcagagaaagcaatcctccaatcatggacagacaatgagagatccattcctaatgatggtacatgctttcaggaacacagttcttatggcagaaattctctggaagacaattcctgggtatttccaagtcctcctaaatcaagtgagacagcatttggggaaactaaaactaaaactttgctttacccaaccttcaccactgcattacttggatcaacataatcagaactgcctttatagaataattggaagagattcacgatttcaccatgaggacacttatctctttcagggtcctcccaagaaattatttaacaaactgaaaggagattttgattaaaattttgcagaggtcttcagtatctatatttgaacacactgtacaatagtacaaaaaccaacatagttggttttctagtatgaaagagcaccctctagctccatattctaagaatctgaaatatgctactatactaattaataagtaaacttaaggtgtttaaaaaactctgccttctatattaattgtaaaattttgcctctcagaagaatggaattggagattgtagacgtggttttacaaaatgtgaaatgtctaaatatctgttcataaaaataaaaggaaaacatgtttcttcaaattgcataatggaacaaatggcaatgtgagtaggttacatttctgttgttataatgcgtaaagatattgaaaatataatgaaataaaagcatcttaggttataccatctttatatgctattgcgtttcaatatttaagatttaaagtgattttttggtcacagtgttttgttgataaaatttttttagaattgaagtttgaattctaagacttgaaacaacctgatcactgaagccaactttgtcccagcacattccttaagtcctaattgggaaaaaaaaaaaaaaaaaa

SEQ ID NO: 793 - DNA, 474 bp, Homo sapiens
ttttttttttttttttttttttttgctgggtagctactatgtgcaatttattcacgatacaacatatgactgcctactatgctccaggcattacacaaagttctgaggatatacaggctaattaagtgcaacaagaatacttagaattcgtacaaagcagtagactgtgctatgagagccggtaatgagggtcctaggttagaggggaaaagaagacttcccagaggacgtgatatccaagacaaggcctgatgataaacaggactggccaggtaaggaggggaagagagagccaggcagagaaaacagcatgtgtgaagacgactcacaggcaaaactactgttatgggtgcctcacatacagatcctcagtgatcatcaatccagaccaactctattctttcctttgtggttgttattccttccaatttatttagattttattgtttagtgaaacggcacgagctcgtgccg

SEQ ID NO: 794 - DNA, 383 bp, Homo sapiens
  misc_feature (378)..(378): n equals a,t,g, or c
ggcacgagccactgcataggatattcagcagatttggctgctgtgttggccctggacagagaagcaaaatgagtgtgtgggatcccaccttttacatcctaggtgtgaacagattcaaatccactattcctccagattttatagatgaggaaaccaaggtgcacaagagggatttttttgttttgttttttgtttttgtttgtttttgagacaggattttgctttgttgcccaggctggaatgcagtggcacaaacatggctcgctgcagtctcaaactcctggccagcatgatgaaatcccatctctactgaaaatagaaaaattagctgggcgtggtggtgcacacctgtgttcccagttccttgggaggctgacntagaa

SEQ ID NO: 795 - DNA, 1975 bp, Homo sapiens
ggcacgagcagagaactgagctctttctttctcaatctcagagtggtttcttggaaccttgtttttaactgaaaacatacagtaactcttttaccctcctccaggtatagatttgggttggagaagtttctgttaacttggtgtgttttggggtgagaaaaggcagaggaggaagggtcagtcagtggaaggggtcgtgcgatgtccttgccgaggggcatcctggaacactgggtgtctgtgttctctttgatatcattgatactgttcctacacagtttggctatgtgtatccaaatcatcttgttcaatgcaaggaagttaatccctctcttccctagggaatcaggctttgataattaaaaaaaaattttttttttgtaatggcaacagaaccctcattcttcccatattgctattagttatattctgttgacttctaaacactcagagcagggatcagccctgagtttggctgattctgagtctccatggttgaggattcatatggtctaacttttactggagtgtatacccttgggtctcattgccttcagtactctcattgtgatgggctcactaccttcaaacttaggtatgtagacactttttatagtgtatcttacaagttaaggtggggatttgatggcttattatttagctttctattaaaagttcacaaacgcctgacagaattagaattagattcaatcattccccagtgtcctttccagtaagtcccagaaaagcttttgrctaaatattcagatcctagtgtgcatctatagcagcggaaacaaagmcagacattttagaagtgtgtttgattgtgtggtggtgtttttaaaaaagccacctcaaagtggctttcctgtatttgaacttagaaagaaagagataggcaggcttaagttgkttggcctatttactatttcacatgtaatgagaaaataaatacaatatcatttaggtagaggctgctgcttttctttccttgkgcattatggtaatgkcatttttaaacattaaataactaattagttgktaatatttttaaagkttatcttcagtataggactttaatggamcttaagagstatcactgkattttaagtgctttcttttttatgtttagaaatgttaatttcataaacagccataaagtaattgaaataaaaagatacattgtaaaagctttttatttctatgaaacaactttgattctaataccaaatagttatatcgggaatgtgctacgtttgctttatctgtaaaatgagagatgtcatttttcaattggaggctatggattccaaatcttccatggagttacttacgagattctgtacccattttattataattgcaattttaagatgcatttcatttatttaaaaatgtatttttaaaaataatatgtacactctaattacctgccagttggacatcacagaataaagtttttccaccatctckgtgtakatatttgtactattaataaatgtacacttgattaaaaacmcaaagatcgcttcttcygatgtagkctttttttttttttttaattggagttacmtacagtattgcagaacmaactatwgcacataggtcttgtgcctawtaatagtaataataatgattcaggcagagctcagttgtatgagctcaggtgttaactgaactattataatagtgaagtgggtaattaattcatctctatgtagtaatactgtattactggtttagtatgtgtaccagaagtttctgttcttttgtctcacttttctatttgtgtttacatattatgaggaatgttcatagttgtttttttctttctttctttctttctttctttttttttttggagacggaggttgcagtgagctgagatcacgccattgcactccagcctaggcaacagagcaagagcgaaactccgtctcaaaaaaaaaaaaaaaaaaaaaaaaaactcgag

SEQ ID NO: 796 - DNA, 1557 bp, Homo sapiens
ggcacgagttgttccaggctaccacggaatgatgattacagctgagtttacccaaatcccaccacagggtcaaatgaaagggccttgacaagatgtcccttggcagcttgagatcgcagttgtgttgctgggttatggcctgggtgcaggctggtttgcagtgggcggtactggcagctaccatcaaggtctctgtgctgggctccagccctcagcccagaggggtggttccccactttatagagagggggtttccagctcacagaagggcacgagcttgtcccaggcctggagcagctgtggagaaactgggagggaagcccgtccagcctgattccaagcccacatgctgctcacaggtcaaggccgagggactgatttttgccggtctgactggactcaagttacttcccagttccttgcagagagctgtctttgtgagacagtgtcttgggttctggaatgatgggagccgtgctttgcaaatgaggagtgattgcgtgctcatctggcagctggtgggtgtcctgctggcatcaggcctgagcggtgaccgtgctcctctgattgtcctcactgcgtgtgacaaggcctgggccactgtgtgagtcgtcttgcgctccatgaagcctggtgtctgtgcagatgtgtgggtggcgttagggttgggggacatttgtctttcacactggagaatgggagtctggagctggtgctactggtgaggaagaggcccggcctgctgccaggttcgcccacaccttccccctggttgttgggaaaaccaaccttggaatggccaaggcaggagatagcacctccccggtgaagatccaggagctctcatgagctccacgtggaaagatcaaggatctggagtctggagcccttcaggcagcaactcagtgaccatgaacctcagctctgtccacccggcacagcattgctgggagctggacccgggaggctgccggctccagagtgaggagggtccagaccatgcagacaatatgccctttttctccaaacaccatttcaagcaaacccgcaggtctcctccacggctgtcagcagcttctcgtagagcttctcataggactcatatggtggaatgtcgatccggttaaagctgaaaaaggacaaaagagagtcaccgtgtgggcagtccagccctaggaccaacctcaaggccaaggacaggcagtgagaaagacagggtctcgctaggttgcccaggctgctctcaaactcctggcctcaagtgaacctcctgccttgccctctcaacgtgctgggagccactgtgcccaatcaacacacagtaaaggggaagctcatttccagtatttgtgcaaagaaaaagacatcctttaagaagctatcgtagcaaaccaaaaaatacaaaattgtgacccagaggatgtacagtgacttctggctttctagggtgctgtggcaggtgctgtggcttttgagttctgatgatgacaaaaatattttggcagagactccatctcaaaaaaaaaaaaaaaaaaaaaaaaaaaaaaaaaaaaaaaa

SEQ ID NO: 797 - DNA, 1542 bp, Homo sapiens
cggcacgagcgcccagccgccgcctccaagcccctgaggtttccggggaccacaatgaacaagttgctgtgctgcgcgctcgtgtttctggacatctccattaagtggaccacccaggaaacgtttcctccaaagtaccttcattatgacgaaaaaacctctcatcagctgttgtgtgacaaatgtcctcctggtacctacctaaaacaacactgtacagcaaagtggaagaccgtgtgcgccccttgccctgaccactactacacagacagctggcacaccagtgacgagtgtctatactgcagccccgtgtgcaaggagctgcagtacgtcaagcaggagtgcaatcgcacccacaaccgcgtgtgcgaatgcaaggaagggcgctaccttgagatagagttctgcttgaaacataggagctgccctcctggatttggagtggtgcaagctggaaccccagagcgaaatacagtttgcaaaagatgtccagatgggttcttctcaaatgagacgtcatctaaagcaccctgtagaaaacacacaaattgcagtgtctttggtctcctgctaactcagaaaggaaatgcaacacacgacaacatatgttccggaaacagtgaatcaactcaaaaatgtggaatagatgttaccctgtgtgaggaggcattcttcaggtttgctgttcctacaaagtttacgcctaactggcttagtgtcttggtagacaatttgcctggcaccaaagtaaacgcagagagtgtagagaggataaaacggcaacacagctcacaagaacagactttccagctgctgaagttatggaaacatcaaaacaaagaccaagatatagtcaagaagatcatccaagatattgacctctgtgaaaacagcgtgcagcggcacattggacatgctaacctcaccttcgagcagcttcgtagcttgatggaaagcttaccgggaaagaaagtgggagcagaagacattgaaaaaacaataaaggcatgcaaacccagtgaccagatcctgaagctgctcagtttgtggcgaataaaaaatggcgaccaagacaccttgaagggcctaatgcacgcactaaaccactcaaagacgtaccactttcccaaaactgtcactcagagtctaaagaagaccatcaggttccttcacagcttcacaatgtacaaattgtatcagaagttatttttagaaatgataggtaaccaggtccaatcagtaaaaataagctgcttataactggaaatggccattgagctgtttcctcacaattggcgagatcccatggatgagtaaactgtttctcaggcacttgaggctttcagtgatatctttctcattaccagtgactaattttgccacagggtactaaaagaaactatgatgtggagaaaggactaacatctcctccaataaaccccaaatggttaatccaactgtcagatctggatcgttatctactgactatattttcccttattactgcttgcagtaattcaactgaaaaaaaaaaaaaaaaaa

SEQ ID NO: 798 - DNA, 1502 bp, Homo sapiens
ggcacgagatggcggagtacgacttgactactcgcatcgcgcactttttggatcggcatctagtctttccgcttcttgaatttctctctgtaaaggagatatataatgaaaaggaattattacaaggtaaattggaccttcttagtgataccaacatggtagactttgctatggatgtatacaaaaacctttattctgatgatattcctcatgctttgagagagaaaagaaccacagtggttgcacaactgaaacagcttcaggcagaaacagaaccaattgtgaagatgtttgaagatccagaaactacaaggcaaatgcagtcaaccagggatggtaggatgctctttgactacctggcggacaagcatggttttaggcaggaatatttagatacactctacagatatgcaaaattccagtacgaatgtgggaattactcaggagcagcagaatatctttatttttttagagtgctggttccagcaacagatagaaatgctttaagttcactctggggaaagctggcctctgaaatcttaatgcagaattgggatgcagccatggaagaccttacacggttaaaagagaccatagataataattctgtgagttctccacttcagtctcttcagcagagaacatggctcattcactggtctctgtttgttttcttcaatcaccccaaaggtcgcgataatattattgacctcttcctttatcagccacaatatcttaatgcaattcagacaatgtgtccacacattcttcgctatttgactacagcagtcataacaaacaaggatgttcgaaaacgtcggcaggttctaaaagatctagttaaagttattcaacaggagtcttacacatataaagacccaattacagaatttgttgaatgtttatatgttaactttgactttgatggggctcagaaaaagctgagggaatgtgaatcagtgcttgtgaatgacttcttcttggtggcttgtcttgaggatttcattgaaaatgcccgtctcttcatatttgagactttctgtcgcatccaccagtgtatcagcattaacatgttggcagataaattgaacatgactccagaagaagctgaaaggtggattgtaaatttgattagaaatgcaagactggatgccaagattgattctaaattaggtcatgtggttatgggtaacaatgcagtctcaccctatcagcaagtgattgaaaagaccaaaagcctttcctttagaagccagatgttggccatgaatattgagaagaaacttaatcagaatagcaggtcagaggctcctaactgggcaactcaagattctggcttctactgaagaaccataaagaaaagatgaaaaaaaaaactatcaaagaaagatgaaataataaaactattatataaagggtgacttacattttggaaacaacatattacgtataaattttgaagaattggaataaaattgattcattttaaaaaaaaaaaaaaa

SEQ ID NO: 799 - DNA, 2643 bp, Homo sapiens
  misc_feature (839)..(839): n equals a,t,g, or c
cggacgcgtgggcggacgcgtggccggtgcgaggcagagtgctagcgggagcgcgagccagcaagaggcgcctgcgcgatgtccgggcccctgagcccgcggcgctgagccagccgggacggacatgcgcgggagggcgccgcggggcagccgccgctcctccgggggaatgaaagctactggttgattttaaagtgcctgggcctcacaggtttggagatgtcccagaataaggcacaatgtcaatagcaggagttgctgctcaggagatcagagtcccattaaaaactggatttctacataatggccgagccatggggaatatgaggaagacctactggagcagtcgcagtgagtttaaaaacaactttttaaatattgacccgataaccatggcctacagtctgaactcttctgctcaggagcgcctaataccacttgggcatgcttccaaatctgctccgatgaatggccactgctttgcagaaaatggtccatytcaaaagtccagcttgccccctcttcttattcccccaagtgaaaacttgggaccacatgaagaggatcaagttgtatgtggttttaagaaactcacagtgaatggggtttgtgcttccacccctccactkacacccataaaaaactccccttcccttttcccctgtgcccctctttgtgaacggggttctaggcctcttccaccgttgccaatctctgaagccctctctctggatgacacagactgtgaggtggaattcctaactagctcagatacagacttccttttagaagactctacactttctgatttcaaatatgatgttcctggcaggcgaagnttccgtgggtgtggacaaatcaactatgcatattttgataccccagctgtttctgcagcagatctcagctatgtgtctgaccaaaatggaggtgtcccagatccaaatcctcctccacctcagacccaccgaagattaagaaggtctcattcgggaccagctggctcctttaacaagccagccataaggatatccaactgttgtatacacagagcttctcctaactccgatgaagacaaacctgaggttccccccagagttcccatacctcctagaccagtaaagccagattatagaagatggtcagcagaagttacttcgagcacctatagtgatgaagacaggcctcccaaagtaccgccaagagaacctttgtcaccgagtaactcgcgcacaccgagtcccaaaagccttccgtcttacctcaatggggtcatgcccccgacacagagctttgcccctgatcccaagtatgtcagcagcaaagcactgcaaagacagaacagcgaaggatctgccagtaaggttccttgcattctgcccattattgaaaatgggaagaaggttagttcaacacattattacctactacctgaacgaccaccatacctggacaaatatgaaaaattttttagggaagcagaagaaacaaatggaggcgcccaaatccagccattacctgctgactgcggtatatcttcagccacagaaaagccagactcaaaaacaaaaatggatctgggtggccacgtgaagcgtaaacatttatcctatgtggtttctccttagaccttggggtcatggttcagcagaggttacataggagcaaatggttctcaattttccagtttgattgaagtgcagagaaaaatcccttagattgcaaaataaaatagttgaactctctgtcttcatgtggaaggtttagagcagttgtgagatgctgttatgctgagaaaccctgactttgttagtgttggaaaaaagtcttacaagtctataatttaaagatgtgatggtggggaggggaggatggggaagctttttatatatgcatacattacatacctatatataaacttgtggtataaccatagaccatagctgcaggttaaccaattagttactatcgtagagtaatatatattcagaataataaactcaagctggagaaatgagtcctgatagactgaaaattgagcaaatggaagaagatacagtattgtttagatcagaatcattaaaaaatatttttgtttagtaagtttgaagatttctggcttttaggccttttctattttgttccatttatttttgcaggcaatcttttccatggagggcagggtatccattctttaccatgggtgtacctgcttaggttaaaaatcataccaaggcctcatacttccaggtttcatgttgcgtcttgttgagggagggagagcaggttacttggcaaccatattgtcacctgtacctgtcacacatcttgaaaaataaaacgataatagaactagtgactaattttcccttacagttcctgcttggtcccacccactgaagtagctcatcgtagtgcgggccgtattagargcagtggggtacgttagactcagatggaaaagtattctaggtgccagtgttaggatgtcagttttacaaaataatgaagcaattagctatgtgattgagagttattggtttggggatgtgtgttgtggttttgctttttttttttagactgtattaataaacatacaacmcaasctggccttgtgttgctggttcctaaaaaaaaaaaaaa

SEQ ID NO: 800 - DNA, 1216 bp, Homo sapiens
ggatctacacaccatccactttcatgcagagagcttcctctatcggaatggcgagaactaccgggcagatgtggtggatctgttcccagggacttttgaggttgtggagatggtggccagcaaccctgggacatggctgatgcactgccatgtgactgaccatgtccatgctggcatggagaccctcttcactgttttttctcgaacagaacacttaagccctctcaccgtcatcaccaaagagactgaaaaagcagtgccccccagagacattgaagaaggcaatgtgaagatgctgggcatgcagatccccataaagaatgttgagatgctggcctctgttttggttgccattagtgtcacccttctgctcgttgttctggctcttggtggagtggtttggtaccaacatcgacagagaaaagctacgacgcaataggaggtccatcctggatgacagcttcaagcttctgtctttcaaacagtaacatctggagcctggagatatcctcaggaagcacatctgtagtgcactcccagcaggccatggactagtcactaaccccacactcaaaggggcatgggtggtggagaagcagaaggagcaatcaagcttatctggatatttctttctttatttattttacatggaaataatatgatttcactttttctttagtttctttgctctacgtgggcacctggcactaagggagtaccttattatcctacatcgcaaatttcaacagctacattatatttccttctgacacttggaaggtattgaaatttctagaaatgtatccttctcacaaagtagagaccaagagaaaaactcattgattgggtttctacttctttcaaggactcaggaaatttcactttgaactgaggccaagtgagctgttaagataacccacacttaaactaaaggctaagaatataggcttgatgggaaattgaaggtaggctgagtattgggaatccaaattgaattttgattctccttggcagtgaactactttgaagaagtggtcaatgggttgttgctgccatgagcatgtacaacctctggagctagaagctcctcaggaaagccagttctccaagttcttaacctgtggcactgaaaggaatgttgagttacctcttcatgttttagacagcaaaccctatccattaaagtacttgttagaacactaaaaaaaaaaaaaaa

SEQ ID NO: 801 - DNA, 1291 bp, Homo sapiens
ggcacgagcaggggacatgagaggcacaccgaagacccacctcctggccttctccctcctctgcctcctctcaaaggtgcgtacccagctgtgcccgacaccatgtacctgcccctggccacctccccgatgcccgctgggagtacccctggtgctggatggctgtggctgctgccgggtatgtgcacggcggctgggggagccctgcgaccaactccacgtctgcgacgccagccagggcctggtctgccagcccggggcaggacccggtggacggggggccctgtgcctcttggcagaggacgacagcagctgtgaggtgaacggccgcctgtatcgggaaggggagaccttccagccccactgcagcatccgctgccgctgcgaggacggcggcttcacctgcgtgccgctgtgcagcgaggatgtgcggctgcccagctgggactgcccccaccccaggagggtcgaggtcctgggcaagtgctgccctgagtgggtgtgcggccaaggagggggactggggacccagccccttccagcccaaggaccccagttttctggccttgtctcttccctgccccctggtgtcccctgcccagaatggagcacggcctggggaccctgctcgaccacctgtgggctgggcatggccacccgggtgtccaaccagaaccgcttctgccgactggagacccagcgccgcctgtgcctgtccaggccctgcccaccctccaggggtcgcagtccacaaaacagtgccttctagagccgggctgggaatggggacacggtgtccaccatccccagctggtggccctgtgcctgggccctgggctgatggaagatggtccgtgcccaggcccttggctgcaggcaacactttagcttgggtccaccatgcagaacaccaatattaacacgctgcctggtctgtctggatcccgaggtatggcagaggtgcaagacctagtcccctttcctctaactcactgcctaggaggctggccaaggtgtccagggtcctctagcccactccctgcctacacacacagcctatatcaaacatgcacacgggcgagctttctctccgacttcccctgggcaagagatgggacaagcagtcccttaatattgaggctgcagcaggtgctgggctggactggccatttttctgggggtaggatgaagagaaggcacacagagattctggatctcctgctgccttttctggagtttgtaaaattgttcctgaatacaagcctatgcgtgaaaaaaaaaaaaaaaaaaa

SEQ ID NO: 802 - DNA, 1959 bp, Homo sapiens
  misc_feature (1952)..(1952): n equals a,t,g, or c
gttgattctgaggtgcactgtgggaaagagcttgtcgctgcggtgttgctgttggagactcgattgttggtgacagcgaaagaacgataacaaaatgccggagcgagatagtgagccgttctccaaccctttggcccccgatggccacgatgtggatgatcctcactccttccaccaatcaaaactcaccaatgaagacttcaggaaacttctcatgacccccagggctgcacctacctctgcaccaccttctaagtcacgtcaccatgagatgccaagggagtacaatgaggatgaagacccagctgcacgaaggaggaaaaagaaaagttattatgccaagctacgccaacaagaaattgagagagagagagagctagcagagaagtaccgggatcgtgccaaggaacggagagatggagtgaacaaagattatgaagaaaccgagcttatcagcaccacagctaactatagggctgttggccccactgctgaggcggacaaatcagctgcagagaagagaagacagttgatccaggagtccaaattcttgggtggtgacatggaacacacccatttggtgaaaggcttggattttgctctgcttcaaaaggtacgagctgagattgccagcaaagagaaagaggaagaggaactgatggaaaagccccagaaagaaaccaagaaagatgaggatcctgaaaataaaattgaatttaaaacacgtctgggccgcaatgtttaccgaatgctttttaagagcaaagcatatgagcggaatgagttgttcctgccgggccgcatggcctatgtggtagacctggatgatgagtatgctgacacagatatccccaccactcttatccgcagcaaggctgattgccccaccatggaggcccagaccacactgaccacaaatgacattgtcattagcaagctgacccagatcctttcatacctgaggcagggaacccgtaacaagaagcttaagaagaaggataaagggaagctggaagagaagaaacctcctgaggctgacatgaatatttttgaagacattggggattacgtaccctccacaaccaagacacctcgggacaaggagcgggagagatatcgggaacgggagcgtgatcgggaaagagacagagaccgtgaccgagagcgagagcgagaacgagatcgggaacgagagcgagagcgggaccgagagagagaagaggaaaagaagagacacagctactttgagaagccaaaagtagatgatgagcccatggacgttgacaaaggacctgggtctaccaaggagttgatcaagtccatcaatgaaaagtttgctgggtctgctggctgggaaggcacagaatcgctgaagaagccagaagacaaaaagcagctgggagatttctttggcatgtccaacagttatgcagagtgctacccagccacgatggatgacatggctgtggatagtgatgaggaggtggattatagcaaaatggaccagggtaacaagaaggggcccttaggccgttgggactttgatacccaggaagaatacagcgagtatatgaacaacaaagaagctttgcccaaggctgcattccagtatggtatcaaaatgtctgaagggcggaaaaccaggcgcttcaaggaaaccaatgacaaagcagagcttgatcgccagtggaagaagattagtgcaatcattgagaagaggaagaagatggaagctgatggggttgaagtcaaaagaccaaaatactaatcactagttacaaccagagatgctccacaaggatatgctccccactgttttctttctacaatttccaaaggttgcaagatgtttttttgtggatgaatataaaattttattgtgtaattacttggttccattaaaattggttaacttgcaaaaaaaaaaaaaaaaaccccagggggggcccggnacccaat

SEQ ID NO: 803 - DNA, 362 bp, Homo sapiens
  misc_feature (346)..(346): n equals a,t,g, or c
  misc_feature (359)..(359): n equals a,t,g, or c
  misc_feature (361)..(361): n equals a,t,g, or c
tcgacccacgcgtccgggaggcgcgggaaggggggagaatctgggaacgcgaggggttgggctgagccgcacttggggaacggcgcggaccttctgctagcactctggttgtctcccgtctgctcagcccagtggccccgcgcatctacttccatggagctccggtctcatctcggggccacctgtttgctgggcttcagtttcctgcttctcgtcacctcttctgatggacatattgggcttggaaaggttttgggagatcacattcattggagggacactagaggatgggaagaaggaagcactgcccatggggttgcctctgaagggtggattatccacaatncctggttgtggancnt

SEQ ID NO: 804 - DNA, 2066 bp, Homo sapiens
ccacgcgtccgatcggtccgcggctcgagtgggtctctagtccggcgccagcccgcccggcccagccctcacaggtccttcgtggtgcataccatccgcctcccagccatgcgcttcctcctgcttaccagcacttgctgcctcctggccatggccctggctgccgaggtgaagaagccagcggccccaggcacagcagagaagctgagccccaaagcggccacgctggcagagcgcagtgctggcctggccttcagcctgtaccaggccatggccaaggaccaggcggtggagaacatcctgctgtcgcctgtggtggtggcctcatccctggggcttgtgtcgctggggggcaaggccaccacagcgtcccaggccaaggcggtgctgagtgcagagcagctgcgtgatgaggaggtgcacgcgggcctgggcgagctgctgcgagccttcagcaacagcacggcgcgcaacgtgacctggaagctgggcagccgcctgtatgggcccagctcggtgagcttcgcggaggactttgtgcgcagcagcaagcagcactacaactgcgagcactccaagatcaacttccgcgacaagcgcagcgccctgcagtccatcaatgagtgggccgcacagaccaccgatggcaagctgcctgaggtcaccaaggacgtggagcggacggatggcgcgctgctggtcaacgccatgttcttcaagccgcactgggacgagaagttccaccacaagatggtggacaaccgaggcttcatggtgacccgctcgtataccgttggggttacgatgatgcaccgcacaggactctacaactactacgacgacgagaaggagaagctgcagatggtggagatgcccctggcccacaagctgtccagcctcctcatcctcatgccgcaccacgtggagcccctggagcgcctggagaagcttctgaccaaggagcagctgaagatctggatggggaagatgcagaagaaagccgtcgccatctccttgcccaagggggtggtagaggtgacccacgacctgcagaaacacctggctggactgggtctgactgaggccatcgacaagaacaaggcagacctgtcacgcatgtcaggcaagaaggacctgtacctggccagcgtgttccacgctaccgccttcgagtgggacacagagggcaacccctttgaccaggacatctacgggcgtgaggagctgcgcagtcccaagctcttctacgctgaccaccccttcattttcctggttcgagacacccagaccggctccctgctgttcattgggcgcctggtccggcccaagggtgacaagatgcgagatgagctgtagggccccagggatggcaggaggcagcccaaggctcctgagacacatgggtgctatggggggtagctgaggtaccgaccttggatgtgccatggggtgggggtgggaaaacagagcaggcttcctggatgtctgagcagatcttcccaggcagaattgactctgtctggatgtgggcccccagataccgtgatgctgagcccggacaccccacattctgagggccctggggcagttggcgtgtcttgccttcagcatcctgggattaagcctgcctcaatcagtgttcatatttatagccaagtgctttctcatctgtgagacagaatcgagctagggggcttcagcccagccctgtggaatggggaccctcttttccttaccctaccatcacctcagccctctctccagctctattccagtcctctcccaattcccctctaaaataatgaggtgctgcagccctgggataagcacccccacgatggccctggccccagagagagggatcaggaacctgctcatggtggggggcactcatgggcagactctgatcaggcatcatggggatgaactttttttctccttttgtagatgttcaaaggtggggagggcagggggaaaatgagcctttgttgctgtcaaaccaagaacttatttgtacaatttctttttcaataaaacttttccagtgaaaaaaaaaaaaaaaaaaa

SEQ ID NO: 805 - DNA, 750 bp, Homo sapiens; identical to SEQ ID NO: 269
  misc_feature (701)..(701): n equals a,t,g, or c
  misc_feature (731)..(731): n equals a,t,g, or c

SEQ ID NO: 806 - DNA, 1775 bp, Homo sapiens
gagccccctccgagaggggagaccagcgggccatgacaagctccaggctttggttttcgctgctgctggcggcagcgttcgcaggacgggcgacggccctctggccctggcctcagaacttccaaacctccgaccagcgctacgtcctttacccgaacaactttcaattccagtacgatgtcagctcggccgcgcagcccggctgctcagtcctcgacgaggccttccagcgctatcgtgacctgcttttcggttccgggtcttggccccgtccttacctcacagggaaacggcatacactggagaagaatgtgttggttgtctctgtagtcacacctggatgtaaccagcttcctactttggagtcagtggagaattataccctgaccataaatgatgaccagtgtttactcctctctgagactgtctggggagctctccgaggtctggagacttttagccagcttgtttggaaatctgctgagggcacattctttatcaacaagactgagattgaggactttccccgctttcctcaccggggcttgctgttggatacatctcgccattacctgccactctctagcatcctggacactctggatgtcatggcgtacaataaattgaacgtgttccactggcatctggtagatgatccttccttcccatatgagagcttcacttttccagagctcatgagaaaggggtcctacaaccctgtcacccacatctacacagcacaggatgtgaaggaggtcattgaatacgcacggctccggggtatccgtgtgcttgcagagtttgacactcctggccacactttgtcctggggaccaggtatccctggattactgactccttgctactctgggtctgagccctctggcacctttggaccagtgaatcccagtctcaataatacctatgagttcatgagcacattcttcttagaagtcagctctgtcttcccagatttttatcttcatcttggaggagatgaggttgatttcacctgctggaagtccaacccagagatccaggactttatgaggaagaaaggcttcggtgaggacttcaagcagctggagtccttctacatccagacgctgctggacatcgtctcttcttatggcaagggctatgtggtgtggcaggaggtgtttgataataaagtaaagattcagccagacacaatcatacaggtgtggcgagaggatattccagtgaactatatgaaggagctggaactggtcaccaaggccggcttccgggcccttctctctgccccctggtacctgaaccgtatatcctatggccctgactggaaggatttctacgtagtggaacccctggcatttgaaggtacccctgagcagaaggctctggtgattggtggagaggcttgtatgtggggagaatatgtggacaacacaaacctggtccccaggctctggcccagagcaggggctgttgccgaaaggctgtggagcaacaagttgacatctgacctgacatttgcctatgaacgtttgtcacacttccgctgtgagttgctgaggtaagcaagytgtggggccttcgcaaggcggagcaggccagatccagggctggggaaccccttagagagaggaagacaataattaacaatagctaacacttacagaggcttatagtcagccctcatccacggattcaaccaactgcgatwaaaagtattcaggaaaaaaaaaatacaacaaaaaatggtacaaataaaaaatactgtataacaacta

SEQ ID NO: 807 - DNA, 1198 bp, Homo sapiens
  misc_feature (1150)..(1150): n equals a,t,g, or c
cccacgcgtccgggggacagtgaggggacgggaaaggggccagcctgctggkccatgggaggggaccgtcaggggaaagcccttcccgcctctggggaagggaacttccgcttcggaccgagggcagtaggctctcggctcctggtcccactgctgctcagcccagtggcctcacaggacaccagcttcccaggaggcgtctgacacagtatgatgatgaagatcccatggggcagcatcccagtactgatgttgctcctgctcctgggcctaatcgatatctcccaggcccagctcagctgcaccgggcccccagccatccctggcatcccgggtatccctgggacacctggccccgatggccaacctgggaccccagggataaaaggagagaaagggcttccagggctggctggagaccatggtgagttcggagagaagggagacccagggattcctgggaatccaggaaaagtcggccccaagggccccatgggccctaaaggtggcccaggggcccctggagccccaggccccaaaggtgaatcgggagactacaaggccacccagaaaatcgccttctctgccacaagaaccatcaacgtccccctgcgccgggaccagaccatccgcttcgaccacgtgatcaccaacatgaacaacaattatgagccccgcagtggcaagttcacctgcaaggtgcccggtctctactacttcacctaccacgccagctctcgagggaacctgtgcgtgaacctcatgcgtggccgggagcgtgcacagaaggtggtcaccttctgtgactatgcctacaacaccttccaggtcaccaccggtggcatggtcctcaagctggagcagggggagaacgtcttcctgcaggccaccgacaagaactcactactgggcatggagggtgccaacagcatcttttccgggttcctgctctttccagatatggaggcctgacctgtgggctgcttcacatccaccccggctccccctgccagcaacgctcactctacccccaacaccaccccttgcccagccaatgcacacagtagggcttggtgaatgctgctgagtgaatgagtaaataaactcttcaaggccaaaaaaaaaaaaaaaagcacttaagtattcatcnaacaatcacccagtagcggtgatccagactgaaaagatgcgagacgcc

SEQ ID NO: 808 - DNA, 1340 bp, Homo sapiens
acgcgtccgcctccgtgacaacctgtgccttctccaagcgttcatgtacatccttgggatttgcctcataattgagctcatcggtggcgtggtagccttgatcttccggaaccagaccatcgactttctgaatgacaacattcgaagaggaatcgagaactactatgacgatctggacttcaaaaacatcatggactttgttcagaagaagttcaagtgctgtggcggggaagactaccgggattggagcaaaaaccagtaccatgactgcaatgccccgggacccctggcctgcggggttccctacacctgctgcgtcagaaacacgacagaagtggtcaacaccatgtgcggctacaaaaccattgacaaggagcggctcagcgtgcaggacgtcatctacgtgcggggctgcaccaacgccgtgctcatctggttcatggacaactataccatcatggcgggcctcctgctgggcatcctgctcccccagtttctgggggtgctgctgacattcctgtacatcacccgggtggaggacatcatcatggagcactctgtcaccgacggacttctggggccaggcgccaagcccagcgtggaggcggcaggcacggggtgctgcatgtgctaccccaattagcgcccctgtccggacggtgccaggaccacaccgctcgggcctctgcgcaggggccggaagggactgtggatattctccctacacattggccggaaccacggctgtgttggctctggtggcctgttcaggcctcccacagccactgcctctctggggagtggagcccctccccagctctgaggtcctgtgcctgcccaccctctttggcatggggatcaagggcaccccttctccaggccaggccgctggggaagggggtgctcattgctcagctcagggcccgtttcatttctggcaatgccatggcctgtggtgtttatgcccctttgagggtaattttgtagtaatgcataagcgaggacggaagagaccatatgtgctgtgtagggaagggtgtgtgtgtggccccttcagggccctggagcccctcagccacaccccagaggccaagttgggcccatctcacagcctcccagggaccttgagcccaccccaagactgctgctttgctgaccctgttttctacctgatttttgtaacattcattttgtacacagttaacaggagtttctgactaatcaaagctgggtggttcggcgcacaccccactcttgcctctccaagtcagtttattaatcaagcaataaagacatgattttttattaaaaaaaaaaaaaaaaaaaaaaaaaaaaaaaaa

SEQ ID NO: 809 - DNA, 2389 bp, Homo sapiens
  misc_feature (1965)..(1965): n equals a,t,g, or c
cccacgcgtccgcttaccgctgcttgctggagcgagcttccacttaactcccgtcccggtccccgcgcgccatgtgcctcctcggcgggctgagcgccccgccgctgctgctgctgccgctgctgccgctgctgctgtgtccgcctacgggcagggtgactgcagctttcccccagagctacctaatgccatacaaagtgtgggtgaccaacagagttttcctgaaaaattcacagtaacatacaaatgtaaagaaggctttgtaaaggttcctggcaaggcagactccgtggtctgtctcaacaataaatggtcagaggtggcagaattttgtaaccgtagctgtgatgttccaaccaggctacaatttgcatctctcaaaaagtctttcaccaaacagaattatttcccagtgggttccgttgtggaatatgaatgccgacctggctaccaaagggaccatcttctctcaggaaaactaacttgccttctgaattttacatggtccaaacccgatgaattttgtaaaagaaaatcatgtcctaatcctggagatttaagacatggtcatgtcaacattccaactgacatattgtatgctgcagttatccacttctcgtgtaacaaggggtacaggttagtcggtgcagcttctagttactgttccattgtaaatgacgatgttggctggagtgatccattgcctgaatgccaagaaattttttgtccggaaccaccaaaaattagcaatggagtcattctagatcaacagaacacttatgtgtatcaacaggctgtaaaatatgagtgtataaaaggcttcaccctgatcggagagaactctatttattgtactgttaagggtgaccaaggagaatggagtggccgccgcctgaatgcaaaggttctcagatttctacagtcataccagcaacagagacaccaccacagtaagtgcttcagctacaaagccacatcagctctcagaaacccaccactgcaaatgttacaggtaccaaagttacatcagctcctcagaaacccaccacagggaatgttccaggtaccgaagctacatcaactcctcagaaacccactacagcggatgtttcagagaccccgtcagcagtccagaatcccatcacggcaaatgcgtttgctacacaggccatgccagcaacccatagatcctccacagcaaaagcttcatttacacagagtcttccagcaacacgaaagtccactgctatacatgccccagtgactaagggtctccatacaacaaaaagattgacctctgctcgtattacagcaaaacagagttcagctactcccaggacaaccagcgcacctcatggaagagggaccctctcttcagatgctgccatcattgcagttggtaagtttggttcttcggcagttaaaaaaaattgtcatcactgtgggatgtacaatccttattcctggaggagaatattgtctttttactgccttaggaatactattaagatgaaatgtttaaggtcagggagaagacgggtaaatgcattttatcgacgtgtttggtggaccccgttaggtactcggtacgttcctaagtcttcccaaccgtgttcttgttccaaggtaattttagggcaacttcacatcatttggccagtcaatcaagtatccctgaacgcctattgtctcaatgcattatcattctaggggccaaaaacaacaataaggaagctattatcaatacagtttttaagcctcaagtgttttacaagtactcacaaactactccttggttgtttctagacgtctgttccagataaaccagaatgctacttttgattaacatcctgttcttttttccctttcctgtcagtgatttaaagcaaagatagctttaaaattattctgttgctatagacttaaggacatatctatgttgcaaatttctttttcttgttcccnagtcttttgttgttcattaaatatattatttgatgttatacattttaccaagaagattaataactcctaaagaagatggcaaaagaaatgtttaagaagcaatacagctaagttggcatattaaaaggatgcccagtagaaaatatgcacattaaaaagtgaatattttaaaattatgtccttataagctgaggtctcctatttatgcatgcatgagtgaaacaagggactgaagctgaaaaggtgttttttaattattattattatttatagttcttttatagttcttttatattttgaatgaacctctccttagctaaaatagttatcttgaaagatttgaacagttggattcactttgtttgtttgatattttcaatagaaataaatgcattctaaatgaaaaaaaaaaaaaaaaaaaaaa

SEQ ID NO: 810 - DNA, 1401 bp, Homo sapiens
gttcctgcagcccctgttgattggagagctggccccagaggagcccagccaggatggaccccaggacgcccagctggtggaggacttccgcgccctacgccaggcggccgaggacatggagctgtttgaggccaagcccgccttcttcgctctcctgctgggccacatcctggccatggaggtgctcgcttggcttctcgtctacctcttcggcccgggctgggtgcccagcacccttgccgcccttgtcctggccacctcccaggctcagtgctggtgtctgcagcatgacctgggccacacgtcggtcttcagggagtcccagtggaaccacgtggcccagcagtttgtgatggggcagctgaagggcttctcggcccactggtggaacttccgccacttccagcaccatgccaagcccaacatcttccacaaagacccagatgtgaccgtggcgcccgtcttcctcctgggggagtcgtccgttgagtacggcaaaaagaagcgccggtacctgccctaccatcgccagcacctgtacttcttcctgatcggcccaccgctgctcaccctggtgaacttcgaggtggaaaatctggcctacatgctggtgtgcatgcagtggacggacctgctgtgggccgccagcttctactcccgcttcttcctatgctacgcccccttctacggcctccctggggccctgctcctcttcgttgctgtcagggtcctggagagccactggttcgtgtggatcacgcagatgaatcacatccccaaggagattggccatgagaagcaccgggactgggccagctctcagctggcggccacctgcaacgtggagccctcgctcttcattgactggttcagcggccacctcaacttccagatcgagcaccacctcttccccacgatgccgaggcacaactaccgcagggtggccccgctggtcaaggcactgtgtgccaagcacggcctcaactacgaggtgaagcccttcctgactgccctggtggacatcgttgggtcactgaagaagtctggcgacgtctggctggaagcctacctccaccagtgagggcagcaccccgggcccggctgccgccaagctggtccaggcagacttgccccatccgcccccctccccacctggcctagggggccctgcccacccttctggatctgctgtcctcacctcagccccctcacctgtgtgcttggcagccctaaggccatggttcttggccaaacaggaccagggttagggggatggtacataaagccacacagcatggcatgttttcctagagcaaaaatttagggaaaactgttatttttatataaaaacaaacccagataaaaaaaaaaaaaaaaaataaaaaaaaaaaaaaaaaaaaa

SEQ ID NO: 811 - DNA, 2189 bp, Homo sapiens
  misc_feature (840)..(840): n equals a,t,g, or c
  misc_feature (2188)..(2188): n equals a,t,g, or c
gcggccgctccgggtttgcagctgctccgtcatcgtgcggcccgacgctatctcgcgctcgtgtgcaggcccggctcggctcctggtccccggtgcgagggttaacgcgaggccccggcctcggtccccggactaggccgtgaccccgggtgccatgaagcaggagggctcggcgcggcgccgcggcgcggacaaggcgaaaccgccgcccggcggaggagaacaagaacccccaccgccgccggccccccaggatgtggagatgaaagaggaggcagcgacgggtggcgggtcaacgggggaggcagacggcaagacggcggcggcagcggctgagcactcccagcgagagctggacacagtcaccttggaggacatcaaggagcacgtgaaacagctagagaaagcggtttcaggcaaggagccgagattcgtgctgcgggccctgcggatgctgccttccacatcacgccgcctcaaccactatgttctgtataaggctgtgcagggcttcttcacttcaaataatgccactcgagactttttgctccccttcctggaagagcccatggacacagaggctgatttacagttccgtccccgcacgggaaaagctgcgtcgacacccctcctgcctgaagtggaagcctatctccaactcctcgtggtcatcttcatgatgaacagcaagcgctacaaagaggcacagaagatctctgatgatctgatgcagaagatcagtactcagaaccgccgggccctagaccttgtagccgcaaagtgttactattatcacgcccgggtctatgagttcctggacaagctggatgtggtgcgcancttcttgcatgctcggctccggacagctacgcttcggcatgacgcagacgggcaggccaccctgttgaacctcctgctgcggaattacctacactacagcttgtacgaccaggctgagaagctggtgtccaagtctgtgttcccagagcaggccaacaacaatgagtgggccaggtacctctactacacagggcgaatcaaagccatccagctggagtactcagaggcccggagaacgatgaccaacgcccttcgcaaggcccctcagcacacagctgtcggcttcaaacagacggtgcacaagcttctcatcgtggtggagctgttgctgggggagatccctgaccggctgcagttccgccagccctccctcaagcgctcactcatgccctatttccttctgactcaagctgtcaggacaggaaacctagccaagttcaaccaggtcctggatcagtttggggagaagtttcaagcagatgggacctacaccctaattatccggctgcggcacaacgtgattaagacaggtgtacgcatgatcagcctctcctattcccgaatctccttggctgacatcgcccagaagctgcagttggatagccccgaagatgcagagttcattgttgccaaggccatccgggatggtgtcattgaggccagcatcaaccacgagaagggctatgtccaatccaaggagatgattgacatctattccacccgagagccccagctagccttccaccagcgcatctccttctgcctagatatccacaacatgtctgtcaaggccatgaggtttcctcccaaatcgtacaacaaggacttggagtctgcagaggaacggcgtgagcgagaacagcaggacttggagtttgccaaggagatggcagaagatgatgatgacagcttcccttgagctggggggctggggaggggtagggggaatggggacaggctctttcccccttgggggtcccctgcccagggcactgtccccattttcccacacacagctcatatgctgcattcgtgcagggggtgggggtgctgggagccagccaccctgacctcccccagggctcctccccagccggtgacttactgtacagcaggcaggagggtgggcaggcaacctccccgggcagggtcctggccagcagtgtgggagcaggaggggaaggatagttctgtgtactcctttagggagtgggggactagaactgggatgtcttggcttgtatgttttttgaagcttcgattatgatttttaaacaataaaaagttctccacaaaaaaaaaaaaaaaaaaaaaaaaaaaaaaaaaaaaaaaaaaaaaaaaaaaatana

SEQ ID NO: 812 - DNA, 3103 bp, Homo sapiens
ccacgcgtccgccgaagttggtctgaaggcaagggcttgttggttgtggacagcactttgtcatgggacctgtacggttggggatgttgcttttcattttggctgtgtatggcgcttgggttgcgacgccgaaggaggaagacgatgacacagaacgcttgcccagcaaatgtgaagtgtgtaagttgctgagcctggagctgcaggaaaagctgagtcgcactggccgatctcgagaggtgctggagctggggcaggtgctagacactggcaagagaaagaggcacatcccctacagtgtttcagagacaaggctggaagaggccttggagaatttgtgtgaccggatcctggactacagtgttcatgctgagcgcaagggctcactgagatatgccaagggtcagagtcagaccatggcaacgctgaaaggtctggtgcagaagggggtgaaggtggatctggggatccctctggagctgtgggacgagcccagcgtggaagtcacattcctcaagaagcagtgtgagacaatgctggaggagtttgaagatgtcgtgggagactggtacttccatcatcaggaacagccgttacagcattttctctgtgaaggtcatgtgctcccccctgctgaaatgcatgtctacaggaaacttggactggaaaggaaaagatcacggatgggcaagagaagacagaaggggaggaggaacacgatcaggaggaggaagaagaggaagaggaggaagagaggatcaacacaccagggcactccaagcatgaccctgaggatctctgactcttgcctttgagcccccaggaggggcaggagtcatggagaagaaccctctgaaatctgagctctctgtgctccacataagggcatgtgtgtatgtgtgagtgatcccaccccggagcttgtagctgttctcacctgtctggtctcaggtaggatcctagtggtgcagcatagcaaggctatggggacaaaaccaggaacaggaggcagaaggcctgcttcaaccgatgagtcctctgcctgccacagagccccttaactggcaggtgtgtgtgtgtggtgacaatgctgaaggctttcccctttaaatctctctactacttcccaccccacccagaggtcagtgaagccattggacctatgggtctaaggcgaaaggcactttgtccttcgggtccgtttttagatccctacaaggaagacgccagcttggacattctctacgacctatacacaccgcctgcgtcaaggctacaacccaagaaactgaacaaaaaaggggacactatgaagatggggcaatgatgttaagttaggtggggtagatattcggtctacttcatacaaatatcaccgagggcccaccatgtaatttcacaggtgccaaattttctacattgctagtaaattttttaaaacatcacctgggcccctagtttcaaacaacttccctgcacacttcatacctggccgatatagcagcgcccagagaatggggccgttcgtcgcccgctgttggaagctaatggtggtttgtaatttgcagtccagggaggctggcaggggtgccccggctgataaccatttaggcgcggggcagtgccaggctctcggcgcgtgcgggggaaggcaccggaattaagagaccgcgtccggcagcgcgtctcggccaccatcctccgggtttacgggagctcgcagaggacaaaatttctcgcgcttttccggggggcggagctaacctggcagggagggaaggattaggagaagcggtgacactaggtccaaggcgggaagcgcctcggttagattgagggaaataaagaggatgtcctttgtgggatgatgggtgaggacctaccacaagagaagcgtggcgaaggccgaaaaccgagggaatggcggggttcgcgctaagggaagcttggacgagaccatctacggatagggggttagggcgataccatcttgagggagttagggggtggcaaagaacagccgtggaaggtgctacttggaggaggcggtgcgcacgtgggaacccaaagagactgggccgtcgcctacatccgcacttcccttccccagccgtcccgatcctgccatgagcgctgcggtgcggaccgagccgctgcgcggggagccgcctctgctggtgcgcggcgacccctactcggtggtggtcctgcttcagggctacgcggagccggagggggtcgacgacgcggtacgcgccgacggctccgtgacgcttgtgctgctcaggcctggggctcagccaccagcctccaagagtccccgcccacagcggcggggcgaagaccgcctggaagaggcggcccgtggccccatcctcgtggacactgggggcccctgggctcgggaggcgctcctgggggccctggcggggcagggcatggcccctggagactgacgctggtggtgggcacccacggacactcggatcacatcgggaacctggggctttttcctggggcggctctgctggtctcgcacgacttctgcctgcccggaggccgctacctcccccacgggctaggtgaggagcggcccctgcagctgggccccgggctcgaggtgtgggccacgccgggccatgggggccagcgggacgtgagcgtggtggtggcgggcacggccctgggcaccgtggtggtggcaggcgacgtgtttgaacgcagcggagacgaagactcatggcaagcgctgagcgaagacccggtggcccaggagcggagccggaagagggtcctagatactgcggacgtagtcgtgcctggtcacggagccccctttagggtggtcagagaagcccctcagccacggaactgatgtccagaagaccagaggtcagtgtgatcgcttccagcccccttgcaagaggccggttttccagcgaggacagtcatctctatcactagttctgcaaccaaactaggaccaaagactggctcagccgtgtgccacctctcagggtcccccgtaaagtaggagaatgttcttgggagggtcgtccaaaataaaaataggcaactgcatagaaaaaaaaaaaaaaaaaaa

SEQ ID NO: 813 - DNA, 1405 bp, Homo sapiens
tcgacccacgcgtccgatttatactgtctgggaatgtgtggttgtagttctgtgggagaaatatatggttgaactaacattaatacacatcaccatttatttatactgtctgggaatgtgtggttgtagttctgtgggagaaataaattgtcagtgttcaccagcttgtaaaaatctagtgcgagagcttaaacatctaaataaataatgaaatgcatttatcatcattgaaattgtttggcttaaagttaactggttttgtaaaaaatgatataaatgaattaggctttacttagtgccatttgaagtatgtcctctttttttttttaaacgaaggattaaatgaagttgacatttagtaagttcttgattgacacaatttgttacagtcatgagaactgcttaacattaaaagtactttccattacagattttcctttttaaaggtttaaaaatttcaagcctgtgtactatgctgtaattgagaaactagaggaaggccttaatttgaagctcagttccaccaaataataacttgttttgagcaacttctgagcccgttttctcatcatttgcaaataatggatgcctttacaggttttgatattggaacataatatttggcacatgaaggtttaataaattttaaatttctttcagtaatctaagtgcttcctttgcatagctcatgttactctaaaagggacagatgtccttgtctgatttaacagttttaatagttaaaactgagtaagatttttttaaaaaaatagtactccattgtatttttaaaaagattttgcttccatctctgccagtttagcacttaatatacactattcttaaaacttagagccaaggcaaaagcaataaggaggtccctggggacccttagttctttaaatctttcatgttttgtaattgggagtagttaattaacctgaggtttgtttttgttttttgcttttttttttttttggtgattgctttgttcttttttaaatgcagccttcccctgaagatatttggtaattttgtaaaattgataactaaatggtcattgctattatcacacagcccataaaacagcatttgtttattgagaggaggtgccatcatgataaatgaaacatcttgagtttggaaacattggtggtttgcagtattggattgatatatatgggcttaaaatcaatttataaacctcatctgtacagtatacaaatgatgaaatttgctttttatccaaatattttgtgtcttgtaaatatgactaattatagaaatacccattatacattttgggtgatccccttatatctaataagaaataaaatagaaataatgagttgaaaaaaaaaaaaaaaaaaaaaaaaaaaaaaaaaaaaaaaaaaaaaaaaaaaaa

SEQ ID NO: 814 - DNA, 2330 bp, Homo sapiens
ccacgcgtccgggcggctgcgcacactccagagtgcccgcaacaaagcggttctgggggaggttggggctgttacccgcggcgggggcgcccgctattgcgcaggcgcctcaggaagatctctgcctcgcgcagagatcaggtcggcgtcgtccccagggcccacgagcgcggggttccgccagtgctgagttccgcgcgccggctgcagcgggaaccctgattgctttccttcaacacgttcattatgaagttattagtaatacttatattttctggacttataacttgttgtggaggtaactcttcccatagcctgccatccaagctgctgctggtgtcctttgatggtttcagagctgactatctacagaactatgaatttcctcatctccagaattttatcaaagaaggagtcctggtagagcatgttaaaaatgtttttatcacaaaaacatttcctaaccactacagcattgtgacgggcttgtatgaagaaagtcatggcatcgtggctaattccatgtatgatgtaatcacaaagaaacatttttctgactttgatgacaaggatcctttttggtggaatgaggcggtacctatttgggtgaccaatcagcttcaggaaaacagatcaagcgccgccgctatgtggcctggtactgatgtacccattcacaataccacaccttcctattttatgaattatagctcttcagtgtcatttgaggagagactaaataatattaccatgtggctgatgaattcgaacccaccagttacctttgcaacactctactgggaagaaccagatgcaagtggccacaaatatggacctgaagataaagaaaacatgtacagagtgttgaaggaagtagatgaccttattggtgagctagtccacaaactcaaggtgctaggattgtgggaaaatctcaatgtgatcattaccagtgatcatgggatgacccagtgctctaaggacaaattgataaacctggatctctgcattgatcgctcaagctacactcttgtagatctgactccagttgctgctgtccttcccaaaataaatacaacagaggtttataacaaactgaaagtctgtaaccctcacatgaatgtttatctcaaagaagacattcctgccagatttcattaccaacataatgatcgaattcagcctattattttggttgctgatgaaggctggacaattgtgttaaataaatcattaccaaaattaggtgaccatggttatgacaattctttgtcaagtatgcatccgtttctagctgcccatggtccagcatttcacaaaggctacaaacacagcacaattaacagtgtggatatttatccgatgatgtgccacatcctgggattaaaaccacatcccaataacggaacctttggtcatactaagtgtttgttagttgaccagtggtgcattaatctcccggaagccattggaattgtgattggtgcgctcttggtcctaaccacgctaacatgcctgattataatcatgcagaatagactgtctgtaccgcgtccgttttcccgacttcagctgcaagaggacgacgacgatcctttaattgagtagcatgtgctggagtttatagagtgtctttgatcagtcacgatactgaggacacactcaagaatggtattctaacgatgaaaaatacaccttgagaggcaaagaacttagaccgagcatgctagaattattttggttttccttgtgctttgttttactgcatcagctaatacataaaaccctgaccatagcaaaaattgctagtaaatcagtagttaacaccaactatttctccaactagaaactttttgtaagaaaaataatgcctctgccttttttttgcaatgaagatttgacacatttttaaataaaaatctatcaaaatttaataggcatgcttttctaataaacttttatatttgtaactgaaataacagaaatctttatgcaattagtggattttgtgtatcaggaaggaaaagttttctatatttttatatttaataactttaatagagtttgtatcccaggtaaacctatgacattggaagacctctgtgaaggttaataaaattagttaagcaggcagaacagatctagcatatgaagaaattattttaagaaaagctattataagaaaaacaacaaaaaccatgtgatacaaagcttgagtctttaccattgtctttgttaagattcctaagctgttgaagccaggaaagatatctttcaaagactgttgctataagaaattaagaaaatggaaagaaaaaaaaaaaaaaaaa

SEQ ID NO: 815 - DNA, 2047 bp, Homo sapiens
ccacgcgtccgggctgagcgcgtcacccactatcgttgcggtggtcgcttaccttctgccggcccggtccgtgccgccctttgctgttgtggccaccgcgggaccatggctgcgctcgtggtgctcctgtccttgttggcggcgggtgttttggggaacgagtttagtatattaagatcacctgggtctgttgttttccgagatggaaattggcctataccaggagaacgtatcccagacgtggctgcattgtccatgggcttctctgttaaagaagacctttcttggccaggacttgcagtgggaaacctgttccatcgtcctcgggctacggtgatggtgatggtgaagggagtcgacaagcttgctctgcccccgggccgtgtcatttcgtaccctttggagaatgcagttcctttcagtcttgacagcgttgcaaattccattcactccttattttctgaagaaactcctgtagttttgcagttggctcccagtgaggagagagtgtatatggtggggaaggcgaactcggtctttgaagatctctccgtcacattacgacagctccgcaatcgcctgttccaagaaaactctgttctcaattcacttccgctcaattctctgagcaggaacagtgaagttgacctgctctttctttctgaattgcaagtgctccatgatatttcaagtttgttgtctcgacataagcatctagccaaggatcattctcctgatttatattcgctggagctggcaggtttggatgaaattgggaagcattatggggaagattctgaacaattcagagatgcttccaagatccttgttgatgctctgcaaaagtttgcagatgacatgtacaacctttatggcgggaatgcagtggtggaattagtgactgtcagatcatttgacacctctcttgtcaggaagacaaggactattcttgaggcaaaacaagcgaagagcccatcgagcccctataaccttgcatataagtataaccttgaatatgcggtggttttcaacatggtactttggataatgattgccttggccttggctgtgattatcacctcttataatatctggaacatggatcctggatatgacagcattatttataggatgacaaaccagaagattcgaatggattgaactttcctcaagccagacttagaaaaggggtttggaaattggctgttttattaaatctttaagtgtagtttaaaagtagatggtatacttcaaatttatatatataaaaaaaaatttgctctccgtgtgccctgtgatgttcttttagagtgaattatagtattgatgtgaattgatttgtgtgctgtagagtccataatatgctcaaatataaccatttaatacaatttcattccatttaacattggaaatgtgcactgaaataaatgtaaaacatttagaatagcttgcattatttatgttggggaaaatgcactgaacttattagacaaacttaggagtgcttaacttccttacacaggctaggtgaaaatgacatttgggctgttctataccatgaaccattttaaatgtcttaatctgatgtaaatatttcagaaacaagtcagaaggttgttaacttcaagtcaccctaaactgtgggagggcttccccagtgactcagattgagaactgcacctgacagagggtggctgtgttgtaacctcttctgcaagtctggtgatccacatcgttgggtggatattaaaaatacattgatctaaaaagaaaccagctttgtggagttagagatatctgtaattatataccccaaaaccaattttggggggacatcttggagcttgactataaaaaatgtattttagtaactttcctctgtgtaagttactgttaatggcttgtggtacatcattctctagaatattaagtggaagtaaatgctctctacttttcatgtggaagtggaccaatgtctataaagagtgacaaataaagttaataatgattccaaaaaaaaaaaaaaaaaaaaaaaaaaaaaaaaaaa

SEQ ID NO: 816 - DNA, 1227 bp, Homo sapiens
cccacgcgtccggatggcggctgggtcggttgggtcgctccggccggcgtttgcgctgcggttgctcttggctgctgtgcttcaagcggtgtctgcgtttggggcagagttttcatcagaggcttgcagagagttgggcttctccagcaacttgctctgcagctcttgtgatcttcttggacagtttaacctgcttcagttggatcctgactgtagaggatgctgtcaggaagaagcacaatttgaaactaaaaagctttatgcaggagctattcttgaagtctgtggatgaaaattggggaggttccctcaagtccaagcttttgtcaggagtgataaacccaaactattcagaggactacaaatcaagtatgttcgtggttccgatcctgtattaaagctttggatgacaacgggaacattgctgaagaattaagcatcctcaaatggaacacagacagtgtagaagaattcctgagtgaaaagttggaacgcatataaatcttgcttcaattttgtcctatccttttgttactttatcagatgaaatattacagtacctagagaatattttagttttgcttccttcctttgatcactttctgtgaggcattaaacatctcattaacagtggaagtggtagcgtagcccgcggtatctgaggagtcggcaaacttaacaaaacccagttctcatacattgccttccttccacatttgttggtaccactgacaaaatgcttcataacagagttggctaattatgcaaatgatagtttgtaatttgtccagttttatgaacaacagatttttagattagggaggttaataagggagatgcctactgtgccccatgcatgtgctgtgtgctctctgaaagcaccagcaagaactacaaagcaagtaagagccactgagcctcaacagattgcctgcttctcattcttccggctgtccttttaatagaaatgttacagttcataatgaatgtgctgcggtaaaactttatggcttcattattgtaaaacagattcaagatctacagtaagagtgaaacattcagagatttgcattaatgaaggctacacagaaaaccttcaggagggtttgtgtggatctgatatttagcaaatttttgtgcttcccactcttacagaaaaataaaaaatgttcttttaagatcaaaatataaataaagtttcccaaaaaatcgaaaaaaaaaaaaaaa

SEQ ID NO: 817 - DNA, 947 bp, Homo sapiens
ggcagaggtttctggagtgcaccctgatcctcacctcggtcgtgcctcctgagctgcccatcgagctgtccctggccgtcaacacctccctcatcgccctggccaagctctacctggagggagtcaagttcagtgacttccaggccaccctacaggggctgctgctggccggctgcttcctcttcatctcccgttccaagcccctcaagaccctctcccgagaacggcccctgcccaacatcttcaacctgtacaccatcctcaccgtcatgctccagttctttgtgcacttcctgagccttgtctacctgtaccgtgaggcccaggcccggagccccgagaagcaggagcagttcgtggacttgtacaaggagtttgagccaagcctggtcaacagcaccgtctacatcatggccatggccatgcagatggccaccttcgccatcaattacaaaggcccgcccttcatggagagcctgcccgagaacaagcccctggtgtggagtctggcagtttcactcctggccatcattggcctgctcctcggctcctcgcccgacttcaacagccagtttggcctcgtggacatccctgtggagttcaagctggtcattgcccaggtcctgctcctggacttctgcctggcgctcctggccgaccgcgtcctgcagttcttcctggggaccccgaagctgaaagtgccttcctgagatggcagtgctggtacccactgcccaccctggctgccgctgggcgggaaccccaacagggccccgggagggaaccctgcccccaaccccccacagcaaggctgtacagtctcgcccttggaagactgagctgggacccccacagccatccgctggcttggccagcagaaccagccccaagccagcacctttggtaaataaagcagcatctgagattttaaaaaaaaaaaaaaaaaa

SEQ ID NO: 818 - DNA, 1310 bp, Homo sapiens; identical to SEQ ID NO: 553
  misc_feature (1237)..(1237): n equals a,t,g, or c

SEQ ID NO: 819 - DNA, 1514 bp, Homo sapiens
ccacgcgtccgcaggaggcctgggagctgggggggtgtgtctggcagtccctgcagccctgggctctgcggcccctgcgtcctccgcttggctctgccactgcatctgagtgtcttctctcctcacggctccccgcatttctaactctttctgcctcctcgtctcaaagctgttccttcccccgactcaagaatccccggaggcccggaggcctgcagcaggagcggccatgaagaagctgatggtggtgctgagtctgattgctgcagcctgggcagaggagcagaataagttggtgcatggcggaccctgcgacaagacatctcacccctaccaagctgccctctacacctcgggccacttgctctgtggtggggtccttatccatccactgtgggtcctcacagctgcccactgcaaaaaaccgaatcttcaggtcttcctggggaagcataaccttcggcaaagggagagttcccaggagcagagttctgttgtccgggctgtgatccaccctgactatgatgccgccagccatgaccaggacatcatgctgttgcgcctggcacgcccagccaaactctctgaactcatccagccccttccctggagagggactgctcagccaacaccaccagctgccacatcctgggctggggcaagacagcagatggtgatttccctgacaccatccagtgtgcatacatccacctggtgtcccgtgaggagtgtgagcatgcctaccctggccagatcacccagaacatgttgtgtgctggggatgagaagtacgggaaggattcctgccagggtgattctgggggtccgctggtatgtggagaccacctccgaggccttgtgtcatggggtaacatcccctgtggatcaaaggagaagccaggagtctacaccaacgtctgcagatacacgaactggatccaaaaaaccattcaggccaagtgaccctgacatgtgacatctacctcccgacctaccaccccactggctggttccagaacgtctctcacctagaccttgcctcccctcctctcctgcccagctctgaccctgatgcttaataaacgcagcgacgtgagggtcctgattctccctggttttaccccagctccatccttgcatcactggggaggacgtgatgagtgaggacttgggtcctcggtcttacccccaccactaagagaatacaggaaaatcccttctaggcatctcctctccccaacccttccacacgtttgatttcttcctgcagaggcccagccacgtgtctggaatcccagctccgctgcttactgtcggtgtccccttgggatgtacctttcttcactgcagatttctcacctgtaagatgaagataaggatgatacagtctccataaggcagtggctgttggaaagatttaaggtttcacacctatgacatacatggaatagcacctgggccaccatgcactcaataaagaatgaattttattatgaaaaaaaaaaaaaaaaaaa

SEQ ID NO: 820 - DNA, 2378 bp, Homo sapiens
ccacgcgtccgggtgacccccctggggaggaaggcgatggcccctgcgaggacgatggcccgcgcccgcctcgccccggccggcatccctgccgtcgccttgtggcttctgtgcacgctcggcctccagggcacccaggccgggccaccgcccgcgccccctgggctgcccgcgggagccgactgcctgaacagctttaccgccggggtgcctggcttcgtgctggacaccaacgcctcggtcagcaacggagctaccttcctggagtcccccaccgtgcgccggggctgggactgcgtgcgcgcctgctgcaccacccagaactgcaacttggcgctagtggagctgcagcccgaccgcggggaggacgccatcgccgcctgcttcctcatcaactgcctctacgagcagaacttcgtgtgcaagttcgcgcccagggagggcttcatcaactacctcacgagggaagtgtaccgctcctaccgccagctgcggacccagggctttggagggtctgggatccccaaggcctgggcaggcatagacttgaaggtacaaccccaggaacccctggtgctgaaggatgtggaaaacacagattggcgcctactgcggggtgacacggatgtcagggtagagaggaaagacccaaaccaggtggaactgtggggactcaaggaaggcacctacctgttccagctgacagtgactagctcagaccacccagaggacacggccaacgtcacagtcactgtgctgtccaccaagcagacagaagactactgcctcgcatccaacaaggtgggtcgctgccggggctctttcccacgctggtactatgaccccacggagcagatctgcaagagtttcgtttatggaggctgcttgggcaacaagaacaactaccttcgggaagaagagtgcattctagcctgtcggggtgtgcaaggtgggcctttgagaggcagctctggggctcaggcgactttcccccagggcccctccatggaaaggcgccatccagtgtgctctggcacctgtcagcccacccagttccgctgcagcaatggctgctgcatcgacagtttcctggagtgtgacgacacccccaactgccccgacgcctccgacgaggctgcctgtgaaaaatacacgagtggctttgacgagctccagcgcatccatttccccagtgacaaagggcactgcgtggacctgccagacacaggactctgcaaggagagcatcccgcgctggtactacaaccccttcagcgaacactgcgcccgctttacctatggtggttgttatggcaacaagaacaactttgaggaagagcagcagtgcctcgagtcttgtcgcggcatctccaagaaggatgtgtttggcctgaggcgggaaatccccattcccagcacaggctctgtggagatggctgtcgcagtgttcctggtcatctgcattgtggtggtggtagccatcttgggttactgcttcttcaagaaccagagaaaggacttccacggacaccaccaccacccaccacccacccctgccagctccactgtctccactaccgaggacacggagcacctggtctataaccacaccacccggcccctctgagcctgggtctcaccggctctcacctggccctgcttcctgcttgccaaggcagaggcctgggctgggaaaaactttggaaccagactcttgcctgtttcccaggcccactgtgcctcagagaccagggctccagcccctcttggagaagtctcatctaagctcacgtcctgagaaagctcaaaggtttggaaggagcagaaaacccttgggccagaagtaccagactagatggacctgcctgcataggagtttggaggaagttggagttttgtttcctctgttcaaagctgcctgtccctaccccatggtgctaggaagaggagtggggtggtgtcagaccctggaggccccaaccctgtcctcccgagctcctcttccatgctgtgcgcccagggctggtaggaaggacttccctgtgtagtttgtgctgtaaagagttgctttttgtttatttaatgctgtggcatgggtgaagaggaggggaagaggcctgtttggcctctctgtcctctcttcctcttcccccaagattgagctctctgcccttgatcagccccaccctggcctagaccagcagacagagccaggagaggctcagctgcattccgcagcccccacccccaaggttctccaacatcacagcccagcccacccactgggtaataaaagtggtttgtggaaaaaaaaaaaaaaaaaaaaaaaaaaaaaaaaaaaaaaaaaaaaaaaaaaaaaaaaaaaaaaaaaaaaaaaaa

SEQ ID NO: 821 - DNA, 989 bp, Homo sapiens
  misc_feature (490)..(490): n equals a,t,g, or c
  misc_feature (498)..(498): n equals a,t,g, or c
  misc_feature (511)..(511): n equals a,t,g, or c
  misc_feature (514)..(514): n equals a,t,g, or c
  misc_feature (527)..(527): n equals a,t,g, or c
tcgacccacgcgtccgttttgttgaaaggacctatttgggaaatacagcaggtcctcaaataacatcattttgttcaaggtcattttattataacattataatattataacctccccacactgtatgcttaaggtgatacctccagctaaatatccaaccaggtctatccctgaaatccccaagtctagcaaagaccaaaggaattagacaccaggagatgaaaattttaaattggcaataaaacatctctgtacatggattccctgttccatgcttgagacaaaggctacaaggcccttgccaccccaagtgttgtccccactscatctcttctggtaaacctcggtcttctttttctccatcatcatatcattgtaaattcagcagaaatgcaacacttcttgtggtgccaaatatctttagttatatgcagagcagttttctcatcccccaaacttccaagtattacattttaawgccttatgcmtnaaccaaanggcctattaaaantantttttaaacaagnccaaaccagtagcattccccycatgactgtcatgcctacctccagacaytgacattgccagcatcaccaataagcttctctatcctcagaaaaacccagatctcagcaggtgatctggctacatgtgaacattaaagagtgttcagatgatagccaggtgcggtggctcacgcctgtaatgccagcactttgggaggcccaggcaggcagatcacctgcagtcaggagttcgagaccagcctggtcaatatggtgaaactttgtctctgctggaaatgcaaaattatccgggcatggtggagcgtacctgtggtcccagctactcaggaggctgagacaggagaacagcttgaacccgggaggcagaggttgtagtgagccgagactgtgccactgcactgcagcctgggcaatagagtaaamttcgtctcaaaaaataaaaaaaaaaaaaaaagggcggcc

SEQ ID NO: 822 - DNA, 2055 bp, Homo sapiens
ggattccgtctcaaaaacaaacactattagaaaatgcyctggaggtggcggggagttgttgatttgtgaggacagattgaaagcaactcccagggtggccttgtccacctccccrtcgagaatrtggctgccggcctctttgaagattgtggtctggcataaggagaggtgcaggcgcctggttctgagcaccttggaatttccagccgcacagcatctggtgccctcccctccaccctcacaaggagctgccatcctgtttggattttctgtttgtggaccagaaacaaacgtttttccaaaggattagcaaataggktratttcctgtgtaacgctgctctggggcctcttcctcatcctggcagaaggagcctggagcccatgaggcagccagcactgtgcccttgctcagtcgtgctgtcccctccctctccctcagtctcytctccatgcccaagtcagtttccagccgctggtcttcatggcattcccagcacagcyggrcaccaagaggcaaaacccaaggcctggcttggccgtgttaacgattgtacagacattttttwaaataactttgtgtaatacttttctrgaatagtaagttcttgttgaactgtcacagrtgagcttctaggaacacaccrggtgtggttacttccactgggtgtgtccatggtcgtggtctgtgcytttgtaaacraacagaacacttgaaccacctyccgaattgggtcatcggcttctttacrttgatacttagagatttgcagctctctttcaaggaaacttcccctactgaaaggcataaaaaggttaaaaaagaaaatccgagagtcccaattccctgtataacagcattaaaataatctgcctgcctggaaagatgagaacactgttgcacaacccaaaatgtgtytttaatttgtgaaaaattaccatggtgagtcagacagtcattttaaacagctgaacagagactatcatcagcaaatagagctcagctttgtagctgcctttaaaatccttgtcccaaatccggtgagctctgcttgctgccgccgcgctcctgggtgatcactcagacgggtcagtgggaataacrggccaacaagacagctttttacatgtgtccaaaggatggcctttcgaaggcctggaagtatttcactgttggaagaagtaaacaagaatgacattccagatggaaatagaattctctctcttgcctttgaccaacatggtactaaggggtttcttctttcccaatgtatgtacgtgccctgctgggggccttactttatagaatgagagcatccgagcttccctaatgaatctggctagttctgtgtctggctgaggatacaggagtgggacatccactctcggatccctcagagcacagaaaccttcagctttgctgtctctgaagtatttcctccagtttccctgcgggcccctatgtttgagtttgatggctgctggatcctcactcaacgaaaactcggttggaaactgttccgcctggcagtccttttttgttgttttccatctcatttcccttccatctgaaagtggcattcagctgacttgctcatttagactgttcacggagtctgaatctgccaacgtggtgttggaggctccaccttgaaaagggccacagtcagggcaactttccccatacaggaaaacttgaaaattacatcaacagtctacgtcacagccaaattatatttcctttataccaaacaaaactatggagaactaaaagtacatcacacaaaacgtttatagtgttttgcatgtgacctatttcagtatttatataactagattagtgctttctagcaaacggttctgttaattagcgagtcactgttgattctgctgtggtggtaagttgataccgtgtaactaatcccgtggatgcctcctsgttatttttgtccaaacgaagcagccgtggtagtagctgtctatgattcttgctcagcaaagtaaaataaatgttaaatatggaaaaaaaaaaaaaaaaaaaaaaagggcggccgct

SEQ ID NO: 823 - DNA, 2579 bp, Homo sapiens; identical to SEQ ID NO: 268

SEQ ID NO: 824 - DNA, 515 bp, Homo sapiens
  misc_feature (419)..(419): n equals a,t,g, or c
  misc_feature (498)..(498): n equals a,t,g, or c
tcccgacacccgagccccgccggcgcctcccgctcccggctcccggctcctggctccctccgcctcccccgcccctcgccccgccgccgaagaggccccgctcccgggtcrgacgcctgggtctgccgggaagagcgatgagaggtgtctgaaggtggctattcactgagcgatggggttggacttgaaggaatgccaagagatgctgcccccacccccttaggcccgagggatcaggagctatgggaccagaggccctgtcatctttactgctgctgctcttggtggcaagtggagatgctgacatgaagggacattttgatcctgccaagtgccgctatgccctgggcatgcaggaccggaccatcccagacagtgacatctctgcttccagctcctggtcagattccactgccgcncgscamagargttggaagagcagtgaacggggatggggcctggttgcccgcaggttcggtgtttcccaaggaggaaggnatacttgcaagtgggat

SEQ ID NO: 825 - DNA, 2993 bp, Homo sapiens
  misc_feature (4)..(4): n equals a,t,g, or c
  misc_feature (2725)..(2725): n equals a,t,g, or c
  misc_feature (2823)..(2823): n equals a,t,g, or c
  misc_feature (2880)..(2880): n equals a,t,g, or c
  misc_feature (2979)..(2979): n equals a,t,g, or c
  misc_feature (2982)..(2982): n equals a,t,g, or c
cggnacgcgtccgggactgcaacggagagactcaagatgattccctttttacccatgttttctctactattgctgcttattgttaaccctataaacgccaacaatcattatgacaagatcttggctcatagtcgtatcaggggtcgggaccaaggcccaaatgtctgtgcccttcaacagattttgggcaccaaaaagaaatacttcagcacttgtaagaactggtataaaaagtccatctgtggacagaaaacgactgtgttatatgaatgttgccctggttatatgagaatggaaggaatgaaaggctgcccagcagttttgcccattgaccatgtttatggcactctgggcatcgtgggagccaccacaacgcagcgctattctgacgcctcaaaactgagggaggagatcgagggaaagggatccttcacttactttgcaccgagtaatgaggcttgggacaacttggattctgatatccgtagaggtttggagagcaacgtgaatgttgaattactgaatgctttacatagtcacatgattaataagagaatgttgaccaaggacttaaaaaatggcatgattattccttcaatgtataacaatttggggcttttcattaaccattatcctaatggggttgtcactgttaattgtgctcgaatcatccatgggaaccagattgcaacaaatggtgttgtccatgtcattgaccgtgtgcttacacaaattggtacctcaattcaagacttcattgaagcagaagatgacctttcatcttttagagcagctgccatcacatcggacatattggaggcccttggaagagacggtcacttcacactctttgctcccaccaatgaggcttttgagaaacttccacgaggtgtcctagaaaggatcatgggagacaaagtggcttccgaagctcttatgaagtaccacatcttaaatactctccagtgttctgagtctattatgggaggagcagtctttgagacgctggaaggaaatacaattgagataggatgtgacggtgacagtataacagtaaatggaatcaaaatggtgaacaaaaaggatattgtgacaaataatggtgtgatccatttgattgatcaggtcctaattcctgattctgccaaacaagttattgagctggctggaaaacagcaaaccaccttcacggatcttgtggcccaattaggcttggcatctgctctgaggccagatggagaatacactttgctggcacctgtgaataatgcattttctgatgatactctcagcatggatcagcgcctccttaaattaattctgcagaatcacatattgaaagtaaaagttggccttaatgagctttacaacgggcaaatactggaaaccatcggaggcaaacagctcagagtcttcgtatatcgtacagctgtctgcattgaaaattcatgcatggagaaagggagtaagcaagggagaaacggtgcgattcacatattccgcgagatcatcaagccagcagagaaatccctccatgaaaagttaaaacaagataagcgctttagcaccttcctcagcctacttgaagctgcagacttgaaagagctcctgacacaacctggagactggacattatttgtgccaaccaatgatgcttttaagggaatgactagtgaagaaaaagaaattctgatacgggacaaaaatgctcttcaaaacatcattctttatcacctgacaccaggagttttcattggaaaaggatttgaacctggtgttactaacattttaaagaccacacaaggaagcaaaatctttctgaaagaagtaaatgatacacttctggtgaatgaattgaaatcaaaagaatctgacatcatgacaacaaatggtgtaattcatgttgtagataaactcctctatccagcagacacacctgttggaaatgatcaactgctggaaatacttaataaattaatcaaatacatccaaattaagtttgttcgtggtagcaccttcaaagaaatccccgtgactgtctataagccaattattaaaaaatacaccaaaatcattgatggagtgcctgtggaaataactgaaaaagagacacgagaagaacgaatcattacaggtcctgaaataaaatacactaggatttctactggaggtggagaaacagaagaaactctgaagaaattgttacaagaagaggtcaccaaggtcaccaaattcattgaaggtggtgatggtcatttatttgaagatgaagaaattaaaagactgcttcagggagacacacccgtgaggaagttgcaagccaacaaaaaagttcaaggatctagaagacgattaagggaaggtcgttctcagtgaaaatccaaaaaccagaaaaaaatgtttatacaaccctaagtcaataacctgaccttagaaaattgtgagagccaagttgacttcaggaactgaaacatcagcacaaagaagcaatcatcaaataattctgaacacaaatttaatatttttttttctgaatgagaaacatgagggaaattgtggagttagcctcctgtggtaaaggaattgaagaaaatataacaccttacaccctttttcatcttgacattaaaagttctggctaactttggaatccattagagaaaaatccttgtcaccagattcattacmattcaaatcgaagagttgtgaactgktatcccattgnaaagaccgagccytggatggatgktatggatacmtaaaatgcacgcmagccmttatctctccatgggaagctaagttataaaaataggtgcttggtgnacaaaactttttatatcaaaaggctttgcacatttctatatgagtgggtttactggnaaattatggtaatttttacaactaaatttggactcttcagaatggttggcatatgcttcttgcatgcataatttttaatctcaaacggttcaattaaanccnttttcagattt

SEQ ID NO: 826 - DNA, 1103 bp, Homo sapiens
  misc_feature (1014)..(1014): n equals a,t,g, or c
  misc_feature (1053)..(1053): n equals a,t,g, or c
  misc_feature (1060)..(1060): n equals a,t,g, or c
  misc_feature (1074)..(1074): n equals a,t,g, or c
  misc_feature (1092)..(1092): n equals a,t,g, or c
cttaaacgtcgggttgtgggctctctcttttcccctcttgctcctttcttttctttttttctgtttttttaaaccttccaaggcaagttcatggatactaagctgatgtgtttgttgttctttttctccctgcctccgctcctagtgagtaaccacactggccgcatcaaggtggtctttactccgagcatctgtaaagtgacctgcaccaagggcagctgtcagaacagctgtgagaaggggaacaccaccactctcattagtgagaatggtcatgctgccgacaccctgacggccacgaacttccgagtggtaatttgccatcttccatgtatgaatggtggccagtgcagttcaagggacaaatgtcagtgccctccaaatttcacaggaaaactttgtcagatcccagtccatggtgccagcgtgcctaaactttatcagcattcccagcagccaggcaaggcattggggacgcatgtcatccattcaacacataccttgcctctgaccgtgactagccagcaaggagtcaaagtgaaatttcctcctaacatagtcwatatccatgtgaaacatcctcctgaagcttccgtccagatacatcargtttcaagaattgatggcccaacaggccagaagacawaagaagctcaaccaggccaatcccaagtctcgtaccaagggcttcctgtccagaagacccagaccatacattccacatactcccaccagcaggtcattcctcacgtctaccccgtggctgctaagacacagcttggccggtgcttccaggaaaccattgggtcacagtgtggcaaagcgctccctggcctttcaaagcaagaggactgctgtggaactgtgggtacctcctggggctttaacaaatgccagaaatgccccaagaaaccatcttatcatggatacaaccaaatgatggaatgcctaccgggttataagcgggttaacaacaccttttgccaagatattaatgaatgtcagctacaaggngtatgccctaatggtgagtgtttgaataccatgggcagntatcganggaccttgcaaaanaggattttgggcccggancttaccttttt

SEQ ID NO: 827 - DNA, 3037 bp, Homo sapiens
ggccacgagggccccgtcgtcgaagtttccagccctgcgagcgccgccgggtcggccgatcgtcccccatacctcggccatgcggcccctgctgctactggccctgctgggctggctgctgctggccgaagcgaagggcgacgccaagccggaggacaaccttttagtcctcacggtggccactaaggagaccgagggattccgtcgcttcaagcgctcagctcagttcttcaactacaagatccaggcgcttggcctaggggaggactggaatgtggagaaggggacgtcggcaggtggagggcagaaggtccggctgctgaagaaagctctggagaagcacgcagacaaggaggatctggtcattctcttygcagacagctatgacgtgctgtttgcatcggggccccgggagctcctgaagaagttccggcaggccaggagccaggtggtcttctctgctgaggagctcatctacccagaccgcaggctggagaccaagtatccggtggtgtccgatggcaagaggttcctgggctctggaggcttcatcggttatgcccccaacctcagcaaactggtggccgagtgggagggccaggacagcgacagcgattcagctgttttacaccaagatcttcttggacccggagaagagggagcagatcaatatcaccctggaccaccgctgccgtatcttccagaacctggatggagccttggatgaggtcgtgctcaagtttgaaatgggccatgtgagagcgaggaacctggcctatgacaccctcccggtcctgatccatggcaacgggccaaccaagctgcagttgaactacctgggcaactacatcccgcgcttctggaccttcgaaacaggctgcaccgtgtgtgacgaaggcttgcgcagcytcaagggcattggggatgaagctctgcccacggtcctggtcggcgtgttcatcgaacagcccacgccgtttgtgtccctgttcttccagcggctcctgcggctccactacccccagaaacacatgcgacttttcatccacaaccacgagcagcaccacaaggctcaggtggaagagttcctggcacagcatggcagcgagtaccagtctgtgaagctggtgggccctgaggtgcggatggcgaatgcagatgccaggaacatgggcgcagacctgtgccggcaggaccgcagctgcacctactacttcagcgtggatgctgacgtggccctgaccgagcccaacagcctgcggctgctgatccaacagaacaagaacgtcattgccccgctgatgacccggcatgggaggctgtggtcgaacttctggggggctctcagtgcagatggctactatgcccgttccgaggactacgtggacattgtgcaggggcggcgtgttggtgtctggaatgtgccctatatttcaaacatctacttgatcaagggcagtgccctgcggggtgagctgcagtcctcagatctcttccaccacagcaagctggaccccgacatggccttctgtgccaacatccggcagcaggatgtgttcatgttcctgaccaaccggcacacccttggccatctgctctccctagacagctaccgcaccacccacctgcacaacgacctctgggaggtgttcagcaaccccgaggactggaaggagaagtacatccaccagaactacaccaaagccctggcagggaagctggtggagacgccctgcccggatgtctattggttccccatcttcacggaggtggcctgtgatgagctggtggaggagatggagcactttggccagtggtctctgggcaacaacaaggacaaccgcatccagggtggctacgagaacgtgccgactattgacatccacatgaaccagatcggctttgagcgggagtggcacaaattcctgctggagtacattgcgcccatgacggagaagctctaccccggctactacaccagggcccagtttgacctggcctttgtcgtccgctacaagcctgatgagcagccctcactgatgccacaccatgatgcctccaccttcaccatcaacatcgccctgaaccgagtcggggtggattacgagggcgggggctgtcggttcctgcgctacaactgttccatccgagccccaaggaagggctggaccctcatgcaccctggacgactcacgcattaccatgaggggctccccaccaccaggggcacccgctacatcgcagtctccttcgtcgatccctaattggccaggcctgaccctcttggacctttcttctttgccgacaaccactgcccagcagcctctgggacctcggggtcccagggaacccagtccagcctcctggctgttgacttcccattgctcttggagccaccaatcaaagagattcaaagagattcctgcaggccagaggcggaacacacctttatggctggggctctccgtggtgttctggacccagcccctggagacaccattcacttttactgctttgtagtgactcgtgctctccaacctgtcttcctgaaaaaccaaggcccccttcccccacctcttccatggggtgagacttgagcagaacaggggcttccccaagttgcccagaaagactgtctgggtgagaagccatggccagagcttctcccaggcacaggtgttgcaccagggacttctgcttcaagttttggggtaaagacacctggatcagactccaagggctgccctgagtctgggacttctgcctccatggctggtcatgagagcaaaccgtagtcccctggagacagcgactccagagaacctcttgggagacagaagaggcatctgtgcacagctcgatcttctacttgcctgtggggaggggagtgacaggtccacacaccacactgggtcaccctgtcctggatgcctctgaagagagggacagaccgtcagaaactggagagtttctattaaaggtcatttaaaccacaaaaaaaaaaaaaaaaaaaaaaaaaaaaaagtcgtatcgatgt

SEQ ID NO: 828 - DNA, 1914 bp, Homo sapiens
  misc_feature (1705)..(1705): n equals a,t,g, or c
  misc_feature (1804)..(1804): n equals a,t,g, or c
  misc_feature (1816)..(1816): n equals a,t,g, or c
  misc_feature (1840)..(1840): n equals a,t,g, or c
  misc_feature (1856)..(1856): n equals a,t,g, or c
  misc_feature (1864)..(1864): n equals a,t,g, or c
  misc_feature (1885)..(1885): n equals a,t,g, or c
gctgcggagtccgggactggagctgcccgggcgggttcgcgccccgaaggctgagagctggcgctgctcgtgccctgtgtgccagacggcggagctccgcggccggaccccgcggccccgctttgctgccgactggagtttgggggaagaaactctcctgcgccccagaggatttcttcctcggcgaagggacagcgaaagatgagggtggcaggaagagaagggcgctttctgtctgccggggtcgcagcgcgagagggcagtgccatgttcctctccatcctagtggcgctgtgcctgtggctgcacctggcgctgggcgtgcgcggcgcgccctgcgaggcggtgcgcatccctatgtgccggcacatgccctggaacatcacgcggatgcccaaccacctgcaccacagcacgcaggagaacgccatcctggccatcgagcagtacgaggagctggtggacgtgaactgcagcgccgtgctgcgcttcttcctctgtgccatgtacgcgcccatttgcaccctggagttcctgcacgaccctatcaagccgtgcaagtcggtgtgccaacgcgcgcgcgacgactgcgagcccctcatgaagatgtacaaccacagctggcccgaaagcctggcctgcgacgagctgcctgtctatgaccgtggcgtgtgcatctcgcctgaagccatcgtcacggacctcccggaggatgttaagtggatagacatcacaccagacatgatggtacaggaaaggcctcttgatgttgactgtaaacgcctaagccccgatcggtgcaagtgtaaaaaggtgaagccaactttggcaacrtatctcagcaaaaactacagctatgttattcatgccaaaataaaagctgtgcagaggagtggctgcaatgaggtcacaacggtggtggatgtaaaagagatcttcaagtcctcatcacccatccctcgaactcaagtcccgctcattacaaattcttcttgccagtgtccacacatcctgccccatcaagatgttctcatcatgtgttacgagtggcgytcaaggatgatgcttcttgaaaattgcttagttgaaaaatggagagatcagcttagtaaaagatccatacagtgggaagagaggctgcaggaacagcggagaacagttcaggacaagaagaaaacagccgggcgcaccagtcgtagtaatccccccaaaccaaagggaaagmctcctgctcccaaaccagccagtcccaagaagaacattaaaactaggagtgcccagaagagaacaaacccgaaaagagtgtgagctaactagtttccaaagcggagacttccgacttccttacaggatgaggctgggcattgcctgggacagcctatgtaaggccatgtgccccttgccctaacaactcactgcagtgctcttcatagacacatcttgcagcatttttcttaaggctatgcttcagtttttctttgtaagccatcacaagccatagtggtaggtttgccctttggtacagaaggtgagttaaagctggtggaaaaggcttattgcattgcattcagagtaacctgtgtgcatactctagaagagtagggaaaataatgcttgttacaattcgacctaatatgtgcattgtaaaataaatgccatatttcaaacaaaacacgtaattyttttacagtatgttttattaccntttgawayckgtkgttgcaakgttagtgakgttttaaaatgtgatcgaaaatataatgcttctaagaaggaacagtagtggaatgaatgtctaaaaagnatcctttattgnggttttaatgggtccttggccaanaaaggggaattttttnggttgganttgaaaaagggggggggaatntttttttttgggaaaaaaaaaattcctta

SEQ ID NO: 829 - DNA, 737 bp, Homo sapiens
  misc_feature (550)..(550): n equals a,t,g, or c
  misc_feature (651)..(651): n equals a,t,g, or c
  misc_feature (726)..(726): n equals a,t,g, or c
  misc_feature (736)..(736): n equals a,t,g, or c
cggacgcgtgggccacgtccaccggagcatcctgcactgcaggccggtctctcgctccagcagagcctgcgcctttctgactcggtccggaacactgaaaccagtcatcactgcatctttttggcaaaccaggagctcagctgcaggaggcaggatggtctggaggctggtcctgctggctctgtgggtgtggcccagcacgcaagctggtcaccaggacaaagacacgaccttcgaccttttcagtatcagcaacatcaaccgcaagaccattggcgccaagcagttccgcgggcccgaccccggcgtgccggcttaccgcttcgtgcgctttgactacatcccaccggtgaacgcagatgacctcagcaagatcaccaagatcatgcggcagaaggagggcttcttcctcacggcccagctcaagcaggacggcaagtccaggggcacgctgttggctctggagggccccggtctctcccagargcagttcgagatcgtctccaacggccccgcggacacgctggatctcacctactggattgacggnacccggcatgtggtctccctggaggacgtcggctgctgactccaatggaagacgtaccgtcaagtggctgcgagactacagttgacgtggctggactatanaagttcgttgacaacctttacacactgaggcggaaaaaccgatgctgcaagttgcaaaagactagggttgttaangcctaggtgna

SEQ ID NO: 830 - DNA, 707 bp, Homo sapiens
gccggacacaccggacagatagacgtgcggacggcccaccaccccagcccgccaactagtcagcctgcgcctggcgcctcccctctccaggtccatccgccatgtggcccctgtggcgcctcgtgtctctgctggccctgagccaggccctgccctttgagcagagaggcttctgggacttcaccctggacgatgggccattcatgatgaacgatgaggaagcttcgggcgctgacacctcaggcgtcctggacccggactctgtcacacccacctacagcgccatgtgtcctttcggctgccactgccacctgcgggtggttcagtgctccgacctgggtctgaagtctgtgcccaaagagatctcccctgacaccacgctgctggacctgcagaacaacgacatctccgagctccgcaaggatgacttcaagggtctccagcacctctacgccctcgtcctggtgaacaacaagatctccaagatccatgagaaggccttcagcccactgcggaagtgcagaagctctacatctccaagaaccacctggtggagatcccgcccaacctacccagctccctggtggagtccgcatccacgacaacgcatccgcaagtgcccaaggatgttmrcgggtcggacagaatgcatgaatggcggaccatggaraatgctkaacgagcttgatgctgagtcatactggcac

SEQ ID NO: 831 - DNA, 2516 bp, Homo sapiens
gccacccagctccccgccaccgccatggtccccgacaccgcctgcgttcttctgctcaccctggctgccctcggcgcgtccggacagggccagagcccgttgggctcagacctgggcccgcagatgcttcgggaactgcaggaaaccaacgcggcgctgcaggacgtgcgggagctgctgcggcagcaggtcagggagatcacgttcctgaaaaacacggtgatggagtgtgacgcgtgcgggatgcagcagtcagtacgcaccggcctacccagcgtgcggcccctgctccactgcgcgcccggcttctgcttccccggcgtggcctgcatccagacggagagcggcgcgcgctgcggcccctgccccgcgggcttcacgggcaacggctcgcactgcaccgacgtcaacgagtgcaacgcccacccctgcttcccccgagtccgctgtatcaacaccagcccggggttccgctgcgaggcttgcccgccggggtacagcggccccacccaccagggcgtggggctggctttcgccaaggccaacaagcaggtttgcacggacatcaacgagtgtgagaccgggcaacataactgcgtccccaactccgtgtgcatcaacacccggggctccttccagtgcggcccgtgccagcccggcttcgtgggcgaccaggcgtccggctgccagcggcgcgcacagcgcttctgccccgacggctcgcccagcgagtgccacgagcatgcagactgcgtcctagagcgcgatggctcgcggtcgtgcgtgtgtgccgttggctgggccggcaacgggatcctctgtggtcgcgacactgacctagacggcttcccggacgagaagctgcgctgcccggagcgccagtgccgtaaggacaactgcgtgactgtgcccaactcagggcaggaggatgtggaccgcgatggcatcggagacgcctgcgatccggatgccgacggggacggggtccccaatgaaaaggacaactgcccgctggtgcggaacccagaccagcgcaacacggacgaggacaagtggggcgatgcgtgcgacaactgccggtcccagaagaacgacgaccaaaaggacacagaccaggacggccggggcgatgcgtgcgacgacgacatcgacggcgaccggatccgcaaccaggccgacaactgccctagggtacccaactcagaccagaaggacagtgatggcgatggtataggggatgcctgtgacaactgtccccagaagagcaacccggatcaggcggatgtggaccacgactttgtgggagatgcttgtgacagcgatcaagaccaggatggagacggacatcaggactctcgggacaactgtcccacggtgcctaacagtgcccaggaggactcagaccacgatggccagggtgatgcctgcgacgacgacgacgacaatgacggagtccctgacagtcgggacaactgccgcctggtgcctaaccccggccaggaggacgcggacagggacggcgtgggcgacgtgtgccaggacgactttgatgcagacaaggtggtagacaagatcgacgtgtgtccggagaacgctgaagtcacgctcaccgacttcagggccttccagacagtcgtgctggacccggagggtgacgcgcagattgaccccaactgggtggtgctcaaccagggaagggagatcgtgcagacaatgaacagcgacccaggcctggctgtgggttacactgccttcaatggcgtggacttcgagggcacgttccatgtgaacacggtcacggatgacgactatgcgggcttcatctttggctaccaggacagctccagcttctacgtggtcatgtggaagcagatggagcaaacgtattggcaggcgaaccccttccgtgctgtggccgagcctggcatccaactcaaggctgtgaagtcttccacaggccccggggaacagctgcggaacgctctgtggcatacaggagacacagagtcccaggtgcggctgctgtggaaggacccgcgaaacgtgggttggaaggacaagaagtcctatcgttggttcctgcagcaccggccccaagtgggctacatcagggtgcgattctatgagggccctgagctggtggccgacagcaacgtggtcttggacacaaccatgcggggtggccgcctgggggtcttctgcttctcccaggagaacatcatctgggccaacctgcgttaccgctgcaatgacaccatcccagaggactatgagacccatcagctgcggcaagcctagggaccagggtgaggacccgccggatgacagccaccctcaccgcggctggatgggggctctgcacccagccccaaggggtggccgtcctgagggggaagtgagaagggctcagagaggacaaaataaagtgtgtgtgcagggaaaaaaaaaaaaaaaaaaaaaaaaaaaaaaaaaaaaaaaaaaaaaaaaaaaaaaaaaaaaaaaaaaaaaaagtcgac

SEQ ID NO: 832 - DNA, 3234 bp, Homo sapiens
ccgaagacagggatggagaggcctctgtgctcccacctctgcagctgcctggctatgctggccctcctgtcccccctgagcctggcacagtatgacagctggccccattaccccgagtacttccagcaaccggctcctgagtatcaccagccccaggcccccgccaacgtggccaagattcagctgcgcctggctgggcagaagaggaagcacagcgagggccgggtggaggtgtactatgatggccagtggggcaccgtgtgcgatgacgacttctccatccacgctgcccacgtcgtctgccgggagctgggccacgtggaggccaagtcctggactgccagctcctcctacggcaagggagaagggcccatctggttagacaatctccactgtactggcaacgaggcgacccttgcagcatgcacctccaatggctggggcgtcactgactgcaagcacacggaggatgtcggtgtggtgtgcagcgacaaaaggattcctgggttcaaatttgacaattcgttgatcaaccagatagagaacctgaatatccaggtggaggacattcggattcgagccatcctctcaacctaccgcaagcgcaccccagtgatggagggctacgtggaggtgaaggagggcaagacctggaagcagatctgtgacaagcactggacggccaagaattcccgcgtggtctgcggcatgtttggcttccctggggagaggacatacaataccaaagtgtacaaaatgtttgcctcacggaggaagcagcgctactggccattctccatggactgcaccggcacagaggcccacatctccagctgcaagctgggcccccaggtgtcactggaccccatgaagaatgtcacctgcgagaatgggctaccggccgtggtgagttgtgtgcctgggcaggtcttcagccctgacggaccctcaagattccggaaagcgtacaagccagagcaacccctggtgcgactgagaggcggtgcctacatcggggagggccgcgtggaggtgctcaaaaatggagaatgggggaccgtctgcgacgacaagtgggacctggtgtcggccagtgtggtctgcagagagctgggctttgggagtgccaaagaggcagtcactggctcccgactggggcaagggatcggacccatccacctcaacgagatccagtgcacaggcaatgagaagtccattatagactgcaagttcaatgccgagtctcagggctgcaaccacgaggaggatgctggtgtgagatgcaacacccctgccatgggcttgcagaagaagctgcgcctgaacggcggccgcaatccctacgagggccgagtggaggtgctggtggagagaaacgggtcccttgtgtgggggatggtgtgtggccaaaactggggcatcgtggaggccatggtggtctgccgccagctgggcctgggattcgccagcaacgccttccaggagacctggtattggcacggagatgtcaacagcaacaaagtggtcatgagtggagtgaagtgctcgggaacggagctgtccctggcgcactgccgccacgacggggaggacgtggcctgcccccagggcggagtgcagtacggggccggagttgcctgctcagaaaccgcccctgacctggtcctcaatgcggagatggtgcagcagaccacctacctggaggaccggcccatgttcatgctgcagtgtgccatggaggagaactgcctctcggcctcagccgcgcagaccgaccccaccacgggctaccgccggctcctgcgcttctcctcccagatccacaacaatggccagtccgacttccggcccaagaacggccgccacgcgtggatctggcacgactgtcacaggcactaccacagcatggaggtgttcacccactatgacctgctgaacctcaatggcaccaaggtggcagagggccacaaggccagcttctgcttggaggacacagaatgtgaaggagacatccagaagaattacgagtgtgccaacttcggcgatcagggcatcaccatgggctgctgggacatgtaccgccatgacatcgactgccagtgggttgacatcactgacgtgccccctggagactacctgttccaggttgttattaaccccaacttcgaggttgcagaatccgattactccaacaacatcatgaaatgcaggagccgctatgacggccaccgcatctggatgtacaactgccacataggtggttccttcagcgaagagacggaaaaaaagtttgagcacttcagcgggctcttaaacaaccagctgtccccgcagtaaagaagcctgcgtggtcaactcctgtcttcaggccacaccacatcttccatgggacttccccccaacaactgagtctgaacgaatgccacgtgccctcacccagcccggcccccaccctgtccagacccctacagctgtgtctaagctcaggaggaaagggaccctcccatcattcatggagggctgctacctgacccttggggcctgagaaggccttgggggggtggggtttgtccacagagctgctggagcagcaccaagagccagtcttgaccgggatgaggcccacagacaggttgtcatcagcttgtcccattcaagccaccgagctcaccacagacacagtggagccgcgctcttctccagtgacacgtggacaaatgcgggctcatcagcccccccagagagggtcaggccgaaccccatttctcctcctcttaggtcattttcagcaaacttgaatatctagacctctcttccaatgaaaccctccagtctattatagtcacatagataatggtgccacgtgttttctgatttggtgagctcagacttggtgcttccctctccacaacccccaccccttgtttttcaagatactattattatattttcacagacttttgaagcacaaatttattggcatttaatattggacatctgggcccttggaagtacaaatctaaggaaaaaccaacccactgtgtaagtgactcatcttcctgttgttccaattctgtgggtttttgattcaacggtgctataaccagggtcctgggtgacagggcgctcactgagcaccatgtgtcatcacagacacttacacatacttgaaacttggaataaaagaaagatttatgaaaaaaaaaaaaaaaaaaaaaaaaaaaaaaaaaaaaa

SEQ ID NO: 833 - DNA, 5788 bp, Homo sapiens
cggccgcgtcgacggcagaggagcacttagcagcttattcagtgtccgattctgattccggcaaggatccaagcatggaatgctgccgtcgggcaactcctggcacactgctcctctttctggctttcctgctcctgagttccaggaccgcacgctccgaggaggaccgggacggcctatgggatgcctggggcccatggagtgaatgctcacgcacctgcgggggtggggcctcctactctctgaggcgctgcctgagcagcaagagctgtgaaggaagaaatatccgatacagaacatgcagtaatgtggactgcccaccagaagcaggtgatttccgagctcagcaatgctcagctcataatgatgtcaagcaccatggccagttttatgaatggcttcctgtgtctaatgaccctgacaacccatgttcactcaagtgccaagccaaaggaacaaccctggttgttgaactagcacctaaggtcttagatggtacgcgttgctatacagaatctttggatatgtgcatcagtggtttatgccaaattgttggctgcgatcaccagctgggaagcaccgtcaaggaagataactgtggggtctgcaacggagatgggtccacctgccggctggtccgagggcagtataaatcccagctctccgcaaccaaatcggatgatactgtggttgcaattccctatggaagtagacatattcgccttgtcttaaaaggtcctgatcacttatatctggaaaccaaaaccctccaggggactaaaggtgaaaacagtctcagctccacaggaactttccttgtggacaattctagtgtggacttccagaaatttccagacaaagagatactgagaatggctggaccactcacagcagatttcattgtcaagattcgtaactcgggctccgctgacagtacagtccagttcatcttctatcaacccatcatccaccgatggagggagacggatttctttccttgctcagcaacctgtggaggaggttatcagctgacatcggctgagtgctacgatctgaggagcaaccgtgtggttgctgaccaatactgtcactattacccagagaacatcaaacccaaacccaagcttcaggagtgcaacttggatccttgtccagccaggtgggaggccaccccatggaccgcgtgctcctcctcgtgtggggggggcatccagagccgggcagtttcctgtgtggaggaggacatccaggggcatgtcacttcagtggaagagtggaaatgcatgtacacccctaagatgcccatcgcgcagccctgcaacatttttgactgccctaaatggctggcacaggagtggtctccgtgcacagtgacatgtggccagggcctcagataccgtgtggtcctctgcatcgaccatcgaggaatgcacacaggaggctgtagcccaaaaacaaagccccacataaaagaggaatgcatcgtacccactccctgctataaacccaaagagaaacttccagtcgaggccaagttgccatggttcaaacaagctcaagagctagaagaaggagctgctgtgtcagaggagccctcgttcatcccaaaggcctggtcggcctgcacagtcacctgtggtgtggggacccaggtgcgaatagtcaggtgccaggtgctcctgtctttctctcagtccgtggctgacctgcctattgacgagtgtgaagggcccaagccagcatcccagcgtgcctgttatgcaggcccatgcagcggggaaattcctgagttcaacccagacgagacagatgggctctttggtggcctgcaggatttcgacgagctgtatgactgggagtatgaggggttcaccaagtgctccgagtcctgtggaggaggtgtccaggaggctgtggtgagctgcttgaacaaacagactcgggagcctgctgaggagaacctgtgcgtgaccagccgccggcccccacagctcctgaagtcctgcaatttggatccctgcccagcaaggtgggaaattggcaagtggagtccatgtagtctcacatgtggggtcggcctacagaccagagacgtcttctgcagccacctgctttccagagagatgaatgaaacagtcatcctggctgatgagctgtgtcgccagcccaagcccagcacggtgcaagcttgtaaccgctttaattgccccccagcctggtaccctgcacagtggcagccgtgttccagaacgtgtggcgggggtgttcagaaacgtgaggttctttgcaagcagcgcatggctgatggcagcttcctggagcttcctgagaccttctgttcagcttcaaaacctgcctgccagcaagcatgcaagaaagatgactgtcccagcgagtggcttctctcagactggacagagtgttccacaagctgcggggaaggcacccagactcgaagcgccatttgccgaaagatgctgaaaaccggcctctcaacggttgtcaattccaccctgtgcccgcccctgcctttctcttcctccatcaggccctgtatgctggcaacctgtgcaaggcccgggcggccatccacgaagcacagcccgcacatcgcggccgccaggaaggtctacatacagactcgcaggcagaggaagctgcacttcgtggtggggggcttcgcctacctgctccccaagacggcggtggtgctgcgctgcccggcgcgcagggtccgcaagcccctcatcacctgggagaaggacggccagcacctcatcagctcgacgcacgtcacggtggcccccttcggctatctcaagatccaccgcctcaagccctcggatgcaggcgtctacacctgctcagcgggcccggcccgggagcactttgtgattaagctcatcggaggcaaccgcaagctcgtggcccggcccttgagcccgagaagtgaggaagaggtgcttgcggggaggaagggcggcccgaaggaggccctgcagacccacaaacaccagaagggatcttctccaacggcagcaaggcggagaagcggggcctggccgccaacccggggagccgctacgacgacctcgtctcccggctgctggagcagggcggctggcccggagagctgctggcctcgtgggaggcgcaggactctgcggaaaggaacacgacctcggaggaggacccgggtgcagagcaagtgctcctgcacctgcccttcaccatggtgaccgagcagcggcgcctggacgacatcctggggaacctctcccagcagcccgaggagctgcgcgacctctacagcaagcacctggtggcccagctggcccaggagatcttccgcagccacctggagcaccaggacacgctcctgaagccctcggagcgcaggacttccccagtgactctctcgcctcataaacacgtgtctggcttcagcagctcctgcggacctcctccaccggggacgccgggggaggctctcgaaggccacaccgcaagcccaccatcctgcgcaagatctcagcggcccagcagctctcagcctcggaggtggtcacccacctggggcagacggtggccctggccagcgggacactgagtgttcttctgcactgtgaggccatcggccacccaaggcctaccatcagctgggccaggaatggagaagaagttcagttcagtgacaggattcttctacagccagatgattccttacagatcttggcaccagtggaagcagatgtgggtttctacacttgcaatgccaccaatgccttgggatacgactctgtctccattgccgtcacattagcaggaaagccactagtgaaaacgtcacgaatgacagtgatcaacacggagaagcctgcagtcacagtcgatataggaagcaccatcaaaacagtgcagggagtgaatgtgacaatcaactgccaggttgcaggagtgcctgaagctgaagtcacttggttcaggaataaaagcaaactgggctccccgcaccatctgcacgaaggctccttgctgctcacaaacgtgtcctcctcggatcagggcctgtactcctgcagggcggccaatcttcatggagagctgactgagagcacccagctgctgatcctagatcccccccaagtccccacacagttggaagacatcagggccttgctcgctgccactggaccgaaccttccttcagtgctgacgtctcctctgggaacacagctggtcctggtcctgggaattctgctctccttggctgccccatcaaaggtcaccctgtccctaatatcacctggtttcatggtggtcagccaattgtcactgccacaggactgacgcatcacatcttggcagctggacagatccttcaagttgcaaaccttagcggtgggtctcaaggggaattcagctgccttgctcagaatgaggcaggggtgctcatgcagaaggcatctttagtgatccaagattactggtggtctgtggacagactggcaacctgctcagcctcctgtggtaaccggggggttcagcagccccgcttgaggtgcctgctgaacagcacggaggtcaaccctgcccactgcgcagggaaggttcgccctgcggtgcagcccatcgcgtgcaaccggagagactgcccttctcggtggatggtgacctcctggtctgcctgtacccggagctgtgggggaggtgtccagacccgcagggtgacctgtcaaaagctgaaagcctctgggatctccacccctgtgtccaatgacatgtgcacccaggtcgccaagcggcctgtggacacccaggcctgtaaccagcagctgtgtgtggagtgggccttctccagctggggccagtgcaatgggccttgcatcgggcctcacctagctgtgcaacacagacaagtcttctgccagacacgggatggcatcaccttaccatcagagcagtgcagtgctcttccgaggcctgtgagcacccagaactgctggtcagaggcctgcagtgtacactggagagtcagcctgtggaccctgtgcacagctacctgtggcaactacggcttccagtcccggcgtgtggagtgtgtgcatgcccgcaccaacaaggcagtgcctgagcacctgtgctcctgggggccccggcctgccaactggcagcgctgcaacatcaccccatgtgaaaacatggagtgcagagacaccaccaggtactgcgagaaggtgaaacagctgaaactctgccaactcagccagtttaaatctcgctgctgtggaacttgtggcaaagcgtgaagatagggtgtggggaaaaactctaccctggccacacgaaggactcacgcaaccacctcggacagaacctaagctttcttcattttatttatttatttccccctccccactccacacacacccttccaacctcctccacctccaccttcaagcataaggacgtccgcgtgttttctctttcagttagctggaggacaggatgttgggaaaggaaaggacagatgtctaaaggaggttgcagagcaggccaggcagacagtgggggctcccttgaagagcttcctccctcccaaacctgggtctcaaagacctagaaagaggcaggcacagcccctgcggacagcagggagccagaaggtttgtagcctattggtgcaaacattggacaaattcctgtgtctttcctagaagcgcagtcgacgcggccgcgaattcccgggtcgacgagctcactagtcggcggccgctctagaggatcc

SEQ ID NO: 834 - DNA, 395 bp, Homo sapiens
gaccaaagattaagccatgcatgtctaagtacgcacggccggtacagtgaaactgcgaatggctcattaaatcagttatggttcctttggtcgctcgctcctctcctacttggataactgtggtaattctagagctaatacatgccgacgggcgctgacccccttcgcgggggggatgcgtgcatttatyagmtcaaaaycagttatggttcctttggtcgctcgctcctctcctacttggataactgtggtaattctagagctaatacatgccgacgggcgctgacccccttcgcgggggggatgcgtgcatttatcagatcaaaaccaacccggagaggggctgaccggggtcgacgcggccgcgaattcccgggtcgacgagctcactagtc

SEQ ID NO: 835 - DNA, 3302 bp, Homo sapiens
gcttggatgactgtgcgtgggtgggttgtgcttcagaagggacatgggatgaaacagttgtttgggtctgaacttcaggctgagtctgaacttcaggctgagctggggactggggctgggtttggggctggggctgagctgaaggctgagcagtctgtggctgggcttctgctggacccacacttgatgactgagctggtggcagggttttgtcttgatgtacctgcatctggggtgacagtttactctgcctttgttcacctgtacctgctgctgtcgtggaaacagtggtggtggtggtgctggctgtggtggctgttgttgccaatggggtaaagaggaatcgctgaacagtaccatttggcattgcagcttgcattagctgctggcctgggcctgggagtacagtcaccccttgaggtatcaactgcaactgtccagtagtttgaccttgtccttgaattactactgtcaaaccttgattgccaccgtggccctgtgttaactgagtaagttgagccatggtgagcttcacttgtccttgtttgggggcgaagggggttgtgaggctgaagactgtatatttgaagtggacgttgctgaagttaagcttttctgcccaggtgttgaggaaaccggtgttaggggcggagactgcagtggagacaggctgccccctgatgatttgagtcatcacttgctgaggagcacctggctgtaccatcacaggtgttcgaataattgcctttcctagtgttgactgttggagtggtgttctaatcacggtcataccagggcgaatctgaggccctgtgattacttgtgaattgcttgtggttcctccagagcctgaggtattgggcctaattgtgactgttgctgtcctgggctggaatgaagtaaaggtttgctgactggtacctgtacttgatggaatgatacccaggactttctgctgtacttgaacaacgcctgartttgactggccttgcttaacccatgtagcaaaggtttgatgaaagttcttgttttgttggaatgttactgtagctggagatccaactttagtagttagtaccattttggttccaggtgtaactgagccacttatgggggccaccataaccttctgtgctggagagatggtgctggttgtactgcttgttggggaagtagtggaagttgcaatcactgtcggcttctgctgctccagtcgtttcttagcctgttgctcaactgcttgtgccttttctttctccactctctcagcaaatgccctgatctcccacaattccagttcttcttctgctacccaggtttcaataataacagggccagtttgcttgggcgtttctggtctctttggccgcagtgcacttgatcgaaggcctttcctctgaggtgtaggcgtttcttttggtgtttctggaactccaatgggacaaatgattttcctgatacaatattcagatcgaatgccataaggaccaacatctctcctcttaattatttctgttgttgtgatttcagtttcggatgtttctgtccgtgtagtccctcctcctggaggagccttggccgccatatcatcccatctcaaacttgcccacagtaaccgtaacatcaggctcactccagctaaggactttactgtctgaagtctatacctccaagtgatgccaaaggtcggtctaggagaaggatatggccatatatccaaagcaaggttttgcattgtaattaaaataagggacctctcggattcctcctttttcgggccaacttttttaagtcatcattaggcaaaacaaaaatgctcttcttgctgctcttggtaacaaattttctataggatggcagagctgtacctgaacgagtcttctttggtcttgaaaatttcatcagtttcactttgtctcgtgtggaatactctttgctcacagtcatagatgtaaccagtgtgcctcccgtggtggtcagggagtctgtcactgtcgtggtgaccacggttttgctctgctcctttacagagatgatgtccacactgccgcctgtggagggtgtggaaagcttggtcactgttgtagtggtggttgtgacagtggattttgcacaattttctgtggaagaaaccacagtttgcttatcgcctttttctaccttgatcacagtttttgattctgtggccactgtggaggtcatcgtggtgacttctgtgatgacggtttttcttttagattctccattgacattttcatttttgttgatgggcagaccattttcatcaataaagtcattactgagattagattcctcttcagaagtaataggtgatgaagtaactttcttaacttctgaggtttctatttccatatcttctacctgattaactgaattgctttctggacaagatgctgagggtgtggtcgtctgtgtactgtcagactctttggttgatggcagggtctcaaggctatctcggtagttaccttcagcatctgaagaactcagcaaatgcgattttgtttcggagctgtttctttcattaaaatcttccatgatgacatcaccattaatgaatggccttatagcagattctttaacagtcaatgatttaatatcattctcagggattattttatttatattattaacctttggttcaacattaccacttactactctactctcagaaatttctttcaagcattcacctttcaaatatattttgggtttattatcttttccatttatttgaaatgtacttgttctctgtcctttcttttcagactctcgattttcattattctttttgtcagtggtattttttagctttatttgatcactacatttattaactggtctctcctctaatttcttctgctgacttggttttttaccatttgcttcagtccccttgaccggcagcctgtcctcacagtttccagtggactcaccagaaaccaactcacactttaacggctccaagacttcaacatcttgttctcgagttctgaactgttcagaaatgctttcattgctattctgaacaatcatatcttcttcactgctatcctgaatagacacggtatcagaactattttccaaagtgctattagattcagagtcacatcccagttttccttcaaagtccattgctcttgacagaggtgtggcatctctgtcattggtacttttaggcactgatgaatgtaaagcactcttggaagaagaaacaatggtgtcactttcctcctgtatgagcggttttttgttcttacagatcaaagtaccaagtcgac

SEQ ID NO: 836 - DNA, 6582 bp, Homo sapiens
cccaagaaggcctagttgcccgcwgggcctggggccctgcccatgcctgggccagagtggcgctggggcctcggcttccctttggctcctggaaggcaggagggtcccctgccctgccccagtcctgccccagggaggcagggggtggggggccttcctttcctcctgggcaccccgtgtgctgtgatctcctgggctttcaggcttgacatgctggtctggggagagacagggcctctgctgccctgttcttcaccctcacagtgatacctcctttccttgggtctcttggcctccagaccccctcaatagacactgactaaagtcaagctggagtcatgagggtagtgggctaagtcgagggtccagcctcttctgccaggaagcccttcttgcttttgagagaggctgtgaccaccccccatccttctccctacactcccagccaacctagtgcccaagcagctaaacttggcttccttctaatcctggaaaaccctgtacccctcctcctcaatctggccctctccacatgcacaccctgaaaacacacacagacacacaacacacacacatacacacccctgaacacacacacagacacacatacacccatgatgtgagcaaacacacacacgtgcgccttcatagcccagccaagggcatgcaggcagggtgtgctgcctgagatggcacctccctttcagccattcttcaagaatgggccacacacagctagaagtcctctcccagctagaagtcctgtccccactctcctggcctgacaagatgagctctcctgggaccttgctctagggcactctgcctctaccctaggacactggaatgccctgggagccccctccctgcaaccagcctgagttcagccccacggacaaagggacacacagcccccaatggagaccattgtaagtggtggggctgggagaggaggaacagaaggaaagccatagcgctctcttgccccttggcatgtaccccaaggcctgatggccactgggctcagcctgtcccccactcctgcctgcttcccggtgagctgccccccacacgtgcagcccgggctgcctccagggtctggctgagtgggatcaggtggccctccaactcagcacaggaaataagtagaaacatttcagcaggccacctcccctcatcttccccgccctgtccagcgccctggcaaaggctgacaactggctgtcttggggccgaacagcccctgccctgcctctgagggcccaccagcctgtgctgcatacccaccgcccagcttctccctgagggcccaccagcctgtgctgcatacccaccgcccagcttctccctgagggcccaccagcctgtgctgtacaccccgttagtccctgatcccaaccttctccctcctgccagcacaccgatgcacacaccggaagtggcgagcccaagccctggggacaggtgtagggagaaaagcagccccaggcctcagactcgcttcccatcctggcatagagtgggggatggctggagggtgtctataggtacagcccgctctggctgctgccaggtgggcccctgccaggggtcctcacccctgtccaccctgtgcctggctgtccctgcacccagatacagcaacatggcctgtacccagcagagtggtggcaccaccatggttacagcggatgccccgagactctgcttggtaaacgtggcagagcagaatgggaggctggaccctgaggaagggcccctctcctggcatctgtctcttgctacctaagcctgtgcctctccctaaagagctgcctccctgctgccgagccctggtctggccacgagccactactgcctcccacaggcaccactgcctcccgctgctgcccacaggtggtgccgccaatgggcagtgccctcaggccgaagcctcaatcccccatctgagccaggcctaatcctctaatagtgatggttggtttgtcctcccataactgcaggtggattccacctggggaatgaggctgcgtgtcgggcgtctgctggccctgagacatccagtcttccacactcaactgtgggatgggagggtggcgtggccttaccccatgaggctgtccaggctctggcacacagctgtgctcacaaaatactgggtggcttggttagagctaattgtagtggagcctgcaggtgagggtgagggagggggctgcaggtcaggtaagatctggaagacagacgtacagcttggagggcagggggactctaaggcaaggagatttacagttgggaaggaggcagtggcagaggggtgagggacaggggcccttaagtccagcgaggaaagctcggtgtgggcccgctctacgctccgtttggggtgacctggaacgcctcttctcccagctccctccagccatcagcagcctcttgtcaagcttctgcctcgccccagtctatccccaaccccaaatcaagaccacctttcttcacggtcactatttattctttgttcctttttctttttgtaagaaacattcacaaaaaccagtgcaaaaccatcagtgtgggcgtcctgttttatattacaaaacttcctctggatatatcatataaaaggggggtctcacaggagagaaacgtgataaattagctctgcaatctacggcaaggaacatagtttttaaaatagactttcaacatatgacccatgggggaaggaggagggggcttctggggagacggcgggtgctggggcctcggctggtttgggaaatcctgtccgggccccttaagcatggatagagacatagacaagggaggctgtggacaggcctgagcaccaaggccagaaattaacagggaccctggggaggggccctcacccccagcccataaagagctattccctttctctaagaggcagtagcttcagagcaggaaagtggctttcgatacaggcagggtttgtgatgagcggtgtagtcttcttgttccttgccctgttagtggggtccgaggaagtctctgttatgggctgttgtatttcggggtgaaaagaaacrragaggtatccctgcccacccctcccccacaaccccagccaccaccagaacctgctgtgggttgtatctggaccaagccagctaaaccctgtttctccctgtgctctggagggaggctcaagcctgatttgggctgagctttctttgccttgcctccaaggaatggcctcaggcagtcttgcaaatagctaccagcctgagcgaatgccaacaggagcagaaactgcctgtcttccctttccagcctaagagggtggccagtggctggctggcgagctgaatcagggctgattgagggttccttggcacatttgtagaaagctgctgaggggcagtcttgtgtctgcccttgaacccaccttagccagatttcccttcatgaccagccctttctcttgggtcctccctctgacttctgtgggccccagaagcctgggatgcccctggattagagccataaagctgtgcaatttgcctcagtcctgcccagcatgggttttttgttttttktttttgtttttgtgtgtcatcctcagaccagccatttgcctcttccaaaaagctggggctaagcatgtgggtggttcaagaggggcagcccccaggccccaggctgggccgcggtaccagtggcaggtccccctgggtctcaggagcttagcttctacggagctcaggtgtcatttatggggttgccagagcaagctgttaaagggcgaatttggtaagactgagctcagagacctggtgggagggcaaggactggcgggcacagcaggaggagattagaggagggtccacctgaatctttgcagcaggcacagagcttctggctgcatctcagaagggggcagacgcacaggccagggaacacggggctctaggctgtggctccgagtgtccctggtgactggaaagcctgaggggaggctggaagctgatacaggatgccggtggcttgtgagacagaatgagctctttcttcctgaagagggacagaggggagagaagagagcagacatcacactgctccttccatccctgcccgtggcagacatcactaatcaaacttacggtgcctggcagacatcactcatcaggattgcactgccrtctcccactgagcccagaccaaacctcagatccccagcacagcctccagcagccacccctgatctatcagggtaggagcatcttgcaatccagttgccaacactcgtctagagtttgagaactgaatacttgtgggtgtgcatctgcgagtctccctgcccaagcctggagggaatactaagaaatgtgcggacagtgaagagmcaggaaaccttgttgcagcagaaatggcctcgatgccttcgggattctttagcctggagagaagagggctcaggggagtcaatgtgtgacctcaacactccaggaaggagagtgggcaagtgggatgccatggacagagccacagaaaaacagaaacctcttctgtgtattaagctgatgctaaagtcagagcagtccaaaggcaggaggctgccttgggaggtagtaagctctctgtccctggaggtatgcaagagggtggagaagtcttggcaaggatgttgaagaagatatccaagcctcagttctgggtgtggagagggagacccagatgatcttggggatttcttccactcttggagctggggagttggggaaggacagggaagggggtggcatgtgggagaggcgggcagtgtggacaagggaatgtgatgtgcacctctgtgtgttcctggggactcagagagaggtgtggggaggtaggagcgagggcgcggtgggaagtcatggaatggtgttttcttagctgtagagcagggaggaggcagttcctggctgacttgccctctcttgtctgggggaaccgggatgctgaggccaggggtgcatgtgggcagcagagctgacagagtcctggatgcagtgacagcagcctggagacaactcagcttcttttcagaactgtcacgcctgtgctgtgtgtctgtggatggtcactgtcctctctgggcctttgagattatttggtccaacagatggggaaagcaaggatcctaccagctgggccattcttggatgccgtgttagcagctcactcttggccccggcctgaaggggggaacagtccatcctccagtggaccagggattgcgctgtgggttccgagtcctcaaagacatggcagctgaatctccgtgcagcccctgggctttgatgacttctctgagatttgcttttgcctccttgttgcctaaatcctcactttcttggcatcaggtcctggtgcagtgaggagagagggcccagggtctggctggaccaaagagggcgctgggcctggtgttcctttggtctctagagcagcctgcatcctgggccaggtgctggggtctctggagaacccacggcacctgccctgagtccaggcgaggatacatcagtccatatttttgtcttcattttgttttgttaaaaaaatagctctattcccctggcccttctcctggccatctctgatggcctcatcttctcccctggggccaagaggacagcggggaggggcacgggaggacattgggtgctgggcagtggtgggtggggcgagtcttcaggcttcaggccataccctctactggatgccccggaagaggcacatggcaaagatcatggcgaaaagctcgatggccagtaccccgatggcaagggctccggccaagtagacgtaggtctcgaaggtgttgaggatcaccgtgtaacagccctgcttgtttaggaataggctccttcccaggaggcactcctcccggctcagcaggaccccgtcccgactttggggttccctccggcagcagcctccggcacctcttcactatccagggtcaggagtcgaaacacagatgcaaacttaaagtcttcaggcccgttgaccccgcagcaaccaaatgtgatcatgaccgagttccaggtggcagagaagacgtctgtgtcgttattgccctggtagtgcttggtgagctccttggtgaagaattctcgggtgagattttccctgaagatgaaggccaggatggctgctgagagctctgccaggaagatgatcaggatgaacaggaagaaaaatagcagcagacacttgttctcacggacggccccgcagcagcccaggaagccgagcagaaagagcaggccccccatggccaggaggatgtaggcgcccgtgaggagcagaggattggcagccacgatctcccggaagccggtggggtccaccatgacccagatgccgatggccagcaggcaggccccgcccagaaatatgaagaaattgaatacaaacatcagatacttcatgcagctcagacagtcgccttccatggtgctccacctggagagccagcgttgagatgtctgcaaaaggattatgctcgcgtctccagaaatcaaattcaaggggttccagttgctttgatgc

SEQ ID NO: 837 - DNA, 1795 bp, Homo sapiens; identical to SEQ ID NO: 328
  misc_feature (51)..(51): n equals a,t,g, or c

SEQ ID NO: 838 - DNA, 1618 bp, Homo sapiens
gcagatttccatcagcaggatgtgggggctcaaggttctgctgctacctgtggtgagctttgctctgtaccctgaggagatactggacacccactgggagctatggaagaagacccacaggaagcaatataacaacaaggtggatgaaatctctcggcgtttaatttgggaaaaaaacctgaagtatatttccatccataaccttgaggcttctcttggtgtccatacatatgaactggctatgaaccacctgggggacatgaccagtgaagaggtggttcagaagatgactggactcaaagtacccctgtctcattcccgcagtaatgacaccctttatatcccagaatgggaaggtagagccccagactctgtcgactatcgaaagaaaggatatgttactcctgtcaaaaatcagggtcagtgtggttcctgttgggcttttagctctgtgggtgccctggagggccaactcaagaagaaaactggcaaactcttaaatctgagtccccagaacctagtggattgtgtgtctgagaatgatggctgtggagggggctacatgaccaatgccttccaatatgtgcagaagaaccggggtattgactctgaagatgcctacccatatgtgggacaggaagagagttgtatgtacaacccaacaggcaaggcagctaaatgcagagggtacagagagatccccgaggggaatgagaaagccctgaagagggcagtggcccgagtgggacctgtctctgtggccattgatgcaagcctgacctccttccagttttacagcaaaggtgtgtattatgatgaaagctgcaatagcgataatctgaaccatgcggttttggcagtgggatatggaatccagaagggaaacaagcactggataattaaaaacagctggggagaaaactgggaaacaaaggatatatcctcatggctcgaaataagaacaacgcctgtggcattgccaacctggccagcttccccaagatgtgactccagccagccaaatccatcctgctcttccatttcttccacgatggtgcagtgtaacgatgcactttggaagggagttggtgtgctatttttgaagcagatgtggtgatactgagattgtctgttcagtttccccatttgtttgtgcttcaaatgatccttcctactttgcttctctccacccatgacctttttcactgtggccatcaggactttcccctgacagctgtgtactcttaggctaagagatgtgactacagcctgcccctgactgtgttgtcccagggctgatgctgtacaggtacaggctggagattttcacataggttagattctcattcacgggactagttagctttaagcaccctagaggactagggtaatctgacttctcacttcctaagttcccttctatatcctcaaggtagaaatgtctatgttttctactccaattcataaatctattcataagtctttggtacaagtttacatgataaaaagaaatgtgatttgtcttcccttctttgcacttttgaaataaagtatttatctcctgtctacagtttaataaatagcatctagtacacattcaaaaaaaaaaaaaaaaaaa

SEQ ID NO: 839 - DNA, 2061 bp, Homo sapiens
cgagctttgctctggtaaatggagtggctgtctcagtaatggagagtcagtgagatacatacacatctactattctgcagccagattcaggaggaagagtgtccaccaagagatgacttcagtgatgcagaccagctcagagtggggaatgatggcattttcatgctggcatttttcatggcatttattttcaactggcttggattttgtttatccttctgtatcaccaataccatagctggaaggtatggtgctatctgcggatttggcctttccttgatcaaatggatccttattgtcaggttttctgattattttactggatatttcaatggacagtattggctttggtggatatttcttgtacttggcctgctccttttcttcagaggatttgttaattatctaaaagtcagaaacatgtctgaaagtatggcagctgctcatagaacaaggtatttcttcttattgtagagactgcatcaacccgacattcctttcttataccaatgtgaaatttccagatcatctgtaaacctacaactttaatagaagactactaataacagaagacaaattagtgaagaaaagacggagtttcgaaattgaatggcagggtggtttttgcttacaagccatttctgttcattctttaagtatctatatttcatttgttttgcacatatgcatatgtgcccatttaagatatttgcatatacttgatagaaaccataaagttgtagcagttaagtccagtcacatttggttaatcagtgtttgatataattgaaagagttgagtggataaacagtcttccagcttgtaaatgccattgacttctgacctgacatttagtataataaaaatgaaattcttaaccatgtcaaatgatttagtttctggctcttagactcatctggcagttctacacatgaaacatcttttgttatataaggtgtattgaaacctgcagtgctgattattagaaaggatttgtcagatttttgaacatgatatttacattattatttaggaaaactcttcctgtaaataaccatgcataacttactttctgcaatgttttcttagaaattgtgtccagatagctttcactaattttaaattaagtgaactaaatatatatgtgtatatgtatacacatatatatacacacacacatatatatatttagaaacgtgagtgttaaagatagaatttgttttaggacaaattttaagaaaatgtgggaataccaaatgtcctttataagaaaaataaattttgttttaagggacatactagttttagggattttcagatgggaagctgcatttttaggattgcccatcttaagagatcttgcaggaagagattgtattagatattatatttatttcatttaagataattttcaaagttaattttctaaataagataattctcatttgtgtttgtcttttaaaaggccaataaaatatctttcagtatcattgtaataattttttagagtttaatttgtaaagcttagcaaataaaatcttgtactatgaatagcttcttgctttatgactttaggattaacttgtaaaaaacatatcctgaactgagatatgcaaaatactcattttcaagttatggaaatgtgtttgtggcatataggactgtggggtctgtgtgtgtagtgagagtgtgtagccactattataactggaatttaatttacattcataaactactatatttcccatcttgcaaatcattttatgtctcatctgtttttcctttcggttatatctttggttttgaataccaacatttaaaatgatggtattttatcttttaaacttaaaaattatttaatacagctatatggaccttataaaattgatttcttatttattattagacattactactaaaaggtacatctaactattcagggacatttttccatttccaaaaaataaaatttattatgctttataacctcttctgtattttctaattttttcattgtctttgataaataaaacagttttgttttgctaaaaaaaaaaaaaa

SEQ ID NO: 840 - DNA, 925 bp, Homo sapiens
  misc_feature (894)..(894): n equals a,t,g, or c
  misc_feature (918)..(919): n equals a,t,g, or c
gaattcggcacgagcgcggccatggcgctcctgctttcggtgctgcgtgtactgctgggcggcttcttcgcgctcgtggggttggccaagctctcggaggagatctcggctccagtttcggagcggatgaatgccctgttcgtgcagtttgctgaggtgttcccgctgaaggtatttggctaccagccagatcccctgaactaccaaatagctgtgggctttctggaactgctggctgggttgctgctggtcatgggcccaccgatgctgcaagagatcagtaacttgttcttgattctgctcatgatgggggctatcttcaccttggcagctctgaaagagtcactaagcacctgtatcccagccattgtctgcctggggttcctgctgctgctgaatgtcggccagctcttagcccagactaagaaggtggtcagacccactaggaagaagactctaagtacattcaaggaatcctggaagtagagcatctctgtctctttatgccatgcagctgtcacagcaggaacatggtagaacacagagtctatcatcttgttaccagtataatatccagggtcagccagtgttgaaagagacattttgtctacctggcactgctttctctttttagctttactactcttttgtgaggagtacatgttatgcatattaacattcctcatgtcatatgaaaatacaaaataagcagaaaagaaatttaaatcaaccaaaattctgatgccccaaataaccacttttaatgccttggtgtaagtatacctctgaacttttttctgtgcctttaaacagatatatattttttttaaatgaaaataaaaccatatatcctaaaaaaaaaaaaaaaaaaaaaaaactcgagggggggcccgnacccaattcgccctatagtgagtnntacaca

SEQ ID NO: 841 - DNA, 1246 bp, Homo sapiens
accggggcccccccctacgtgccgtttttttttttagacagaaatagaattttattttcttttaagcactgtattttttatttcttcattatagcacattaccctaatgtaatattcataagactggcatagatttgaaacttacctatctcccacctagaaatgggaagagcctaaagatatgggtcataagaaacaaaaaaagggctggattagggcactccttaggggaaggtagactcacatgggccactgaaataaaggaacctgggtggtcagctagggggcaggataaagttttttgacatctggagggggcaagaggatgaaccaatgaagatacttcatgtactttaaaattttggtgggaccaatcagttacagtaattcaaagaaaggtagtaagggaaggagaaatggagaagaggcagattatcagggtaaatgatggtaaaaattaatgagagactgcattatgatgtttaacaacaaaaacagatccaaaaaagagagccaaaaccaattcaaggcatcagagcctgggcaaatatgaatcaggaaactgtgaaagttaaaagttagggcaatcctagctgaagaggatactgaagctggtctttcccacattaactgtaaactgtggtagtacattaaagtagatatgtccttatgcaaattaagatggatgatgaaggggtgtttgaaaaaaaaggcagagagattaaggttggtgatatagatcattaccacccacatggaaagagcaagggctaaaaatgctgtttaaagaaacagctacacttttggttctattacattttaagcttaaacattacatatttcaatatgcatcttgaaaaaagtagcagctttctaaacattatgttcagcactctctcttttcacctctaaacttgcacagaagtctctccttgaacttcttcatctttattttgatgttcaactttctgcagaagcctggggcccagtaaaccaataagcagacttccaattggggctgtgatgaggatggacaaaaatgccactgtcaacacatccattccatagtcttctaattgtttctctccatgtgaccttgctgtgtccaaagccacagatcctattgcagcctataaaagtttaagggtaaaaatggaatcatgataagataagcmcatatwaaaaaagtgagttttttattgkttgcaaaagcaaattgcttgktcttttgctcaacttaaaggtt

SEQ ID NO: 842 - DNA, 1199 bp, Homo sapiens
gtcccagatttggctactgggcacctcattaagttggttcctgtgttcctgtgacatatttccatctttcattgacatttctttactttttgacacaaaaagatgtcccaggtgcaagtttccctgtcttaatcctggaatcagctatttctccaaagaggctgactcttttgaagtggaggatggtgctgtattggcaaaccaagatctgggagttgagtgtgttgagattcttgattgggtaccattgcttctaggccttctcagtagacagagctaggaaataatacatatctaaatatgtacacacatcaccacacacacatttatgtactgtctatttgtgtgtacatatatattataaaaccatgacttcatactgataaatgccacttccaacccagcacttcacttttctttctaatcttaccccatccatgtttgtaaatatgttacctagcagtgagaagtttggctcctgttattctcaatatgtttacttatttgctcaatcagtttactttatctcattgtagcaatctccgaactactctagttttttcattatttattatatcataggtaatcagtacttattttctcatacaaagatgttccacgctcatcttatatttttctgcctccagttctggaacttaccttttctgcagagacccctggtttcctttgatttaaaattatatttacaaaccaagatctggtactagatatgctcattattactactaagggtgtatacatacatatccatatctatttctattttttaaaatattattaggctggttgtggtgactcatgcccataatcccaacactttgcgaggctgaggcaggacgagtgcttgaggccagttcaagctgggagccaggcttggtgtctcacacctgcaatcccagcactttggtaagtcaaggtgggcagatcacttgagcccagaagttcgacaccagcctgggcaatgtggagaaacctcacctctacaaaaaatacaaaaaaattaaccaggtgtggtggtgcgtgcctgtagtccctgctccttgagaggctgaggtgggagtattacctgagcatgaaaagttgaggctgcagtgagccgtgatcacgccactgcactccagcctggggaacagaatgagagcctgtctctcaaaaaaaaaaaaaaaaaaaaactcgta

SEQ ID NO: 843 - DNA, 4196 bp, Homo sapiens
ttttttttttttttttttttttttttttttttttttttttttttttccctcagtaagtattttattgagatttaaagcacaaaataggtgaacaaatcgggaggaaggtggtaacacaggaatgggaacgtaaaagtcaaagtaggcaggactcaaactggccataaaggcactacggcatgttcataaacaccatcaagtaaaagaaaggggaatcaagatgttctcacttcttttctgctccaccttaatactccatctagccactggtatggagcatgtcatcaactcattcttctcacaagctagcaagggaattaaacattttatcagtcaaccctatgctcaccaagtgagccaatgttacacagtgattttgtgcatccagtgactgagaactacaggcaaggataggccctgactgttaataaattggtcgtggctattactagaaaattatgggtgcaggcatttacctatacaatgacctgcttactgtggcagctaacaatatagtcaaaccagtctattaccatatgatgtcctattaacaagagagcccagttgaaggatgtttcatacttttagaaagcctaatttcttactgtaatatcctcccatccctcttttaaaaaggctgtagttcaaaaagcttttatgttctttccctgaaaacaagagaactttggtcaaagccaatttttaagagtcatcacttctgctgagtaggcaaaacaatgaactataacaacagacatcattttctttccttaaattctgaggtttatgctggaaaaataaacccatttctttataaacatctaattaaataaagtatcaaagaaaataagataatggaagaagcatccgccttttggggcactatattcctaaggttgggctttaagattttttaacaggaaacccaggartttctgaaaaacaaggcctttttcacattaccaagaactcacagctactctgtgaatgccctagatatttgactcaaatttttcactcaatcttattaggtatatttctggattatttgaatctacaaaccaaccctagaatatcatgctttccagtcacacctgtggcacaatgagcagtgtacgaccatgccccatcacaatccaacccttggtaccctacattgtgacactmtagaaaggtattaaagctgagccaattaatctatattttgatttcagactaagattaataaatgcttttaaataaagtaacttttaaggtatctgaacaaagggatgtaaggttaattcacttctcaaactgcaatttcaactcatcaggcttatggatgtatggactaattgctaacctagtaactcctacaaatttgcagtattcaaatttggtttccacagtactcattacactttactcgtaataaagtacaaaagttttgcgtttacccatttcactgtttttcaaaccaattacacaaagcattaaaatttacaagtatgatctaaccaattatcaaataatcccactaactacaaaggggactgactactgggtggaacttaactggcaactgactttactgagattaagtgcctgttaaacataatgatctttcagcagaaaatgcagtatgtgcttttacactttgaataaactcaatttcagaacaaaaagaggctacttccatttccacatgacaaacattaaagacaactgaaccactctcaacactaattatgctgagaacttccagaaagtggattctctaaacaagatcccaagtattaggagctatttcttaaatagtttaaatttgcctttgaaaaaagttccattacttaaaagtattaatttaagcaaaatcatggaacacattgactaaaaaataccttttatttttactcaacttgttaaaggggcagataaagactttggcaaatttgattaactgcacaaaataatgttatccaaactgagtaatttattgctggtctgaggcttgccttgtttacacttaagtagaatttacgttgtttccacaaatggcagatatcaacatttaaaggaatttaatagtgacctattcaataaggcaatcatcttggtagcaaacttttatttaaatcttacataactcaagctttataaaaagccaacataattgaaaattgggttctccctctaaagccttaagtattcaaagctcaaaacagttaatttaaaaataagcaaacaaataaaacaaaaaaaccctgccagcagatcctgctgaaatactaaaaaaaaaaaaaaaaaamaaaacactaaatgagcttaatctttacaaaagttacgttagctcaaaagctataaaatcaaagttatcttaattctacaaagaagggagagggtcttcatgccaccatttccttagagcctcatctttttcatccaatttggccacaaatcaaatttctgtgtgcccctgttttcaagagattcctcttgcagaagaggccaagtataaacatggaagagtaactgcctaagtaggaaagtgttccataataatgtgcaaacaaggagttctgagttaatctctggaactcgacctggaccttgatcttgactttgagcgagatctagaacgggatcttgaagtagctctttttggtggaggggacacagaacgggcctttgagggtkgaacaggtagcggcgaattggaacgggactggctccttgatctggattttgactttatatcaccctttccattttctttgggggatcgggaccgagacctgcttcgagatttctcatactcatccttagatctgcttcgagaatgtgaatgggagccccgatcagacttgggcttagatttgctctttgatctagatttcctgccttttgatcgagaacgtgatcgacctttgctccgcgacctggaacgggagcgactttttgagatacttcgagatctactgcggctgctcctgcgactcctacttcgtgaccgtcttctagatcgagacctggatctgcttccagagtaagatcgcctatggcttgtgcgtggcttatcttcaataagcctaatatttctgccatttatttctgtgccatccagtttgtccaaagcacgcttcatgtcagagtaggagcgaaactcaattacaccctcatttgttcgttccttgtgggcatccgcataggttacttcacctgcttgtcgcataaaatcctttaaatcttgccaactgcaccgactagaaagattttctacaataagcctgtattctgtacgaacaggtggtccgtatttgtctctgccagatgttctccgactgctgtatccacctccaccacctttatcacatgaagggaacaattagatgccttgtaatgataaaaacgcataatgtctttgaaagttagtacaaacatatcaacttttatttactggagtaggactttgctattatattgctaaaccttcgacacatttgtgatttgccataaaattaaattaagggcaagtcaaatagactaaatccaactaaacctctcctacaatctgttagagagtgactgctcctttattcgatttacctcgctaagttttattttacagaacattgtaaaatataaaacttaactgattacatgcatttctacattttacaaaaatgtttactagttttacactaagtacttacatcacagtgtgaggtttttggtggtggtttggccacaaaacacgcaaggtaacagtcacctagttcagattaaccagttttgtctaacccttggaatcctcaccatcaccctgcgtctaatggcaaaaggctgctgtcgtcatggcttccggtaaggtcagccaaagggtcatagggcaagggtcacacaatgtatggaaaagccaaggccaatcaggaaaggcagtcatcttagcctcagtggacacagcctcagccccattggtcactttcaaattgaaacatcaaggacttgttaaaaagtttgaattcaacatgcaacaatttaaacatcaaacatttaacataaccaaaaatccccccaacctcctcccaataacatgccccaattagttcaaatacagcataaagcttatttagatctactttgtggtacaataccacattacttaaaaatagtacattcwytggcccccatcaagttccatagctttgtcgacc

SEQ ID NO: 844 - DNA, 1652 bp, Homo sapiens; identical to SEQ ID NO: 390

SEQ ID NO: 845 - DNA, 1995 bp, Homo sapiens
ggcacgagaagcattataaagtacgaagtttgttaccacagtagagataatttagtagaaaaatgctttgaggcttcagtatttgtaagattttgcattagccagatgctaggttgttgaaggcatttcagtgttgataatagcctgagcagacttctttacaaatgggatctgtttctatatgtgtatatgcccacttaccattcagagagactggtctttctctttgtcttccttcacattgctgtgtcagttctacacctagtcttttcagcacttagcaaattcaaattttgatttttttgtcagcttagttcactttaaggcatattggcatggtgtgtgaaagtgatgttttgccccagtattgaggacttttagatccaaataatgactcattaaatataattatgttttaagtatactgaatttctgttagcttaaaatgttaattctcaggaatgattttctcacactttgtgttggctaataataaaagcactgttttattctcaaaactcctttttcaaaaattagggagagagcagtagtgatcatttatgtgagcccctttgaaatgatggtgtcagagtgcagagaaacaatggagttttgatgccaaaaaggtttttttgcagtaaaagtaaaaatttggaattagttggcatatagaggaacccttttgtactggaacgtatgaggctggattgtgaaaaggtaatctttcgattgctagacttggttaacttagggctgcaaatctttttcttctgtcaaggtcacttaatatggaatgtttttgtcagactgtcctttgttggaatactttagctgttcagctactttgactcctaggagagaatttagttaaggttcaaagtaattaactggctttgccagtggtgagtcccacaccattattcacttagtagtcatataaatgtttttatttaaacttctctctcttcaatgctgagaataaggctttaaattactgattcacctttaaaggaatgttgtgagaattgatgtaatttctgtttctgtttccatctaaacttctttataaaaagagggattagtttttttgttttggggtaagcacctaatttatccagtaaccaacaaccctaaccattggcatatatagtctttcactcagaaataaacaaaaactgtttggtatatctgtatcattgctaatcttgtgcactttactttttgggcagtaccatacatagtctgaggctattgacttaaaccaataactgtactttatgtaatgactcttaaatttggttacctgggttcacagcttgcttgaagagaaaggatgctagaataaagtaagcagctgaagagcgagcaaatcaagacaaaacacagtggtctcagatttttcgtagtgtgggaacagtggttttgctctataccactgaaaagcactataacataattgttgtccatgatactgaagcttttcccctcacttctaggttgtttacattcagagctctatcaataagaggaatacatattacagtgaattcgacaaccgcacaagttggcagtaggtatccccaacctaatttatcttggtaaattcaccctgtttcctagtgctgctggataaaagagtgtttactttttattgctcttagacagagtagtctagataagttttcaatttatcaacatagcctagacttctgtaagtggaatgttcattagtaactcatctttttgttgttataattggaaacagaaacgaggcttattgctattgcagaaatcccaaactggcaaaggccagtatatatggtattccataatataaccagcttttgaaatttatgtgtttggattagtgccttctggttaccagtattgactctgctagtttgcacctttccgttcttaacagaaaatttgtatttgttattcctcttaaattttgtcgtaactagtgaaggaagtaaaaaaaaaaaaaaaaaa

SEQ ID NO: 846 - DNA, 2001 bp, Homo sapiens
gaattcggcacgaggtgagtggggagtgggatccgatcccgtggggctatgtaggggaagttggtggctgcagctgccgtggttttctcctggtgtccagcagaaacggcggcggcgcaaggtgtggctgggccaacccaggatctcccaggaccctccgctctgcgcgacaaggggcccgcgcttgccaaggccgacgggcaggagtgaacgtggcctccgtgggtctgcagccccgataggccaattgtacagaatttaaaccgtctctcagatgtgtacagtagaactcaagaagacagactaccaagggtcatctgaagtcgtgattgggtcactaataacaccaggacaaagttaagggatcactactcaagcataagccccagttttcataagactgctgtgaagatgtttgatataaaggcttgggctgagtatgttgtggaatgggctgcaaaggacccctatggcttccttacaaccgttattttggcccttactccactgttcctagcaagtgctgtactgtcttggaaattggccaagatgattgaggccagggagaaggagcaaaagaagaagcaaaaacgccaagaaaacattgcaaaagctaaacgactaaaaaaggattgaaggactgaacaggctttgcaaccagaggaaaatcatttggaaaattacacagctttggaagaatccactaaagtttcttctttggatttcttgacagtatgatttagtaaatgaaatttgaccaaatggaagaatcatgttagttctgacctcaatactatagtaacttttaggcgtgggtgtagaagtttataggtttctattgacagttattgtaaattagcatttactgtggtacaaattctttataactgacttagtcatttgccgcttagcagtttatatactgaaatgaaaacatcttgtggggaaaagtgactttagattatgaactcaattcaaatgaactctatttaaaatggggtcctattttggacaaaggaaattaagaatgtaaaagtcagaacagtcttgaggtaaaaagtgtgctttggcttaaaagggatacagtatattaattacatcttttattattattggttatttcttagaatcatttctggctttctcaaaacaaaataatattaatgagtacttctatttgctgcatttttcttattacagcctttgagacagctggtaattataagtcattttccattttttaaaacataattttataaagaattctcttatctcgactatgtagaataccacctactggacagaacaatttttgtactcacaaacactgccattttcttagagatggcttgagaggagtaacactatggtttaaagcttgcagtaaaaatgccaaacactgtagtaccttggaacccagtttattcttgtgctaagcagaactgtaaaatagttaaaatgtcttatcaagtaattcgccgattacaaagacaccatttgttttttatttcattctttgttttaactcatgtggtagtgatatttaatactttctgatcaaacaggttcaaagtaaaacgttaaatttcacatttcttttaaagaactcttaaagtgtaacagttacgccatacttcataagtggtaaagaaaggtataaaatttggaaacattttgttgggcatagtagtgattgggtgaaaaggataaattatatcaaaatgagaatgtgctgtaattggaagtagggagctaaaggatgtttctttcagtttagtagaactggaacgttttactattaaacatggcttttataaatgcatggtccaataattttattcactgttagtatttaattcactgtcagcttattaatgttttctgtacccattaatgaattttaaattacaaaaaattgtctagcagctacagtttaaaaatgaaactagacattaaaataaatttggtaattttttataaaaaaaaaaaaaaaaaaaaaaa

SEQ ID NO: 847 - DNA, 939 bp, Homo sapiens
  misc_feature (16)..(16): n equals a,t,g, or c
  misc_feature (60)..(60): n equals a,t,g, or c
  misc_feature (73)..(73): n equals a,t,g, or c
atggattaacgccccnaaaggttatacggaactcactataggggaaagctgggtaacgcntgcagggtaccgntccgggaattcccggggtsgacccacgcgtccgcccacgcgtccggcatcttttcatgtttgttggccatttgtatgtcttcatttgcaaaatatatgttcatgtcctttgctcatttttgttaatggggttgtttttttcctgctgagttgtttgaattccttgtagattctggatattagtcctttgtcagatgcatactttgcaaatatgttcttccgttctaaaagttgtctctttgttttttggttggttgtttttgagactgggtcttgctctgttgcccaggatatagtacagaggcacaaatctcagatcaatgtaacctcaaacctctaggcttaagcagtctttctgcctcagctttctgattagctgggacaggtgtgtgctaccatatctggctrattaaaaacaatttatttttgtagagatgcagtctcactatattgcccaggctggtcttgaactcctggcctcaagcagttctcctaccttggccttccaaartgctgagattcaaagctaatattgatatgtaaggttttgttcctgtcataatgttaattgttacctagttgttttatagtctcatttatgcaattgctttataagacttgttttggccgggcgcggtggctcacgcctgtaatcccagcactttgggaggccgaggcgggcggatcacgaggtcaggagatcgagaccatcccggctaaaacggtgaaaccccgtytytactaaaaatacaaaaaattagccgggcgtagtggcgggcgcctgtagtcccagctacttgggaggctgaggcaggagaatggtgtgaacccgggaggcggagcttgcagtgagccgagatcccgcca

SEQ ID NO: 848 - DNA, 977 bp, Homo sapiens
gcatgaggctcggccggaattccgggtcgacccacgcgtccggagcacctaaccatgttgggcatcactgtcctcgctgcgctcttggcctgtgcctccagctgtggggtgcccagcttcccgcccaacctatccgcccgagtggtgggaggagaggatgcccggccccacagctggccctggcagatctccctccagtacctcaagaacgacacgtggaggcatacgtgtggcgggactttgattgctagcaacttcgtcctcactgccgcccactgcatcagcaacacccggacctaccgtgtggccgtgggaaagaacaacctggaggtggaagacgaagaaggatccctgtttgtgggtgtggacaccatccacgtccacaagagatggaatgccctcctgttgcgcaatgatattgccctcatcaagcttgcagagcatgtggagctgagtgacaccatccaggtggcctgcctgccagagaaggactccctgctccccaaggactacccctgctatgtcaccggctggggccgcctctggaccaacggccccattgctgataagctgcagcagggcctgcagcccgtggtggatcacgccacgtgctccaggattgactggtggggcttcagggtgaagaaaaccatggtgtgcgctgggggcgatggcgtcatctcagcctgcaatggggactccggtggcccactgaactgccagttggagaacggttcctgggaggtgtttggcatcgtcagctttggctcccggcggggctgcaacacccgcaagaagccggtagtctacacccgggtgtccgcctacatcgactggatcaacgagaaaatgcagctgtgatttgttgctgggagcggcggcagcgagtccctgcaacagcaataaacttccttctcctcgggccacctggagaaaaaaaaaaaaaaaaaaaaaaaaaaaaaaaaaaaaaactcgag

SEQ ID NO: 849 - DNA, 1374 bp, Homo sapiens
ggcacgagggaaaactctattttgaaaatgaatatattttgatttaaacaatacagagaagtcaaaatggacacaatcttcttgtggagtcttctattgctgttttttggaagtcaagcctcaagatgctcagctcaaaaaaataccgaatttgcagtggatctttatcaagaggtttccttatctcataaggacaacattatattttcaccccttggaataactttggttcttgagatggtacaactgggagccaaaggaaaagcacagcagcagataagacaaactttaaaacaacaggaaacctcagctggggaagaattttttgtactgaagtcatttttctctgccatctcagagaaaaaacaagaatttacatttaatcttgccaatgccctctacctttcaagaaggattcactgtgaaagaacagtatctccatggcaacaaggaattttttcagagtgctataaaactggtggattttcaagatgcaaaggcttgtgcagagatgataagtacctgggtagaaagaaaaacagatggaaaaattaaagacatgttttcaggggaagaatttggccctcttgactcggcttgtccctggtgaatgctatttatttcaaaggagattggaaacagaaattcagaaaagaggacacacagctgataaattttactaagaaaaatggttcaactgtcaaaattccaatgatgaaggctcttctgagaacaaaatatggttatttttctgaatcttcccctgaactaccaagttttagaattgtcttacaaaggtgatgaatttagcttaattatcatacttcctgcagaaggtatggatatagaagaagtggaaaaactaattactgctcaacaaatcctaaaatggctctctgagatgcaagaagaggaagtagaaataagcctccctagatttaaagtagaacaaaaagtagacttcaaagacgttttgtattctttgaacataaccgagatatttagtggtggctgcgacctttctggaataacagattcatctgaagtgtatgtttcccaagtgacgcaaaaagttttctttgagataaatgaagatggtagtgaagctgcaacatcaactggcatacacatccctgtgatcatgagtctggctcaaagccaatttatagcaaatcatccatttctgtttattatgaagcataatccaacagaatcaattctgtttatgggaagagtgacaaatcctgacacccaggagataaaaggaagagatttagattcactgtgaatgaaaagcacagcctcagaataaaagatgatttctcaaaaataaaaaaaaaaaaaaaaaaaaaaaaaaaaaaaaaaaaaaaaaaa

SEQ ID NO: 850 - DNA, 1111 bp, Homo sapiens
  misc_feature (9)..(9): n equals a,t,g, or c
  misc_feature (18)..(18): n equals a,t,g, or c
  misc_feature (51)..(51): n equals a,t,g, or c
gactggaangctacatcngccttaagtgcatagcagcagtttccccggagnaaaagccctgktgkataaactaatctttgcttgttttctactctgtgatctttccatatcatatttcattaatgatcagttagtgtcaaggagtcaaaacagattaaaattaatttcatgtgtatatggtggaaatttgtggctagtgtgatttttgtttgtttccttttaagtactgttgatcagttgtgacacttactggttaaacttacgttgctaaagatttctctataataagccacacattatatttagactatattaagggaccttggttttcttctagatagcagctgtcccaaagaaaatatttcttctttgtctgttaagatttagctattatctgccagttgttaagaggttttggttccaaactcaaccagcaatgttgagagctgaacttaagatagctgttgtactttttgctttccatctgttactgtccttcattcttggctccctactatctataaacagctgctgtgaagaagaaaagttgaataagagttggcttaaattttaaaaaagaaaaagaaaattgaggttttaggattttcatggtaacaagctctggtataagctaaggctggcaagttcagatactaaaatattatttgatcatatcttggatccttttgaaaaagttaagactatatgaaggtaaattagaaataagtatgaatattaataaaatagcatttatcttatttctctattttatgttgtgacttaacctaattttatttttttaacattttcttatttcttataatatgaatgctgatatttaaaggtagatctatgtggtattctttgtgtttcttaattgtttaactcttaagattatttgtgatctggatttatgtatttgttagatacatacgaattgttaaaatggaatgcaagtttttcaaaagcccaggtctaaatgtaatggttggtttattgttctataaccccagcccatcattttctgtgtaaatcataaacaataaacagaatatactcggtggtcatttctaataaaaaaaaaaaaaaaaaaaaaaaaagggcggccgct

SEQ ID NO: 851 - DNA, 1069 bp, Homo sapiens
ggcacgaggtttcgggttcggggtttcctggtgggcgtcaggggcaggcaacagagtggcggccgctacggccctggaacggggccatggagaagctgcggcgagtcctgagcggccaggacgacgaggagcagggcctgactgcgcaggtcctggatgcctcatcccttagtttcaacaccagattgaaatggtttgccatctgcttcgtatgtggcgttttcttttctattcttggaactggattgctgtggcttccgggcggcataaacctttttgcagtgttttataccctcggcaatcttgctgcgttaccagtacatgctttttaatgggacctgtgaagcaactgaagaaaatgtttgaagcaacaagattgcttgcaacaattgttatgcttttgtgtttcatatttaccctgtgtgctgctctttggtggcataagaagggactggctgtgttattctgcatattgcagttcttgtcaatgacctggtatagcctgtcgtacatcccatatgcaagggatgcagttattaaatgctgttcttctctcctaagttgaaaatcagaaacttgtggaaaagagcacttgaatgttggtactctatgtttggtgaagtttgcttttccccataaaacactccaggaacaactgacgtgacagttgaagaccgttttgtactaagtctcattttgtatactggtaaaaactacatgcttgattaaaccattaaatgcttgtaactttaaattcattatgtgtcattaatatacttttccaaagataagatttttaatcactgccagttgtaaattatttttagccaatttttaaatcttttcaaagcagctttgaaatgtgaatatttaaaggtagacctgtgctgcaagataattaaacttttttgcttttaaaaaatgtctgcatttttaagattttttttactttaaatgtgaaacttattttaagctaaaaattgcttattatatgtaataaaaataatatataaatctttacaattttgaaataaacccatccttggaaaaaaaaaaaaaaaaaaaaaaa

SEQ ID NO: 852 - DNA, 2347 bp, Homo sapiens; identical to SEQ ID NO: 642

SEQ ID NO: 853 - DNA, 1382 bp, Homo sapiens
  misc_feature (23)..(23): n equals a,t,g, or c
ctttttaagaagcccttgcgccntgaatttggttaaattcggctggcgccagatccaggctcctggaagaaccatgtccggcagctactggtcatgccaggcacacactgctgcccaagaggagctgctgtttgaattatctgtgaatgttgggaagaggaatgccagagctgccggctgaaaattacccaaccaagagaaatctgcaggatggactttctggtcctcttcttgttctacctggcttcggtgctgatgggtcttgttcttatctgcgtctgctcgaaaacccatagcttgaaaggcctggccaggggaggagcacagatattttcctgtataattccagaatgtcttcagagagccgtgcatggattgcttcattaccttttccatacgagaaaccacaccttcattgtcctgcacctggtcttgcaagggatggtttatactgagtacacctgggaagtatttggctactgtcaggagctggagttgtccttgcattaccttcttctgccctatctgctgctaggtgtaaacctgttttttttcaccctgacttgtggaaccaatcctggcattataacaaaagcaaatgaattattatttcttcatgtttatgaatttgatgaagtgatgtttccaaagaacgtgaggtgctctacttgtgatttaaggaaaccagctcgatccaagcactgcagtgtgtgtaactggtgtgtgcaccgtttcgaccatcactgtgtttgggtgaacaactgcatcggggcctggaacatcaggtacttcctcatctacgtcttgaccttgacggcctcggctgccaccgtcgccattgtgagcaccacttttctggtccacttggtggtgatgtcagatttataccaggagacttacatcgatgaccttggacacctccatgttatggacacggtctttcttattcagtacctgttcctgacttttccacggattgtcttcatgctgggctttgtcgtggttctgagcttcctcctgggtggctacctgttgtttgtcctgtatctggcggccaccaaccagactactaacgagtggtacagaggtgactgggcctggtgccagcgttgtccccttgtggcctggcctccgtcagcagagccccaagtccaccggaacattcactcccatgggcttcggagcaaccttcaagagatctttctacctgcctttccatgtcatgagaggaagaaacaagaatgacaagtgtatgactgcctttgagctgtagttcccgtttatttacacatgtggatcctcgttttccaaaaaaaaaaaaaaaaaaaaaaaaaaaaaaaaaaaaactcgagggggggcccggtacccaattcgccctgagt

SEQ ID NO: 854 - DNA, 502 bp, Homo sapiens
ggcacgagagaagtcagaaggctacacctatgtacctccttcatggacatgctgaaggcctttttcagaacccttcaggccatgctcttgggtgtctggattctgctgcttctggcatctctggcccctctgtggctgtactgctggagaatgttcccaaccaaagggaaaagagaccagaaggaaatgttggaagtgagtggaatctagccatgcctctcctgattattagtgcctggtgcttctgcaccgggcgtccctgcatctgactgctggaagaagaaccagactgaggaaaagaggctcttcaacagccccagttatcctggccccatgaccgtggccacagccctgctccagcagcacttgcccattccttacaccccttccccatcctgctccgcttcatgtcccctcctgagtagtcatgtgataataaactctcatgttattgttcccagaaaaaaaaaaaaaaaaaaaaaaaaaaaaaaaaaaaaaaaaa

SEQ ID NO: 855 - DNA, 279 bp, Homo sapiens
ggcacgagccctcctcggcctcccagagtgctgggattacaggcgtgagccactgtgcccggccccaggtcaattttgattgatttttcccatctctccatatgggtcataatgtcctgcctcttttcatgcctgtttttttgttttttgtttttcccggatattcaatattttgtattctaccttgtttggtgctggatatttttgtaaacctatacatatctttgcatttgtttctcgaatgtgatcaagttacttggaaaaaaaaaaaaaaaaaaa

SEQ ID NO: 856 - DNA, 2110 bp, Homo sapiens
  misc_feature (2104)..(2104): n equals a,t,g, or c
gctccgcaggcggaccgggggcaaaggaggtggcatgtcggtcaggcacagcagggtcctgtgtccgcgctgagccgcgctctccctgctccagcaaggaccatgagggcgctggaggggccaggcctgtcgctgctgtgcctggtgttggcgctgcctgccctgctgccggtgccggctgtacgcggagtggcagaaacacccacctacccctggcgggacgcagagacaggggagcggctggtgtgcgcccagtgccccccaggcacctttgtgcagcggccgtgccgccgagacagccccacgacgtgtggcccgtgtccaccgcgccactacacgcagttctggaactacctggagcgctgccgctactgcaacgtcctctgcggggagcgtgaggaggaggcacgggcttgccacgccacccacaaccgtgcctgccgctgccgcaccggcttcttcgcgcacgctggtttctgcttggagcacgcatcgtgtccacctggtgccggcgtgattgccccgggtgagagctgggcgaggggaggggcccccaggagtggtggccggaggtgtggcaggggtcaggttgctggtcccagccttgcaccctgagctaggacaccagttcccctgaccctgttcttccctcctggctgcaggcacccccagccagaacacgcagtgccagccgtgccccccaggcaccttctcagccagcagctccagctcagagcagtgccagccccaccgcaactgcacggccctgggcctggccctcaatgtgccaggctcttcctcccatgacaccctgtgcaccagctgcactggcttccccctcagcaccagggtaccaggtgagccagaggcctgagggggcagcacactgcaggccaggcccacttgtgccctcactcctgcccctgcacgtgcatctagcctgaggcatgccagctggctctgggaaggggccacagtggatttgaggggtcaggggtccctccactagatccccaccaagtctgccctctcaggggtggctgagaatttggatctgagccagggcacagcctcccctggagagctctgggaaagtgggcagcaatctcctaactgcccgaggggaaggtggctggctcctctgacacggggaaaccgaggcctgatggtaactctcctaactgcctgagaggaaggtggctgcctcctctgacatggggaaaccgaggcccaatgttaaccactgttgagaagtcacagggggaagtgacccccttaacatcaagtcaggtccggtccatctgcaggtcccaactcgccccttccgatggcccaggagccccaagcccttgcctgggcccccttgcctyttgcagccaaggtccgagtggccgctcctgccccctaggcctttgctccagctctctgaccgaaggctcctgccccttctccagtccccatygttgcactgccctctccagcacggctcactgcacagggatttctctctcctgcaaaccccccgagtggggcccagaaagcagggtacctggcagcccccgccagtgtgtgtgggtgaaatgatcggaccgctgscttccccascaccasgtrccaggagctgaggagtgtgagcgtgccgtcatcgactttgtggctttccaggacatctccatcaagaggctgcagcggctgctgcaggccctcgaggccccggagggctggggtccgacaccaagggcgggccgcgcggccttgcagctgaagctgcgtcggcggctcacggagctcctgggggcgcaggacggggcgctgctggtgcggctgctgcaggcgctgcgcgtggccaggatgcccgggctggagcggagcgtccgtgagcgcttcctccctgtgcactgatcctggccccctcttatttattctacatccttggcaccccacttgcactgaaagaggcttttttttaaatagaagaaatgaggtttcttaaagcttatttttataaagctttttcataaaaaaaaaaaaaaaaaaagggcggccgctctagaggatccctcgaggggcccaagcttacgcgtgcatgcggcgtcatagaacngtctca

SEQ ID NO: 857 - DNA, 1872 bp, Homo sapiens
ggcacgagagcccgggtcgagaggacgaggtgccgctgcctggagaatcctccgctgccgtcggctcccggagcccagccctttcctaacccaacccaacctagcccagtcccagccgccagcgcctgtccctgtcacggaccccagcgttaccatgcatcctgccgtcttcctatccttacccgacctcagatgctcccttctgctcctggtaacttgggtttttactcctgtaacaactgaaataacaagtcttgatacagagaatatagatgaaattttaaacaatgctgatgttgctttagtaaatttttatgctgactggtgtcgtttcagtcagatgttgcatccaatttttgaggaagcttccgatgtcattaaggaagaatttccaaatgaaaatcaagtagtgtttgccagagttgattgtgatcagcactctgacatagcccagagatacaggataagcaaatacccaaacctcaaattgtttcgtaatgggatgatgatgaagagagaatacaggggtcagcgatcagtgaaagcattggcagattacatcaggcaacaaaaaagtgaccccattcaagaaattcgggacttagcagaaatcaccactcttgatcgcagcaaaagaaatatcattggatattttgagcaaaaggactcggacaactatagagtttttgaacgagtagcgaatattttgcatgatgactgtgcctttctttctgcatttggggatgtttcaaaaccggaaagatatagtggcgacaacataatctacaaaccaccagggcattctgctccggatatggtgtacttgggagctatgacaaattttgatgtgacttacaattggattcaagataaatgtgttcctcttgtccgagaaataacatttgaaaatggagaggaattgacagaagaaggactgccttttctcatactctttcacatgaaagaagatacagaaagtttagaaatattccagaatgaagtagctcggcaattaataagtgaaaaaggtacaataaacttttacatgccgattgtgacaaatttagacatcctcttctgcacatacagaaaactccagcagattgtcctgtaatcgctattgacagctttaggcatatgtatgtgtttggagacttcaaagatgtattaattcctggaaaactcaagcaattcgtatttgacttacattctggaaaactgcacagagaattccatcatggacctgacccaactgatacagccccaggagagcaagcccaagatgtagcaagcagtccacctgagagctccttccagaaactagcacccagtgaatataggtatactctattgagggatcgagatgagctttaaaaacttgaaaaacagtttgtaagcctttcaacagcagcatcaacctacgtggtggaaatagtaaacctatattttcataattctatgtgtatttttattttgaataaacagaaagaaattttgggtttttaatttttttctccccgactcaaaatgcattgtcatttaatatagtagcctcttaaaaaaaaaaaaaaacctgctaggatttaaaaataaaaatcagaggcctatctccactttaaatctgtcctgtaaaagttttataaatcaaatgaaaggtgacattgccagaaacttaccattaacttgcactactagggtagggaggacttagggatgtttcctgtgtcgtatgtgcttttctttctttcatatgatcaattctgttggtattttcagtatctcatttctcaaagctaaagagatatacattctggatacttgggaggggaataaattaaagttttcacactgaaaaaaaaaaaaaaaaaaaaa

SEQ ID NO: 858 - DNA, 1521 bp, Homo sapiens
  misc_feature (1005)..(1005): n equals a,t,g, or c
gggaagagccccacggccagctccttcctgttcccctggcggcccctcgcttcttccttctggatgggggcccagggggcccaggagagtataaaggcgatgtggagggtgcccggcacaaccagacgcccagtcacaggcgagagccctgggatgcaccggccagaggccatgctgctgctgctcacgcttgccctcctggggggccccacctgggcagggaagatgtatggccctggaggaggcaagtatttcagcaccactgaagactacgaccatgaaatcacagggctgcgggtgtctgtaggtcttctcctggtgaaaagatttctggaaggagttatttatgagtgaagagctggagaatccattcgcaaactgatgcatgaaagtgattagcaagagaaagttgtgagacaaaacagagaagctgagaggccagaaacctctacccaggacgctgagctcctggcggatccgatgagtccctccaggacaccgtccaccctgggatgaaggcagaggagttggaaggaggcgaggccgtcacgggacaacaggaccctatgaaggtgggcccacagcaaaaggagagatgattctagagcatccagtcttctagggcagcaaaacaacctaaattttctaagaggccacccagctgagggtgcccccggggarggctraggcgtcagggtgacggctccaytgccmaytyacctgcgacctcaaagcccctctcctccwtggggtgctcctgacagccacctccagggcaggcgagtggcgctgggacaaaggctggcccgactgcgccccacccaagcagacggtccttcccccagacctggcgccaaactggagtgaaagcccgaccaccgtgtctcacagggaaactgacaccagatgcgaacttccaaatggatccctycctgcaagtgtggarstggcgctaccaggcactgctctggccatgcgtctaagacacaggcagaggcgctgccnaccacgctggcgacggcytcaaagcccctgttcatgcctgggacagcgcccaaggaccttgctcatgcctgggacaggccccagggcccccactggctgcagtcagcagcgggcagggtggtgggggaaggtatggacactccgtgggccggagctgggagaacaaggcctattattggacacctggtggccatggcaaccacacaaggatgcctgagactgaaaatctgtgggcttcaaggagctccagctcttgcactggctgagtcacagtgactatataactcttactcccacttttgggacactttttgagagggacagggatcctatctaactacacgggatagacatcgcccaagaccgtcctgagcaagcctggacgctgtgaccctaacgatgaaggtgtcccgcagacaatgtccggggcaggcaccatgctctcccaacctaccacagccagatgtttttgtaaagaacaataaaaatgaattactagaaaagcaacggcacgag

SEQ ID NO: 859 - DNA, 531 bp, Homo sapiens
gcaagcacacactttacacataataggattcaacttttgttataaataggcacagatacatgcacttagaaaaaggactggaaggaaatgtgaaaaaatagtaaacaaggcaatttcagggtggtgagattaaaagataattttaatttttaaaatttatgatttttgtcaaattcaaattatctacaataaccatgcattgcttttattaagctttttttagaaaaaaattaattttttgtgcagttttttttttaaatcattgctttgaatatttgccttgaatatgtttcattactaaaagtgatggcagctgtttctatgcagtgtgactgtgtactgggcactttgccagggyttcacagtgttgtctctgtacttgttacatgagaccttgctctgcgtgtcttttatgtccattttacagatgacggaactgatgcccagagaggctaagggatgattctccggaaasgaggggatctggatctggacctggtctggtgaaggcaaagactcgaacgggggggc

SEQ ID NO: 860 - DNA, 1448 bp, Homo sapiens
tttgagacccttgcgaaacaaccctactaaagggaacaaaagctggagctccaccgcggtggcggccgctctagaactagtggatcccccgggctgcaggaattcggcacgagtacgaacttccggttctccgggcagctgccactgctgtagcttctgccacctgccacgaccgggcctctccctggcgtttggtcacctctgcttcattctccaccgcgcctatggtccctcttggagccagcgtggcgggcctggcggctcccgggtggtgagagagcggtccgggaacgatgaaggcctcgcagtgctgctgctgtctcagccacctcttggcttccgtcctcctcctgctgttgctgcctgaactaagcgggcccctggcagtcctgctgcaggcagccgaggccgcgccaggtcttgggcctcctgaccctagaccacggacattaccgccgctgccaccgggccctacccctgcccagcagccgggccgtggtctggctgaagctgcggggccgcggggctccgagggaggcaatggcagcaaccctgtggccgggcttgagacggacgatcacggagggaaggccggggaagctcggtgggtggcggccttgctgtgagccccaaccctggcgacaagcccatgacccagcgggccctgaccgtgttgatggtggtgagcggcgcggtgctggtgtacttcgtggtcaggacggtcaggatgagaagaagaaaccgaaagactaggagatatggagttttggacactaacatagaaaatatggaattgacacctttagaacaggatgatgaggatgatgacaacacgttgtttgatgccaatcatcctcgaagataagaatgtgccttttgatgaaagaactttatctttctacaatgaagagtggaatttctatgtttaaggaataagaagccactatatcaatgttgggggggtatttaagttacatatattttaacaacctttaatttgctgttgcaataaataccgtatccttttattatatctttatatgtatagaagtactctattaatgggctcagagatgttggggataaagtatactgtaataatttatctgtttgaaaattactataaaacggtgttttctgatcggtttttgtttcctgcttaccatatgattgtaaattgttttatgtattaatcagttaatgctaattatttttgctgatgtcatatgttaaagagctataaattccaacaaccaactggtgtgtaaaaataatttaaaatttcctttactgaaaggtatttcccatttttgtggggaaaagaagccaaatttattactttgtgttggggtttttaaaatattaagaaatgtctaagttattgtttgcaaaacaataaatatgattttaaattctcttaaaaaaaaaaaaaaaaaaaaaaaaaaaaa

SEQ ID NO: 861 - DNA, 1279 bp, Homo sapiens
ggcacgagggccgggtctccgctcctgtgcccgggaagatggtgctaggtggttgcccggttagttacttacttctgtgcggccaggcggctttgctgctggggaatttacttctgctgcattgtgtgtctcggagccactcgcaaaatgcgaccgctgagcctgagctcacatccgctggcgccgcccagccggagggccccgggggtgctgcgagctgggaatatggcgacccccactctccggtcatcctctgctcttacctacctgatgaatttatagaatgtgaagacccagtggatcatgttggaaatgcaactgcatcccaggaacttggttatggttgtctcaagttcggcggtcaggcctacagcgacgtggaacacacttcagtccagtgccatgccttagatggaattgagtgtgccagtcctaggacctttctacgagaaaataaaccttgtataaagtataccggacactacttcataaccactttactctactccttcttcctgggatgttttggtgtggatcgattctgtttgggacacactggcactgcagtagggaagctgttgacgcttggaggacttgggatttggtggtttgttgaccttattttgctaattactggagggctgatgccaagtgatggcagcaactggtgcactgtttactaagaagagctgccatcatggcccagggaggcgggtgaaagctccgtcttctgaattcatctctacaggctcaaaactcctctttgatatcagacctgatgttattttccttcttttggagggcatttgtttggttaagaaggcttctttggactttggaatttcaacccagattttaccttgcagacggaatgacaagcaaaaagtgttgtggggaatcaaatttgttcctttcctcatgcacaaaacataaaggatagtggcgagtttacaagctgtggatgggtttccatagtcttcctttctgtacattgctatatcttcagtcctttggagcaagtggacctaacaagttgagcaaaatgaatatttggatccatgttcctcttgtgaccctgagtcttcatgcaaggagatctgaagctgaacaatgaaaatcttcagcagaaatagaaatggccgtggattgtaatacacactgaaattctgactttctgaatttaaatgtagaataaattttaccaacttggagtactgtatgagtattttcagtagggggaataaactcaaaattataaaaaaaaaaaaaaaaaaaaaaa

SEQ ID NO: 862 - DNA, 3338 bp, Homo sapiens
ggcacgagcggaggtcttacccaacagattgacgcggcgttagtattggccgtgtacccgaaaaactgattgactgggctggcgttaactgtgcggaggcagaatctcgctctgtcgcccaggctggagtgcagtgggctcgctgcagcctctccctcccaggttcaagcaattctcctgtgtcagactcccagctgctccaaatcctgggctcaagcaatcttcctgcctcagcctcccaaagtgctaggaatgcaggatttccctggggaaagtcttcactcagagcttcgctgacagccaaggatggcaagcaaggggccctcggcctctgcatctcctgagaactccagtgcaggggggcccagtgggagcagcaatggcgctggcgagagcggagggcaggacagcactttcgagtgcaacatctgcttggacacagccaaggatgccgtcatcagcctgtgtggccacctcttctgttggccgtgtttacatcagtggttggagaccagacctaacagacaggtgtgtcctgtttgcaaagctggcatcagccgagacaaggtcatccccctctatggaaggggcagcactgggcaacaggaccccagagagaagacccctcctcgtcctcaaggacagaggccagagccggagaatagagggggatttcaaggatttggatttggagatggtggcttccagatgtcttttggaattggggcatttccctttgggatatttgccacagcatttaatataaatgatgggcggcctcctccagctgtccctgggacaccccagtatgtggacgagcagttcctgtcacgcctcttcctatttgtggccctggtgatcatgttctggctcctgattgcctaatgctgggctcctgcctacatccgtggcagggctctggactggtgacgtgccaccccaactcctggtgtttggcttcctggctaatcttgactcctggaatcagtgggatcagtaacacatcaaggagtcttgtttcttcatcagagctttggaactcgagaccagttggcgatgacccctgaatatcgccaccgctgtaaacactctataacttcaggccttggcattgagtcatctctcatgggtgacaccatgaaatcttgtttcagccagttctgcaggtcctgactctgcagagggaagaggcagaaagagagaaactgtcagagtataatttcacctgagtttaatattacagaaacaaagggatgcaccaaatggtatttctggaaattttcatgtctttaaataccccttggtaagttgcttctgaagccagtgggggctcctcagatagagaggttcccctttcaaatcccagtgccgctctgttctctttccttcccctcccactccccctcttcttcctctgtagagatgcaagaaattgctgtcccataaaaatcataattgcagtagctaaagctggggtcacttcgtgaattcaccagagactcaaagatcttttattggctctgggctgtgctcagtgtctttggcctcagagaacaacttgaatgacttcctggtttcctggcataaattattcctggtgagacatgtggcttaactcacaggtttcccatcagctttctccctaaaactatgttcatctgcctctctctgccagagaacatacagccgagaatactgccgaagctgagactgactactgtgcattaggaaagacctggagtcaggactttggtgggatttggagctccgaggcagtaataactgaacaagcagccctgtcccctaggctgcagaagcttgaatgcatcctctcccagaacctgccacaggaaactgggggctttgtcaggtcagcccaactgcatgcaaaagaccaccatcctcagaagccaagttgtcttttatgaagaggcaaggaaaggggaaacccacatgtgaccctgattttggtatggcttgatagagttccctgaaaactccttgtatgtgtgctaaaaccagggaagcatgtgactgccaagcaggcaacccctgatgatttgtaaagccaggtggcagggccttggggagccccagcacaatgatattgtgtggtcttccctcctgtggaatcgaggggaaattattcttcccaataccttgatttgattttcagtttcataagcttcttcctctgaatcttattgagggactatggtaccaagcaggtaggactgttcacctggtggaacagttcttgctctgccttctaggcttcatcccagaaatccagcctctttctggagaccccaaagctggagggagatgggctttcctctgggcctctctcctactttgccatccacactgctcctggctaaccccagcaataaccaacaaatggtaggaagccccatctattgctttttctcaattatgactgcatagtttgtggaaacaaagatcttgaggaagatgagggaagccctcccctcttcatagtccccatctcttctcctttgtacctgtcaacaccagagttcagtgtttaaacagacaaaatataaagtattgagtaggtggttcatatgccgaatccacttggtaggaagaaaccaccagctttatagtgtgcctgatagattttaaacattcctgggcacccactcaagagtgctctttttatcaccttctggaaatccgcaaagttgcaggggcctctggagtgtctcttctctagagagaattggtgggacccccctcagtgcagtggccccaactagtggagggagagaggacttaagtcagatggactcaacagaaatgggtttccagaagaataatgaaaagttgtgggtaggaaaatgaatcatttggactcttcaatgaaatggagtgagcccaggagagctcagccaacagaggcactctgggaacctgttagtaaagccaggctggccaaatgccatttgattttgaacctcgtaggtccccactcaccctctgccaggagctaagtaaggcaggagagctgacttgggactcctggctcggccccaacagggagcccccttcccaccatccttcggcaagctcaccacctcatccttctgccaaggcagctttcctttcttttgtgtgttttctgtgttcttagcctccaccctcctcctgccacccttgtggactaggaccaggtctgaccccagtcagaaaatgatgatatgtacagtggcacaccttaaccagtcactaattttcactgttgtgaaagtgatttgatttagaattaaacaaatggttttacattaaaaaaaaaaaaaaaaaaaaaaaaaaaa

SEQ ID NO: 863 - DNA, 1270 bp, Homo sapiens
ggcacgagccgcggcctctcagccatgggcgccgtctggtccgccctgctggttggagggggtctggccggagcacttttcgtttggctgctgcggggcggccctggcgacaccgggaaggacggggatgcggacaggagaaagacgcccctcttgggggagctgcgattccgggaggccatcagagtggcagcagcggactgagccctggaccttccgggcaggagctggtcaccaaaccagagcatcttcaagaaagcaatggacatttgatttctaagaccaaagaccttggtaaactgcaagcagcatcatggagattgcagaatccttccagggaagtctgtgacaattcaagagaacatgttccttctggacagtttccagacacagaagctccagctacctctgagaccagtaactctaggagttactctgaagtttcaagaaatgaaagccttgaatctcctatgggagaatggggattccaaaaaggacaagagatatctgctaaagcagctacatgttttgcagagaagttgccttctagcaacctgctcaagaacagagctaaagaagaaatgagcctctctgatttgaacagtcaggaccgggttgaccacgaggagtgggaaatggtgcctaggcactcatcttggggggatgttggtgtgggtggcagtcttaaggctccagtgttaaacctaaaccagggaatggacaatggaagaagcactttggtggaagcaagaggtcagcaagtgcatgggaaaatggaaagggtagcagtgatgcctgcagggtctcagcaagttagtgtcaggttccaggtccattatgtcacaagcactgatgtgcaattcattgcagtaactggagaccatgagtgtcttgggagatggaacacttacatcccactccactataacaaggatgggttctggtctcattccattttcctgcctgcagatacagtggtggagtggaagtttgtgttggtagagaatgggggagttacccgctgggaagaatgcagcaatagattcctagaaactggccatgaggataaagtggttcacgcatggtgggggattcactgattcagtttgcaaagtaatggagaagctgtagaacaatgtggaagaggctgaggttgtggaacacactgaataaaataaaggcagtgtgactccaaaaaaaaaaaaaaaaaaaaaaaaaaaaaaaaaaaaaaaaaaaaaaaaaaaaaaaaaaaaaaaaaaaaaaaaaaaaa

SEQ ID NO: 864 - DNA, 2482 bp, Homo sapiens
  misc_feature (2)..(3): n equals a,t,g, or c
anncgagcctcactaaagggaacaaaagctggagctccaccgcggtggcggccgctctagaactagtggatccyycgggctgcaggaattcggcacgagcccatataagaaatggtcacagtcacaataatgaacatatccatcaccctcaaaagtttcctgtgtaccttgggagtccccccaaacattttttctcctgcccctaccttcccaagtaaccatggatcttctttctttcttttttttttttttcttaagacagaatcttgctctgtcgcccaggctggagcgcagtggtacaatctcagctcactgcaacctccgcctcccgggttcaagcaattatcctgtctcagcctcccgagtagctgggattacaggtgcccaccaccaagcccgcctaatttttgtatttttagtagagacggggtttcactatattggccaggctggtctcaaactcctgacctcaagtgatccgctcacctcggcctcccaaagtgctgggattacaggcgtgggccaccgcacccagccactttctttttgctatagattagtttgcattttctatcattttatacaaatgtaatcactcaacacatcctattttgtgcatggacataacatctaattatctccctggactttagatttcaagctctttgagaacaagatccattttttcttttctcttcctcttggccttcaacttatcttttctcagatatagcccttaatcattatttgcttgattgacataagaccttcatgaacttaaaaccaagcttcagtttggkggctaagaagtgcctgccacgttgaaggtttttaactcgccaccacttctggagaggttcctcagtcggcagcttcagcccagttaaaaaaaaataataataagcatatgagcttcatttaggtccgtggacttctaggagtccagaaagtgagagtcaaggtgtgggttggggtgtggggtggaaggggaggctcaggaagcgaggaatgaatacctgagaaaggtccttggctttcaccagattcttgatacaaagggatagactatggaattaatgccctgctctattcctatctgcttttcatgaatctgktgtttaattataaatcctttactatctgctcctcccttctcctcccttcccacctccccagcaccttcgttttgttctctgcctgccctggttatacttaaccttacttaactaaacacactacagggccctgtccmgtagcagtgccacttcatgggaactgtttgcattccttttctctttaagagcttcttatctgaactatgtgatagattgtacctttttattcaatgattcttattccactttacttaacagtttaccctgaatacttggatgccactcacatatcacaaacctatactttctctaaaccccagagcctgggattccttttcatctcaaaaaaaaaaaacactgtttttgttgttataaataagtattatgagaaccagaagtaacaataaactgcaaattcaaaatcaagccacttctccatccagagacacctccctcacttccccttgtcaaacacaaaacatattttaaaacgatattatgtctgattttagataaaagtctgggatgtagaataacaataatctgcttctaaatgagaaaatcataggcatctgacaaatgctggtttcaaagttatctttccaaaatagaagcgagtaagaaaaacatctcacctgcttggccaaaagaccaacaccaactccccttcctccaaattcccctcgaccccatgcagttttgtttgtaagggactgatgtcttacacccagcagcatttcctagcttctgcttgggggtaagcttgtcattcctattctccctttcacctctaccgttttccaacagatgagcaaatacggtaacgatagcattttggtctagttcctgcacaaactcattcctctgcataaaaggcagacctttgaaaggtacttacgtggaagaggcaaaggcaagcgcaagccctgggtttggaagctgtgtttgctgatgccagcctgcttaaatagctgggctggctgacgcaggctgctgatagcacgtttatttacgcctatgagcacacactcgagcaaggacctgaaaaacctgcagcgtgggcaggaggtaaaccactgaaagtatgccgaggttacgtctctcctggttattcaggtttgatgttcaggctgggacttctgagagtctcatggaactttctcgtcactatcttctcgtccctgacctctctcctagccaagcaagcttcttcaccaagataggataagagagatgtggctgagagaagacggggaagagaaaagggaccctgagtcttttcatccacttccttactttgagcgagtttccagttagatgttgcctcatttcaaagcgtagatctggtggggttgatttcacagctc

SEQ ID NO: 865 - DNA, 1182 bp, Homo sapiens
cggaggttccgttctctgccttcaccactccattttcatggtaaccagattccctcttgatgagcctggctggtagtctgggtgtggctgggactctccgctttgcactctgctcattccagtattcccgccagtgccgcagctgggagtggatgaagcgccacatgagccaggcctgggcggcacacaccagcagcagcacgcagagcctgcaaaacaaagtgttgaagttccctttctcgggatcaaatgcctggttttccatgcgagccagtccaaagccaatggccagcacggcaagggtgaggatgaagaggcgggtaaccccaaaaacagcagcccaggcactgaacagtttctcgttgttttcatctgcaaagtagaagagtctagccgtgtggaagaggaactcagttgagtactgcagcagcagcaagatcaggcccaggcggctcaggtttaagaggtatgctccagctatatgcaccaggtacaggcaaatatactggagctggcggggaatttcctccttccgtaccttctggaagtatagctcaggaagtgcgtgcagccagtaggccagctggcataggtagaaaaacttcacctggaaggggaggtgcacatgcgggtagtcttcccagaggcttcttgggtttgttaagtatccttccgtcaccaccacgtagaagcaccaaatcaccgaggtgaaatgaaagacgaccagctgtccagattcattgaacttgctgtgtttgactttggagagatgaagccgtttgctgattttatctaaaatgtactcctgaatcacagcatgcaagatgatggtgatgaagatgtagaacaagattgtgaccaggtccttagggccatagtggtagtgcacggtctcactgtctgctgtaggcacgctaatgttatactgaggtaaaataaatagaaaggcagtcttggctgtgacctcgaacataagcccgatgaggacgcagagcaccaggcagaagccgatgtccgcatggttgtggatgacgaactcctggctgaagagcgggtaacttttcgtcctcctgcggaaagccatggcagcgggcgcgcagcggccggcggggcccgcaccctgcgctcacgaaccgcagcgcaaacttggaattcgatatcaagcttatcgataccgtcgac

SEQ ID NO: 866 - DNA, 1209 bp, Homo sapiens
  misc_feature (2)..(2): n equals a,t,g, or c
  misc_feature (8)..(9): n equals a,t,g, or c
  misc_feature (1147)..(1147): n equals a,t,g, or c
  misc_feature (1174)..(1174): n equals a,t,g, or c
  misc_feature (1194)..(1194): n equals a,t,g, or c
gncccggnncccgggctgcaggaattcggcacgagccaccatgcccggcctagattaaaaatttgaagacatattctctactatgagccaatgaaattactcattttgtttctatcccatttgctgtcccttgcttttggaattttgtgtcttagtgtgactgtgattctttctctccttttgtctttcagcaaacggggattcagcgtccgatcctttggaacagggactcacgtgaagcttccaggaccagctcccgacaagcccaatgtttatgatttcaaaaccacatatgaccagatgtacaatgatcttcttaggaaagacaaagaactctatacacagaatgggattttacatatgctggacagaaataagagaatcaagccccggccagaaagattccagaactgcaaagacctgtttgatctgatcctcacttgcgaagagagagtgtatgaccaggtggtggaagatctgaattccagagaacaggagacctgccagccygtgcacgtggtcaatgtggacatccaggacaaccacgaggaggccaccctgggggcgtttctcatctgtgagctctgccagtgtatccagcacacggaagacatggagaacgagatcgacgagctgctgcaggagttcgaggagaagagtggccgcacctttctgcacaccgtctgcttctactgagcccagcgcccgcatggagccgcctctggagcttcctgttgttcatactttttccttcctgacatttgtttttacttacaggtgttctgctggtgacggtagcattacccaaataaactgtgcatatgaaatgggagaggagatgccaaaacgccagatgaaagcaatcaagtttcttcttttccacttttacttatgagcrggatattgattacaaagtttttcttctttaaccaaaaaggaaagacaacggtttgtgtgcacttcccgacatacctgtgtcttcgtgtgcctgccttccctccctcctccccaccgggccggactgtacagagccctgctgcggcgtgttaggaatgacctggaattgtcaataaacagatgctgctgtcaaaaaaaaaaaaaaaaaaaaaaaaaaaaaaaaaaaaaaacaaaaaaaaaaaaaaaaggnggggccgaaggttttttccctttggtnggggttatttttggcttggnattggccttcgtttt

SEQ ID NO: 867 - DNA, 2221 bp, Homo sapiens
ccgggctgcaggaattcattgacgacgacaagttaacgtcgaccaatcaccaagcatgcaccaaacactgctttaggcactggggacacaaaggggacagagccatcctcctttgacacctggtcttcagttctgtgcccaacgtatatagttttgacaatgaccaggttggactgtttaatgtctttcaacttaccacgtaatcctcttgtagggatcacatctttctttatgatattgtatttctctacctctaacagtaaaaattccattcaacccttaaagctcacttcaaattcttctttgagaagtttttcctttctccgcaaccagatgtacatatttgaactctctttgtacttggagggcacttctttcgtggtagttcttttatttttattaatctctgtatccttagatagtcctccaacaaccaaaggttgggactctgtcttacatatctgggtgcccctcatagtgcagtaataagtaagttgattatatacgagctatgtaacttatattttttaatggttggatatcactgagtttttttttttaagaatttttttattgaggtaaacttcacataacataaaattaactattttaaagtgagaagttcagtgccacttagtattgttaacaatgttgcataaccaccacctttatttaaagttccaaaaaaaatgttctcctctaaaaggaaaccccatcccattaagcagatactctccattccttccttcctccagcccccagcaaccaccaatctgctttctgtctctatggatttatctattcttgctattttatataaatcgaattgtatgagaccttttgtgtctggcttctttcacttagtacaagtttttgagatttatttacatagtagcatgtatcaacacttcatttttatggccaaataaaattgtattatgtgtttatagcmcaatttatttatccactcattcattgatggactttgggttgtttctgacttttggctattgggaatagtgctgctatgaatgtttgtgtacctgtatttgtttgaatgcctattttgcattctcttgggtatatatctaggagtggaactgctgggtcatatgttaattctatgtttagctttttgaggaacagacaaactgttttccacagcagttgaaccattccacattcccaccagcaatgtatgagaattccaatttctgtccacttcctcaccaacacttattattttccttttcctttttttaaaaaaaataagttatggccatcttagtgggtgtgaagtggtatctcattgtgttttttatttgcatttcctatgtaatgagctagaaactaaagtacaaactagatgggacatccagtccctttgatagataatgctgagtaaaaaatgagatgaaagacatttgtttgtttttagaacatgagtgacagtttgttaaaaagctttagaggaggaatgaaaacaaagtgaagtacacttagaaaagggccaagtggacatcttggatgtcaagtgcctagttcagtatcttttttttttttttttttttttttgagacagtgcctcactctgtcacccaggctggagtgtagtggcatgatctgggctcactgcaacctcctcctcctggattcaagcaattctcttgcttcagcctcccaagtagctgagactacaagcacccaccaccacacccggctaattttgtatttttcagtagagacggggtttcgccacattggccgtgttggtcttgaactcctggcctcaagcaatccgcctacctcagcctcccaaagtgctaggattacaggcataagccactgagcccagccctagttcagtatcttttatgtaaattataaacatctgcaacattatgtatcatatgcagatacttattgcatttcttttattagtggtgaaagtgttctatgcatttattggctcttgaatttcctcatctatgaattgtcattcacacacctacttttctgcttcgtttttacatatgtctttgcctattaaagatattatccctctgttttatattttctctcattcttgtattgccttttaaattttgttatgatgtttcattaataaacagtgttttgttttcctctataaaaaaaaaaaaaaagggcggccgctctagaggatccctcgaggggcccaagcttacgcgtgcatgcgacg

SEQ ID NO: 868 - DNA, 2189 bp, Homo sapiens
  misc_feature (350)..(350): n equals a,t,g, or c
  misc_feature (377)..(377): n equals a,t,g, or c
  misc_feature (413)..(413): n equals a,t,g, or c
  misc_feature (898)..(898): n equals a,t,g, or c
  misc_feature (900)..(900): n equals a,t,g, or c
  misc_feature (1148)..(1148): n equals a,t,g, or c
  misc_feature (1161)..(1161): n equals a,t,g, or c
  misc_feature (1175)..(1175): n equals a,t,g, or c
  misc_feature (1320)..(1320): n equals a,t,g, or c
  misc_feature (1658)..(1658): n equals a,t,g, or c
gaattcggcacgagcgtgcgagaatgcctctgccctggagccttgcgctcccgctgctgctctcctgggtggcaggtggtttcgggaacgcggccagtgcaaggcatcacgggttgttagcatcggcacgtcagcctggggtctgtcactatggaactaaactggcctgctgctacggctggagaagaaacagcaagggagtctgtgaagctacatgcgaacctggatgtaagtttggtgagtgcgtgggaccaaacaaatgcagatgctttccaggatacaccgggaaaaccctgcagtcaagatgttgaatgagtgtggaatgaaacccccgggccatgcccaacacngatgtgtgaatacccacggaagctacnagtgcttttgcctcagtggccacatgctcatgccanatgctacgtgtgtgaactctagggacctgtgccatgataaactgtcagtacagctgtgaagacacagaagaagggccacagtgcctgtgtccatcctcaggactccgcctggccccaaatggaagagactgtctagatattgatgaatgtgcctctggtaaagtcatcctgtccctacaatcgaagatgtgtgaacacatttggaagctactactgcaaatgtcacattggtttccgaaactgcaatatatcagtggacgatatgactgtatagatataaatgaatgtactatggatagccatacgtgcagccaccatgccaattgcttcaatacccaagggtccttcaagtgttaatgcaagcagggatataaaggcaatggacttcggtgttctgctatccctgaaaattctgtgaaggaagtcctcagagcacctggtaccatcaaagacagaatcaagaaggtgcttgctcacaaaaacantntgaaaaagaaggcaaaaattaaaaatggttaccccagaacccaccaggacctcctaccccaagggtgaactttgcagccccttcaactatgaagagatagtttccagaggcgggaactctcatggaggtaaaaaagggaatgaagagaaaatgaaagaggggcttgaggatgagaaaagagaagagaaagccctgaagaatgacatagaggagcgaagcctgcgaggagatgtgtttttccctaaggngaatgaagcaggngaattcggcctgantctggtccaaaggaaagcgctaacttccaaactggaacataaagatttaaatatctcgggtgactgcagcttcaatcatgggatctgggactggaaacaggatagagaagatgattttgactggaaacctgctgatcgagataangctaatggcttctatatgggcagttccggccttggcaggtcaccaagaaagacattgggccgattgaaacttctcctacctgacctgcaaccccaaggcaacttctgtttgctctttgattaccggctggccggagacaaagtcgggaaacttcgagtgtttgtgaaaaacagtaacaatgccctggcatgggagaagaccacgagtgaggatgaaaagtggaagacagggaaaattcagttgtatcaaggaactgatgctaccaaaagcatcatttttgaagcagaacgtggcaagggcaaaaccggcgaaatcgcagtggatggcgtcttgcttgnttcaggcttatgtccagatagccttttatctgtggatgactgaatgttactatctttatatttgactttgtatgtcagttccctggtttttttgatattgcatcataggacctctggcattttagaattactagctgaaaaattgtaatgtaccaacagaaatattattgtaagatgcctttcttgtataagatatgccaatatttgctttaaatatcatatcactgtatcttctcagtcatttctgaatctttccacattatattataaaatatggaaatgtcagtttatctcccctcctcagtatatctgatttgtataagtaagttgatgagcttctctctacaacatttctagaaaatagaaaaaaaagcacagagaaatgtttaactgtttgactcttatgatacttcttggaaactatgacatcaaagatagacttttgcctaagtggcttagctgggtctttcatagccaaacttgtatatttaaattctttgtaataataatatccaaatcataaaaaaaaaa

SEQ ID NO: 869 - DNA, 566 bp, Homo sapiens
gcacgagtttagctttacaaaaaaaaagttgaatggcgttttattttcatggcctataagcaggtaccttagtagggcagatataggaaaaacaaattagagcaaaacaaatcctctacaaatccaaggcaggaaaagtggtggcagagtgactcattctcctgtccctcccatcaggtcaaatcaggaggctgcagtgaatgcctgttctttgaatgtgtagcagttgttcctgtaactctttaaaacttggctataggctgtttagcacagtacagattaaagatacagttacgtaaacagcaaagtaattttatagtgcttcatccatttatcatgctttggtttgctaattttttcacatacctttttctatcacagtctgttgcttttgtacacatttctcatattggggttcgacaggtaaacacaaactgctatttcagtagaaaaagttattgttatgtaatattaaacccaataaattgtataaaggtaaaaaaaaaaaaaaaaaaaaaaaaaaaaaaaaaaaaaaaaaaaaaaaaaaaaaaaaaaaaaaaaaaaaa

SEQ ID NO: 870 - DNA, 1417 bp, Homo sapiens
ggcaactaagagcatcaagaagcactatagatttagctaaacatccatgtaatgcctcaatggaatgtgacaagtgtcagaggcggcagaagaatagagcattttgctacttttgtaattctgtacagaagttaccaatttgtgcacagtgtgggaaaacaaagtgcatgatgaagtcttcagactgtgtcataaagcatgctggtgtatacagtactggccttgcaatggtgggtgcaatatgtgacttctgtgaagcttgggtttgccatggtaggaaatgtctcagtacacatgcttgtgcctgccctcttaccgatgctgagtgtgttgaatgtgaacgaggcgtgtgggaccatggaggcagaatattcagttgttctttttgccataactttctctgtgaagatgatcaatttgagcatcaagccagctgccaggttttagaggcagaaacatttaaatgtgtttcatgcaatcggcttggtcagcactcatgtctccgttgtaaggcttgtttctgtgatgatcatacaaggagcaaagtgtttaagcaagaaaaaggaaaacagcctccttgtcctaaatgtgggcatgaaactcaggagactaaggaccttagcatgtcaacacgctccctgaaatttggcaggcagactggaggtgaagagggagatggagcttctgggtatgatgcttattggaagaacctttcatctgataagtatggtgataccagctaccacgatgaggaggaggatgagtatgaagcagaggatgatgaagaggaagaagatgaaggcagaaaggattcagatactgagtcatcagatttgtttactaatttgaatttaggaaggacctatgctagtggctatgctcactatgaggaacaagagaactaggggagctgctctggtggccgtgtgtgagaggagcaggagtgagtgtgtgtgcttgatgaattgtgtgtggttgttcaaaagtaccttagccacttagccttgtgcagaagactagttacacttaatgggccaagcaatagggtgtagcgtttttatagaactgataatcaggcttatggcataagaaaaatgagtttcaaatttaagatgtttattgatcgaagcaattgaagtatcatggattggattgttactgatttcagtaaagtatgttttgccaattagatacatatatacaagataaaggaataggatggtaatatatttgtttgaaattaaattactgtttttattaaaaaatactgcttcattggtctgattttgtaaaatgtaatgagtaaaatgaattactgtatttttccttttatgtccacagaatgagagtcatatgttgttatattctaaattttcattaaatattcatgtcaccttgaaaaaaaaaaaaaaaaaaa

SEQ ID NO: 871 - DNA, 3322 bp, Homo sapiens
  misc_feature (3307)..(3307): n equals a,t,g, or c
  misc_feature (3310)..(3311): n equals a,t,g, or c
  misc_feature (3313)..(3316): n equals a,t,g, or c
  misc_feature (3318)..(3319): n equals a,t,g, or c
  misc_feature (3322)..(3322): n equals a,t,g, or c
ggctcctccaagattcccttggtggcaatgccaagactgtgatggtggccaacgtggggcctgcctcttacaacgtagaagagactctgaccactctgcgatatgccaaccgtgccaaaaacattaagaacaaaccaagggtcaatgaggaccccaaggatgccctccttcgagaattccaggaagagggtgaggaggaaggggatgataaggatgattactggcgggaacagcaagaaaaactggagattgagaagcgggccattgtagaggatcacagcttggttgcagaggagaagatgaggctgctgaaggagaaagagaaaaagatggaggacctgcggcgggagaaggatgctgccgagatgctgggcgccaagatcaaggccatggagagtaagttgcttgttggaggaaaaaatatagtagatcatacgaatgaacagcagaaaatcctggagcagaaacgacaggaaattgcagagcagaaacgtcgagaaagagaaatccagcaacagatggaaagtcgagatgaggagaccttggaacttaaagagacatacagctcattgcagcaagaggtggacatcaagaccaaaaaactcaaaaagctcttctccaagcttcaggcagtgaaggctgagatccatgacctccaagaagaacacatcaaggagcgccaagagctagagcagactcagaatgagctcaccagggagctgaaactcaagcatcttattatagaaaactttatccctctggaagaaaaaagtaaaattatgaatagagccttctttgatgaagaggaagatcattggaaactacatcctataaccagactggagaaccagcagatgatgaagcggccagtctcagccgtgggatataagagaccattgagccagcacgcaagaatgtccatgatgattcgtccagaggcccgatatagggcagaaaacattgtgctgttagagctggacatgcccagccggaccaccagagactatgagggtccagccattgcccccaaggtccaggctgcattggatgcggctctgcaggatgaagatgagatacaggtggatgcatcatcatttgaaagcactgcaaataagaaatccaaggccaggcctaaaagtggaaggaagtcgggatcctcctcctcttcctcaggaacccctgcatctcagctttatccacagtctcgggggctggttccaaagtaaagccagcttctcctctcccagggcggaaacagcatttgccttctgagagaagagactagcaaaaagctgcagagaggattcggcccaaactcagaactgttcccctgaggagaagcggtggcctctttgcagatcaaccaacttaatctggttgaacgtgctgttcctaatctggcactcagcccctctgggaaacatcttttaattagcatctcagaaatgcatgggtaaggtaaagtgcgatagttcaagtggaaagcaagagaatgaccagtgaccttgcttccttcccccttgccttcttctcccccttcccctgtgctccctttctctcctctctccttttctagcctgttctttacatggggctcccttcttgttgaacaatagggcagaatcaggagtcaccttagcaggaccacatctttggagcctcgggataaaatgacagtgaggttgaaaagtgaaaaccctagaacttgaataggtgcctgttcttgtagggagaaatgagaaatcgcatttggatccaggccccaggtgggcaccatcagcagtcttgcttccatgcacctcagtaagaagtggatctgcctttgggacctgctcagtgaggaaatctcttccaatttctgcttctgaatgattcaatgttgggagcaatagaaataacattccctttgccttctctgagtgtttagggaaatagcttctttaaaacctcaaaaccatgaccatcctgtcaaagacctaagtctgtaagctggtgccatgtccatacaccatgtcactttactcttcatttgtcaccatcttttcccatgcacgcatactctgaacatccttgtgtgggcccatcctctgcatccagagcatgctctgcagtgggcctgttttgtggaagaaaggaggctgtctctgccttctctgatgggactggagttgagggaaggagctgtattgtggcacttctgaattccccgttttgttccatattggtatagagagcagaagagtagctaggcagatgcagagatggagacatgagactcagtgcagtgggcagggaagacataacagatggaagcaaaggaatcctgcctgccttcagcagagaattcaccgaatcctagaactgtggctccctccaggcagagcctaagatgctggtgaagaatagctgtgtgattgaataggctcaaaggagagttcagaattcccatttacatattactagtttggtttgtaagttttagttccttgtattattgagattcagagcttcattttatgttggtcattaggtgaatattactcattttccctcaagagaagctcataagtgtgtgtgggtgtgagagcacgatggtgcctgtgttctgtgaatgtgtccatatgtgtctgtaagagagacagagaccaagaacttgcccaattttagaaatacactaatgtgcagttgttgccttttgtctgtattgaaggcccattgaatgactaatccaggctggaagcattcccatgtgggtgtctgagtccatgagccaagcctgaggggacagtgagtctccaggtctgccacactggtgcaccttgctggcacggtgcctcaggaaggtggcgactcaggtgggccttgagttatattttaactcagctgctcagttcccagggcacatttctggatcagaacccatgggaaacaggaggtactaagtgcaatgtcttagcattctgcaaaatggagatctgttgtccagcggcttatctcctttttagtaacccttctttctgaacccagggcccttttcagccttccctcatmttttcttgagatcaaactttacttctttcttatttactaagaatttgcctgtttgaataagaacaaaacgctaaggtgggtagcctaaggcctgtatttycttgcatgrttcacacacgtgtcacaccagcacacaatttccacaacgtacacttgaccatccgacggacaaacactattcccgctaacaacacgcgaattcacaactgcacaaaaccgacccggagcatgaccccgcatgtcacctaacataggntanntnnnngnntan

SEQ ID NO: 872 - DNA, 1974 bp, Homo sapiens
ggcacgaggccacacaagccttttctgctcttccgcgacgagactctcacctacgcgcaggtggaccggcgcacaatcaagtggcccgggcgctgcacgaccacctcggcctgcgccagggagactgcgtggcgctccttatgggtaacgagccggcctacgtgtggctgtggctggggctggtgaagctgggctgtgccatggcgtgcctcaattacaacatccgcgcgaagtccctgctgcactgcttccagtgctgcggggcgaaggtgctgctggtgtcgccagaactacaagcagctgtcgaagagatactgccaagccttaaaaaagatgatgtgtccatctattatgtgagcagaacttctaacacagatgggattgactctttcctggacaaagtggatgaagtatcaactgaacctatcccagagtcatggaggtctgaagtcactttttccactcctgccttatacatttatacttctggaaccacaggtcttccaaaagcagccatgatcactcatcagcgcatatggtatggaactggcctcacttttgtaagcggattgaaggcagatgatgtcatctatatcactctgcccttttaccacagtgctgcactactgattggcattcacggatgtattgtggctggtgctactcttgccttgcggactaaattttcagccagccagttttgggatgactgcagaaaatacaacgtcactgtcattcagtatatcggtgaactgcttcggtatttatgcaactcaccacagaaaccaaatgaccgtgatcataaagtgagactggcactgggaaatggcttacgaggagatgtgtggagacaatttgtcaagagatttggggacatatgcatctatgagttctatgctgccactgaaggcaatattggatttatgaattatgcgagaaaagttggtgctgttggaagagtaaactacctacagaaaaaaatcataacttatgacctgattaaatatgatgtggagaaagatgaacctgtccgtgatgaaaatggatattgcgtcagagttcccaaaggtgaagttggacttctggtttgcaaaatcacacaacttacaccatttaatggctatgctggagcaaaggctcagacagagaagaaaaaactgagagatgtctttaagaaaggagacctctatttcaacagtggagatctcttaatggttgaccatgaaaatttcatctatttccacgacagagttggagatacattccggtggaaaggggaaaatgtggccaccactgaagttgctgatacagttggactggttgattttgtccaagaagtaaatgtttatggagtgcatgtgccagatcatgagggtcgcattggcatggcctccatcaaaatgaaagaaaaccatgaatttgatggaaagaaactctttcagcacattgctgattacctacctagttatgcaaggccccggtttctaagaatacaggacaccattgagatcactggaacttttaaacaccgcaaaatgaccctggtggaggagggctttaaccctgctgtcatcaaagatgccttgtatttcttggatgacacagcaaaaatgtatgtgcctatgactgaggacatctataatgccataagtgctaaaaccctgaaactctgaatattcccaggaggataactcaacatttccagaaagaaactgaatggacagccacttgatataatccaactttaatttgattgaagattgtgaggaaattttgtaggaaatttgcatacccgtaaagggagacttttttaaataacagttgagtctttgcaagtaaaaagatttagagattattatttttccagtgtgcacctactgtttgtatttgcaaactgagcttgttggagggaaggcattattttttaaaatacttagtaaattaaatgaacaccaacaaaaaaaaaaaaaaaaa

SEQ ID NO: 873 - DNA, 663 bp, Homo sapiens
  misc_feature (6)..(6): n equals a,t,g, or c
  misc_feature (20)..(20): n equals a,t,g, or c
  misc_feature (27)..(27): n equals a,t,g, or c
  misc_feature (57)..(57): n equals a,t,g, or c
  misc_feature (80)..(80): n equals a,t,g, or c
cccttnattaaaccaaaaanagaaatnaccctcaataaagggaacaaaagaaaagcntccaccgcggtggcggccccacnagaactagtggatcccccgggctgcaggaattcggcacgaggtgagaccctgtctctaagaagacatttcttctggtgctttggtgatgcttctgctcagcctttctgtctgtagtctcagtccgatagtccagtctgctttgagggcccaccaggacctggaggaggggccagtttcagtcaagggtctgcagttgaccttgagaacttagcacattcattatctttttgtgggcacttccacctcccattagaaagaaaaagatgggcccagtgcggtggtggcttatgcctgtaatcccagcacattgggtatccacggtgggtggatcacttgagctcaggagttcgagaccaatctgggcaacatggcaaaaccccatctctacaaaatccaaaaaaatgagctgggtgtggtgtcacatacctgtagtcttagccacttagggggccgaggcaggaagattacttgaacctgggaggttgaggaggctgcagtgagctgagatcacaccactgcattccagcctgggtgacaacgtgagaccctgtctcaaaaaaaaaaaaaaaaaactcgaggggg

SEQ ID NO: 874 - DNA, 1166 bp, Homo sapiens
ggcacgaggttacttatctttccagacttttttgtgcttgtacaaatagttttcttattcttttaaacaaaagcagtatcgtattttacaggttacagaattctcttcgttttactgtgtcttgcggatgtgtcccttggacctgtctatatacataagtcgtgctttccttcaagttctcctcttcgttagcttaggagagccaagaaataaagactttcttacaaatgactgtttgagtttggctgatgtgtcctacagaaacctcaccatctctctctctgttctccctactctcttacgggtccttacctactaccatggcttggattatttttgtgtattctcatggcttccaactgttttacatctgcagtggttaattctcttgtcatctttacctgaagatcataaaaatgcctttctccctcttacccaccctttctgtgttactcaatattgtattttaactcccaagcctacagtttacccttgaacaacacaccaacacggggattggggctgtctgctgggtggcacctgtgcaatggtgactgggttctggctgtcacatgtgcaacagtgtgtgtgctgcagctgtcaccagtgcaacagtggctgtgttccaactgttccctgaagttttagccaaggtgatagtccgttttgtgtcacgttttgacctgatttatttttgcgatgatttgggattgtgattggataccatccttatgaatactgttttcttctttaaggaaagggggctgtatacagctttgatccagtagggtcttaccagagagactccttcaaggctggaggctcagcaagtgccatgctacagcccctgcttgacaaccaggttggttttaagaacatgcagaatgtggagcatgttccgctgtccttggacagagccatgcggctggtgaaagatgtcttcatttctgcggctgagagagatgtgtacactggggacgcactccggatctgcatagtgaccaaagagggcatcagggaggaaactgtttccttaaggaaggactgatctgtgtgctcttatcaccaatcagttcagacctggttgattttgtactttggaactgtaccttggatggttttgtttattaaaagagaaacctgaagtaaaaaaaaaaaaaaaaaaa

SEQ ID NO: 875 - DNA, 2273 bp, Homo sapiens
gcggccgccccaacatcagaatggtgtcagggtccacttcggcaggggggttggargwggasscwgacaccatcctgaaggcactcttcaagtcctcaggggcctctktgaccacgcagcccacagaattcaaaatcaagctttgagcaggggagtgaggcagccagaagtgggggcagaggagggtggctctgtttccccaaggcaaagcttatgaccaatgggccatcggactggagacccctgattgtgggaagggttgccrgggataaagagcttcctcactggatgggacccgcctttctgtgttgtgttctgccctgtgctcttctctctacgttaacgtttcctgtagtatgtttcttcatctcatcgccaaggtaggcttgtgtttttcagtgtgtgcctccccgagcctcagccccaagctgatttcttatctggaaatggtacactgaattctctgggtggctttcttgtggccccatgggatgcagcgtgggggctgtctgaaggaccctgctttttccaggggccgaggggctgcctttcctttgtgtgtattaagcttttcaaacaatggaggggatggagagccctggtgtcctgacgggagccaggtcggcctgagagctgtgccgctcctctgtcttgtcagtggaggtgcctgggtggggagcaggtctcaggcctcttgtcctctccccagtggctccaggcctcactagtggcaagggcaggatgaggctgcaccgctgggaagagtctatctaagytcttggcttggagtcccgtgtcgtctccrcccagaggaagttctccagagttcacctttcccttttccttgagttgtgctgaatgccccaccccagctctctttcccttctgggtgtctttgctgggagggggctgtgttgtgagccctcccggttctcacctcgcctggcacttaaccacaccctggttttgtgtagccgccagctctcttctggttgggcctttgaaaggctcagcctcccattgtgcagtgcttgggtttggagcttatttgaatggaagaggtcagtttgttcctggctctccatttctggcctcagttgtctacaggacagtggtcagggatgcctggaggcatatatccagctgccaccaaggggcactgtttgttcccacttatgtgagtgaccccatccatccatgaccagaggattattttcctgccttggcagaggaggaggagtcaagggagcagggcagctctaccaggcaaggtgtttccccagcataggcgcagacagttgggacgaaacttcagagcccaggcagtccctgaatgaccaggccagtgttgtcactgagtggtcccctgctggttgggagtgaagagaatccaggctggcagagctggagccagttggggagcacggttctgggagctctgcaaaatcagtagcaagtgctggaaaaggcacatgccgaagatactcaagagctcccaagatttgcttgaggctagcccagtgaaaaaaaccagagactcatgtttccaggggtcagtctgtcaggcaggaaggacccaggatttgaacccagcttcagtgtgcaggctctgaggctgcccaggacgggaaagtccaaggaaggggcctggtggtgctccacttgcagttctttaaagaatgctgctttttattctcctaaccctttcaagtgggtgcagacttctcgttagcagctggaagacattcctcccacacttttcccttcctggcccaagagagcatccagaaggcagtaggacctggtttttcaggtactgggagccgggggctcactgcttgcactgtgcttagggtagggatggtaaatatcctccctgcatggctttatcctccctctcatcccaaagcaggtatcttctggttgtcacagagtttcattgagtccagctgcagccacgtggccatctggagctggtgctataggtgaccatctggtacattgaggggacctgtttgcctcctccactctataagcagtcatcttgggagaccgggaggagaaggtggtgggctagtcctgtgtcctcctccacttcccatgcctctatgttacccatctgtgtctcctgtgcagaaggagaggaaggggcattaagagatgaagggtgattatgtattacttatccatttctgaataaacatttgttattcctaaaaaaaaaaaaaaaaaactcgagggggggcccggwacccawatcgccskaaagtgag

SEQ ID NO: 876 - DNA, 1439 bp, Homo sapiens
  misc_feature (1425)..(1425): n equals a,t,g, or c
ggaattcggcacgagcctctccacgcgcacgaactcagccaacgatttctgatagatttttgggagtttgaccagagatgcaaggggtgaaggagcgcttcctaccgttagggaactctggggacagagcgccccggccgcctgatggccgaggcagggtgcgacccaggacccaggacggcgtcgggaaccataccatggcccggatccccaagaccctaaagttcgtcgtcgtcatcgtcgcggtcctgctgccagtcctagcttactctgccaccactgcccggcaggaggaagttccccagcagacagtggccccacagcaacagaggcacagcttcaagggggaggagtgtccagcaggatctcatagatcagaacatactggagcctgtaacccgtgcacagagggtgtggattacaccaacgcttccaacaatgaaccttcttgcttcccatgtacagtttgtaaatcagatcaaaaacataaaagttcctgcaccatgaccagagacacagtgtgtcagtgtaaagaaggcaccttccggaatgaaaactccccagagatgtgccggaagtgtagcaggtgccctagtggggaagtccaagtcagtaattgtacgtcctgggatgatatccagtgtgttgaagaatttggtgccaatgccactgtggaaaccccagctgctgaagagacaatgaacaccagcccggggactcctgccccagctgctgaagagacaatgaacaccagcccagggactcctgccccagctgctgaagagacaatgaccaccagcccggggactcctgccccagctgctgaagagacaatgaccaccagcccggggactcctgccccagctgctgaagagacaatgaycaccagcccggggactcctgcctcttctcattacctctcatgcaccatcgtagggatcatagttctaattgtgcttctgattgtgtttgtttgaaagacttcactgtggaagaaattccttccttacctgaaaggttcaggtaggcgctggctgagggcggggggcgctggacactctctgccctgcctccctctgctgtgttcccacagacagaaacgcctgcccctgccccaagtcctggtgtctccagcctggctctatcttcctccttgtgatcgtcccatccccacatcccgtgcaccccccaggaccctggtctcatcagtccctctcctggagctgggggtccacacatctcccagccaagtccaagagggcagggccagttcctcccatcttcaggcccagccaggcagggggcagtcggctcctcaactgggtgacaagggtgaggatgagaagtggtcacgggatttattcagccttggtcagagcagaacacagagattttccgtgaaaaaaaaaaaaaaaaaaactgcgnagggggggtcctgt

SEQ ID NO: 877 - DNA, 1686 bp, Homo sapiens
  misc_feature (724)..(724): n equals a,t,g, or c
  misc_feature (744)..(744): n equals a,t,g, or c
  misc_feature (864)..(864): n equals a,t,g, or c
ggcacgaggccaaatctccaccaacaaataaaatcggaagtaaatccagcaatgccagttggcctccagaattccaaccaggagtgccatggraaggtatccaaaacattgaccctgaatctgacccctatgtcaccccaggaagtgtgctggggggtacagccacatctcccattgtagatactgaccaccaactgctgcgggataacaccacagggtctaattcttccctcaacacctcgctgccttcacctggtgcctggccctacagtgcctctgacaactcctttaccaacgttcatagcacttcagcaaagttccctgattacaaatcaacatggtccccagatcccataggacacaaccccactcatctctccaacaagatgtggaaaaaccatatttcctccaggaacactacaccgctgccccgcccacctcctggtctgaccaaccccaaaccatcatctccctggagcagcacagcaccccgatcagtcagggggtgggggacacaggactcacggctcgcctcggcctctacctggagtgatggtggctcagttcgtcctagttactggctggttcttcacaatctcaccccacagattgatgggtcaaccttgagaacgatctgcatgcagcatggcccactgctgacattccatctgaatctaacccagggcactgccctgatccgatacagcaccaaacaggaggcggncaaggcccaaactgcactgnacatgtgtgtgttgggaaacactaccatccttgctgagtttgccactgatgatgaagtcagccgctttctggcacaagctcagccccctacacctgcagcaaccccaagtgcgccactgncggggtggcagtcgctggagaccggccagaaccagtcagatcccgtgggacctgctctgaatctttttggtgggtccactgggctcgggcagtggagcagcagcgctggtggcagcagcggggccgatcttgctggcgcttcattgtgggggcccccaaactattcttctagcttatggggagtcccaacggtggaagatccccataggatgggcagccctgctcctttactacctggtgaccttctgggaggagggtcggattcaatctgaacttagaactttcaactctgacctcgtgaccttttttggaacagcagcagcactaacttgaccttttcgttttttttttcaacttgcaataaatacatttttaaaaggaaaaaagaaaacggagagaaaaaaaggtgggtcattgacagactgtctgagcacatagttgcctcccttataacttcagttttttcgtttggaatatgaatccaaaaagagaacatatcactcttgaaatacttgaatcatgaacgccaacctagaaagacaatgtgaagcaagtacacataccatttaaatttaaacacaaaaaaattaaaaaaattagtttctagtttttcacttttttcatgttatatggaagttgttgctaagaaacatatatactgaaaaaaaatagctttttaactttgtttgcactgggtgtgtttccgtccttaggtctaccatgtttgggagggagggaaattcaaaagaattgttgggggaggggggagggaagacttgacggagcctcactttaaaaacaaaaacacaaaaaacctaaaaa

SEQ ID NO: 878 - DNA, 846 bp, Homo sapiens
agactttgtgaaggtgaagagagttagagcagccattctagtagactatgcagccaataaatatttgtccagtaaacacataagatggccaaattggtttgaaaggagagaacatgccaagtctccttttttataataatcttcattcagtggccttacctacattacagacccacacattgttagttaagaagctaatttcaatgagaaagcatgctcaaaagagggttgggtattttttgtttctttgtttttgttgttgttgttgtttttgttttgttttgtttttgcagatattacagggacagttggtaaagtgtcaataagaatataattagaatgtggtaggtatgtggatacgaccttcttagttaaattcactagtgctttctcagtccttaggcccctgatcagtcatatagaatgcttcccagttcaattttccttgccacaattcctctctaagttttgcaaaggctttctgtcatgaggaaggagatggtcagttgggatcatgttgatgcattctatcattaggataaaatctttccagaaaaaaagttagaaaccttcttataggctgaataatccaagcaccaccactaattgacatwaatwactaacttacagtgtgcgagtataagaatatcatgggcatagggaaatgtcaatttgtaaatgacatgctaaaaaccaaatagcagccaggcacggtggctcatgcctgtaatcctagcactttgggaagttgaggcaagtggattgcctgagctcaggagttcgggaccagcctggggaacatggtgaaactccaactctactaaaaaaaaaaaaaaaaaactcgag

SEQ ID NO: 879 - DNA, 2065 bp, Homo sapiens
ctgcaggaattcggcacgaggggaattctgcctagaagctggatgagctgttgaggatcctgtggctgagttggagccatctctcttgctctgctcaggtatggatgtgtttgtgcctctgtcagcctttgactttgacattttgtgtgtttcatcctgccaggctccttcatacgagtgtgggtagggaactcctctgtgctgttttcttagtttttttagtgcacccaggggcctgtgaggatgggccacagatagctgtctgcttgtgtctaatgacattgcgtgtttgccatttgggaaaccagaatggcatggcctcagtcacggccatgactggttgggtgacttgtgtgctctgaatgcctcacacatgagtgtgattggctgcactccggcctgtgcagcagagcgggactcggcctcaaaaaaaaagagaaacagaggcagaaagtagaacagtggtttcaggaggggagaatggagagttccttaatgaacagagtttgttgtgcaagatgaaaaaattttagagatgggtggttgtgatggttgcacagcaatatgaacatacctaatgccactaaacggtgtactttgaaatgattaaaatggtaaattgttcgtatatttttccacagcaaaaaaaaaaaaaaaaaaccaaatacgtcctctttgtcaaagtggccagctactgaggcctgatgggccagtacattgaactgaatgcactacaggaagagcttgcatcattcggtctggtcattctgggctttccctgaaaccaatttggaaaacaggaaccaggagagaactcagagatccttcctaccctcaagtatgtccgaccaggtggaggctttgtccctaatttccagctctttgagaaaggggatgtcaatggagagaaagagcagaaattctacactttcctaaagaactcctgtcctcccacctcggagctcctgggtacatctgaccgcctcttctgggaacccatgaaggttcacgacatccgctggaactttgagaagttcctggtggggccagatggtatacccatcatgcgctggcaccaccggaccacggtcagcaacgtcaagatggacatcctgtcctacatgaggcggcaggcagccctgggggtcaagaggaagtaactgaaggccgtctcatcccatgtccaccatgtaggggagggactttgttcaggaagaaatccgtgtctccaaccacactatctacccatcacagacccctttcctatcactcaaggccccagcctggcacaaatggatgcatacagttctgtgtactgccaggcatgtgggtgtgggtgcatgtgggtgtttacacacatgcctacaggtatgcgtgattgtgtgtgtgtgcatgggtgtacagccacgtgtctacctatgtgtctttctgggaatgtgtaccatctgtgtgcctgcatctgtgtagtgctggacagtgacaaccctttctctccagttctccactccaatgataatagttcacttacacctaaacccaaagtaaaaaccagctctaggtccaattgttctgctctaactgatacctcaaccttggggccagcatctcccactgcctccaaatattagtaactatcactgacgtccccagaagtttctgggtctaccacactccccaacccccaactcctacttcctgaagggccctcccaaggctacatccccaccccacagttctccctgagagagatcaacctccctgagatcaaccaaggcagatgtgacagcaagggccacggaccccatggcaggggtggcgtcttcatgagggaggggcccaaagcccttgtgggcggacctcccctgagcctgtctgaggggccagcccttagtgcattcaggctaaggcccctgggcagggatgccacccctgctccttcggaggacgtgccctcacccctcactggtccactggcttgagactcaccccgtctgcccagtaaaagcctttctgcagcaaaaaaaaaaaaaaaaaaaaaactcgagggggggcccggtacccaatt

SEQ ID NO: 880 - DNA, 2021 bp, Homo sapiens
  misc_feature (14)..(14): n equals a,t,g, or c
  misc_feature (17)..(17): n equals a,t,g, or c
  misc_feature (24)..(24): n equals a,t,g, or c
tccggtcggtacgnccnggagtantggatatgtcgaccaggacgtcggtgtgacttagkccttcacctcctawgataaagtgaatakttctttacaaaataattcatgtccttaatgttaaagatgtaattttattttcaaaacatctataacatgactttcagaagcagttcatttttccaagattcctcacattatactagataaataataggccctcagttaatacccttcagttattgaattaatctagtttgtggaatgaggtgtatcctgccaacttccctctgctcccaagtacactctgagaggtaaaatgctctgggaaatggaacaagaatcgagtggatgctgactctgtgtgcccacctcctcaactgattgataatggttgaccttgggcaagtcacttctttcaatgcctcagttccccatctgtcaaatggggttaataatactgacctacctcacaggggtgttgttgtgaggcattgtaaatcaaagttaatagaatacttcagggtcctctgtggaggatgtcttgagccagagtttaagcctgacacacaggctttggtcctcactgagctgtctccaagactggaactacttagtgactcggcaaattttctgccccccacccctcatcaaagctgctagttcagatgttgacagtgttttcatgaatgttggaatcttactagtccagacttacttaggatgttgttggggaaggcacttgggattttctgtgtcttgcattcacagagggaggccatttcagattcaagagcattggattagggaatcgtgaggcagggatgctactgcgtatttctctctgcaggttggggattaaagttcctttccccatgggtttgaagcagactcagactgtctcaggatcaaagcaaccctcaatggttttgatttatgtcattgcttaccactccccaaccaatcccaggacagctgggtcactgtacccctttgtggtatctgtacctgggcctctccttcctcatagggaccagctgattgaataaatgtgaccaccttatttccaccccccacccccaaaagctacattggaattatttttcctagaaatgtgtataacactcagaattgggcattgatccttaaagcttcatcccattcaccgtattcaacatctgtcatctcttagtgtctgcagtctgaacctaaccttgaccttttttccctctggtttgagaaaactttggacactatttctacttggccaggtgtgggctcaagagccttactctttccatctcagtttaggggcgcagccagctcctcttcccaatagggctctttctgctttccctctccttggccctagatttgtaatccatgaaaaagcacaaggtcctggctccttgcggtcacattctggttctctgtgttttgtggactctgctctcactgttcacccagcactagcagtaccagatggttctgtggagtcctggggaatggagagagcacagtctgactccctgccaagtagccaggagttgacttgcccatggtccgctggctttcccaccacttcctacaggatgggatctaagagactcaagagctgggtttctttcagcactctgtactgtcccaaatagcaaacaaatcactttgtagccagatttctgaatggaaatgagaaattgaattctccatggacttttaggtttatgggggagttttagctgtgtttcttggttttatttcagccaaacatgtctgcttttgattttttttttaaagtataagtggtctatatatatgttcaccttttaaatgtaaatgtttaaaaagtaagcatttatgtgtttccataactgacatctgatgcagacctcattctctccccctcttctaccctcctcttttcccccttttcatactcttgtattggttctaataaatggttgcttttcaaawawraaaaaaaaaaaaaaaacctgcccgggcggccgctcgaaagccgaatt

SEQ ID NO: 881 - DNA, 2620 bp, Homo sapiens
  misc_feature (105)..(105): n equals a,t,g, or c
ggcacgagaggatggcgacttcagctgggggtcatgctgagcaccaacaggaactattccagtgaagagcaagtgctgcccgacccaggaccctgtgccaggctngcagccctccagctccctccagagaggaaacctctgtctggctgagggtgggactagctgggatgtctcactccagttgctcaggttcacccaggaagctcctccgtggagtggccagcctgattctagccctgtcctctctggcagcacatgccacacctgcctgggccttctgctccctgatgcttgatgagcccctgcctcctcaatgtttctcaaagacagacccccctgaggccagcttgaatgtgaagactgctgaagtyagctggcttcacttgagctgcagaaaaggtggctgggatggcccaggtgcacccagaggccccagccctttggctgcctttgggttgtgacttgggttgtctctgaggccctgccagagctgggcctgcgggtggtgggcggtccgacctcgggcagtcagtgctccgcagcctcagcactgcatcccagacccagtgtcctcagagggaagagccagcctccctgcctcatggaaccaggagtcccaaaaagtcaggagcctggagstctgaaaggagcagggattccatagtgcgtgaagctgaaataggcgccctcctggggagcccccagcaaaactgtttttcatacccactcccagaactgccccgctccagctccagcgccasgccagctgttgccaggcatcattggagaggcctggctgccccaggggagagggagtggtggacctgtatgggctggcaggaggcattggcatgctgacaagtgtcacctgccttcctagcctggagccacccctcaggtggcctgcttgcacctcctatccggaggtagcctgccccacctgtaggcagagggggctcttgcttgaggcctgcacaggaagcaagtatagccccggtgccccagagtgggttccacttagccctggcgagatggcctgtcctgagatctctgctcccagaccccaccatctggggagcacagtccttaggctgcctggtccaggaagggggtgcggctctgtcaggaaacctggactctcaaggcccaccagcctctccgtgagtgttagaaatcacagatacagtatatacttaattacactaaattattgctgggattccttataagcactaattatacctgattataggttaaaatatttattttgtcaaaatattttcttgggaatgtgtttaaccctttctgcgttcattgttgctgagatgtgaaaactaaccattccctcctgcctacctttttggccactgggcggcagagaatggcgctatgtgcagttgggcccccggcaccatgggcctttggctgcctgctgcagagtagccctgcctgggcagtctccaggcactgagcaggccatctgtggccaggctgagagaatgactggctcgcttaccagcgtgcatgggacaaggagctttggagcctcaaggggttgttgctggcctgggctagagggaaaggtgaccatccgtctgtcctcctgtctttctattagcgcctccatgtgagtgatggtgccttggttcactagccttcccccaccaccccaccatgccacctggtggtcttggggcctgtgctgtcactccagcccctggggaggagaggacccagcccggagagttggggcaagggctccacatggcccaagggcaacagatgctcgcagggcagctgctgccgatgctcacgctcctgcccccctccttcccgctgccacaccccaccctgggcccccgcagacacgcatctctaactcagttgggcccagccttctggatagcttggggtaggccatgggcccacctggggccaggccagcccctggggcagctctggaagagcagtgtggaggagcacttgcttgcagcctggcttcagcctctggcactgctggagtggtccctgggagcttctgcactgtcggctgtggggacgtctcacccacttgggttacagtaggccttccccacccagagagaagtgtttccaccccagagacattgcctgtcagcccctgaagtgctcgcctcccccagtgcccgtcaccagcccttcctatctgtggggtccaagtcaggcttcccctgcggccaccagccatagggagcagccatcagcccccgagtcagaactgcttctgtctgtccatacctccaggctctcccggagagggggacggatatttatttcctaaagtttgcacttaattgtgaggattctcaggattgttgggggctactgaaaagaggaatgtgttgaatgtcgcgtttgctgtccactcgtcctagaagtttagtgtttttgtcactgtcatgtgtttctgtgggcagagctggttctggagggtgggtcagtgcacccgaggctcagagcatccatccaccccactggccctccttccagataccctctctctaattgggttcttgcatgtaaaatactccacaataaataaataattgaacaaaaaaaaaaaaaaaaaacttgagggggg

SEQ ID NO: 882 - DNA, 1023 bp, Homo sapiens
acgagggactgctgaccttcgggtacctggtgctgctgtcccacgttggcgagcgcatggctgtggacatgcggagggccctcttcagctccctgctccgacaagacatcaccttctttgacgccaataagacagggcagctggtgagccgcttgacaactgacgtgcaggagtttaagtcatccttcaagcttgtcatctcccaggggctgcgaagctgcacccaggtggcaggctgcctggtgtccctgtccatgctgtcgacacgcctcacgctgctgctgatggtggccacaccagccctgatgggagtgggcaccctgatgggctcaggcctccgaaaattgtctcgccagtgtcaggagcagatcgccagggcaatgggcgtagcagacgaggccctgggcaatgtgcggactgtgcgagccttcgccatggagcaacgggaagaggagcgctatggggcagagctggaagcctgccgctgccgggcagaggagctgggccgcggcatcgccttgttccaagggctttccaacatcgccttcaactgcatggtcttgggtaccctatttattgggggctcccttgtggccggacagcagctgacagggggagacctcatgtccttcctggtggcctcccagacagtgcaaagcttcctccgtgttgcaccctgtccgaattcccttccgctgcaggctgtgacactccatgcatggaaggaccatccttgacaggctgtgtgagctgcccttccccatgcctgccacttccagggatgacaagctgacccctgtccccacacaccccacccttatagcttattgctttgcgttggtccaaaaccacccgtagctgaacctctgggatgaccagagctgatcaccagacagctcaaggcgggccttcccggtcctatctcttttcaaagcttaacacaagcagttctacataaatatgttatggtaaataatgagatagtaaatatgctgtaacagataaaaaaaaaaaaaaaaaaaa

SEQ ID NO: 883 - DNA, 2073 bp, Homo sapiens
attttctgtcatggataatgtgcttgagtccctataatctatagacatgtgatagcaaaagaaacaaacaaaagccaggaaaacactcattttcgccttgaatatgtaaatgggattaattttgtcctgtgccttatgtggaaaggaacttctttggttttccttttttgttctggtggaagcatgtgcaggagacatatcatccaaacataaaccattaaaatgtttgtggtttgcttggctgtaattttcaaagtagttaattgaggacaaagggtaatgcagaagtgatagctttggtttgctgagtcttgttttaagtggccttgatatttaaaactattcctgccaccatttcttctccttggccacttcttccttgcgtctccctgcatgctgctttatttgcttctccctccccaaccacctcatggtatatttaagagtgaaagggacaaactagtaggtttgtcaagtttaatataaagcactgatgtaacttgctaggtaaacggaaagataagttctaactgcctactatccaatgtcagttaattggtgtcttcccccctcatttgctctcttccctaaaatgtgtcccagatgccttcatttgctgttttacttctatgttctgcttttcctcctctctttgttcccttcctgtctatccattgagtttatgaaatggaagagttaactgcatgcactagtgtttggagggtgttgtggtttgtctttctaattaggtgtatagcctattcactttcctagaataaatctcttaacctaaatttgagtagtctgcattttggcaactcctctagcagcttggtagcctagtacaggttgtttttttaaaaaaggaaaagcaggaaggaggagtgaattttattaacatgtttgccaaatgtattgagatttggcctctgaagaacactttttcagtgttaagtttctttaccttaagattcagaaatactttagaatattattaattttaagtcctgtctttacatccttttggaaaacttgtattaccatgagtttggaaaaaggacaacgaaaggcttttcatgtaaagataagatctttagctatctctaaccctgtccttttttcactgcattttttctagttttgcttcattgcttatcattaggatagggtaagtgaagtttgctatgctgctagcatcctaagatgatacctttgttgaaagaattgtgaatagcatgattcatttctagcagaggctgagtttaggacagcagcttccattgagaagtctttctgtgtcgtgaatagcattttaatgacctcttggctcacataagcaaacaacatagggacgtatctgctatgaaaatccacaaatttttcagatagtgccctaaaaacaattttatatgcctcactggttgttattcttaggttattcccacacttgactttatcattgtttactactagtaaaaagcagcattgccaaataatccctaattttccactaaaaatataatgaaatgatgttaagctttttgaaaagtttaggttaaacctactgttgttagattaatgtatttgttgcttccctttatctggaatgtggcattagcttttttattttaaccctctttaattcttattcaattccatgacttaaggttggagagctaaacactgggatttttggataacagactgacagttttgcataattataatcggcattgtacatagaaaggatatggctaccttttgttaaatctgcactttctaaatatcaaaaaagggaaatgaagtataaatcaatttttgtataatctgtttgaaacatgagttttatttgcttaatattagggctttgccccttttctgtaagtctcttgggatcctgtgtagaagctgttctcattaaacaccaaacagttaagtccattctctggtactagctacaaattcggtttcatattctacttaacaatttaaataaactgaaatatttctagatggtctacttctgttcatataaaaacaaaacttgatttccaaaaaaaaaaaaaaaaaaaa

SEQ ID NO: 884 - DNA, 683 bp, Homo sapiens
  misc_feature (69)..(70): n equals a,t,g, or c
  misc_feature (616)..(616): n equals a,t,g, or c
  misc_feature (666)..(666): n equals a,t,g, or c
tatttaggtgacactatagaaggtacgcctgcaggtaccggtccggaattcccgggtcgcccacgcgtnngcccacgcgtccgcgcggatcccgctcccgcaccgccatcatgatctgcctggtgctgaccatcttcgctaacctcttccccgcggcctgcaccggcgcacacgaacgcaccttcctggccgtgaagccggacggcgtgcagcggcggctggtgggcgagattgtgcggcgcttcgagaggaagggcttcaagttggtggcgctgaagctggtgcaggcctccgaggagctgctgcgtgagcactacgccgagctgcgtgaacgcccgttctacggccgccttgtcaagtatatggcctccgggccggtggtggccatggtttggcaggggctggacgtggtgcgcacctcgcgggcgctcatcggagccacgaacccggccgacgccccgcccggcaccatccgcggggatttctgcatcgaggttggcaagaacctgattcacggcagcgactcggtggaragtgcccgccgcgrgatcgtctctggttccgcgcagacragctyctytgstkggaggacagcgctgggcactggctgtatgantarcccggcaratgcgcgtcamagaggtctcacactccagcctyctccanggggccccaaggtgggc

SEQ ID NO: 885 - DNA, 1993 bp, Homo sapiens; identical to SEQ ID NO: 405

SEQ ID NO: 886 - DNA, 1075 bp, Homo sapiens
  misc_feature (1024)..(1025): n equals a,t,g, or c
  misc_feature (1062)..(1062): n equals a,t,g, or c
ggcagagcttcattccagaagtaccctcaaagacagagacaccaagaagaatcggaacatacaggctttgatatcaaaggtttataaagccaatatctgggaaagagaaaaccgtgagacttccagatcttctctggtgaagtgtgtttcctgcaacgatcacgaacatgaacatcaaaggatcgccatggaaagggtccctcctgctgctgctggtgtcaaacctgctcctgtgccagagcgtggcccccttgcccatctgtcccggcggggctgcccgatgccaggtgacccttcgagacctgtttgaccgcgccgtcgtcctgtcccactacatccataacctctcctcagaaatgttcagcgaattcgataaacggtatacccatggccgggggttcattaccaaggccatcaacagctgccacacttcttcccttgccacccccgaagacaaggagcaagcccaacagatgaatcaaaaagactttctgagcctgatagtcagcatattgcgatcctggaatgagcctctgtatcatctggtcacggaagtacgtggtatgcaagaagccccggaggctatcctatccaaagctgtagagattgaggagcaaaccaaacggcttctagagggcatggagctgatagtcagccaggttcatcctgaaaccaaagaaaatgagatctaccctgtctggtcgggacttccatccctgcagatggctgatgaagagtctcgcctttctgcttattataacctgctccactgcctacgcagggattcacataaaatcgacaattatctcaagctcctgaagtgccgaatcatccacaacaacaactgctaagcccacatccatttcatctatttctgagaaggtccttaatgatccgttccattgcaagcttcttttagttgtatctcttttgaatccatgcttgggtgtaacaggtctcctcttaaaaaataaaaactgactccttagagacatcaaaatctaaaaaaaaaaaaaaaaaaaanntcgggggggggcccgtacccattggccctaggggggnttagggggtaatg

SEQ ID NO: 887 - DNA, 1356 bp, Homo sapiens
  misc_feature (1336)..(1336): n equals a,t,g, or c
  misc_feature (1347)..(1347): n equals a,t,g, or c
cgggaaaagcttctgtctgcaggtccaaaggcaccgtcctgagttggaaaaagatgaatcagacccagtccctccctggagttgctcagaggtctggaggagaaaggcatagagagaacagccccagcccaggtgggaaggaggcagaaactcggcagcctgtggtgattctcttgggctggggtggctgcaaggacaagaaccttgccaagtacagtgccatctaccacaaaaggggctgcatcgtaatccgatacacagccccgtggcacatggtcttcttctccgagtcactgggtatcccttcacttcgtgttttggcccagaagctgctcgagctgctctttgattatgagattgagaaggagcccctgctcttccatgtcttcagcaacggtggcgtcatgctgtaccgctacgtgctggagctcctgcagacccgtcgcttctgccgcctgcgtgtggtgggcaccatctttgacagcgctcctggtgacagcaacctggtaggggctctgcgggccctggcagccatcctggagcgccgggccgccatgctgcgcctgttgctgctggtggcctttgccctggtggtcgtcctgttccacgtcctgcttgctcccatcacagccctcttccacacccacttctatgacaggctacaggacgcgggctctcgctggcccgagctctacctctactcgagggctgacgaagtagtcctggccagagacatagaacgcatggtggaggcacgcctggcacgccgggtcctggcgcgttctgtggatttcgtgtcatctgcacacgtcagccacctccgtgactaccctacttactacacaagcctctgtgtcgacttcatgcgcaactgcgtccgctgctgaggccattgctccatctcacctctgctccagaaataaatgcctgacacctccccacaacctgcaatctgtcgggcactcttctcgttcaactccctgtagccctttgggactttgcggtcccctaagtagaaaattcctatgggcctgtctcctgggggcctctgtctgctggtggtctgcttaccacagaatcctaaggggcaggagtgcctgggcatgtgtctgtgggagccttgcagtcagttgtgtttggacaagtgcaacagtcaggctgctgattcctgtggcatgcaggctgtagaggttgacaaatggaggggggtgttgagggtgagccctagttgattttttaaaatttaaactctggtaagaacatttaatatgagacctactctctttttttctttacttatttatttatctatttatttcaagacagggtcttactntggcaccttangcttggggt

SEQ ID NO: 888 - DNA, 996 bp, Homo sapiens
ggcacgagccaagtttgtccagtcacgaaatcagcaggaagtgatctataacacccagagcctcctcagcctcctggttcactgctgcagtgccccagggggcactgaatgtggggaatgctggggggcacccatcttgagtccagaggcagccaaagcagtggcagtgaccttggtggagagtgtgtgtcccgatgcagctggtgcagagctggcctggccccccgaggaacacgcccgggccaccgtggagcggggatctccgcattggccggcgcttccgcgaacagcccctgctctttgagctgttaaagctggtagcagctgcacccccagccctgtgctactgttccgtgctgcttcgggggctgctggccgccctcttgggccattgggaagcctctcgccaccctgacacgacccactccccctggcacctggaggcatcctgcaccttagtggctgtcatggctgagggaagcctcctgcctccggccctgggtaatatgcatgaagtatttagccaactggcacctttcgaggtgcgtctgctgctgctcagtgtctggggttttctccgggagcatgggcccttgcctcagaagttcatcttccaatcagagcggggtcgcttcattcgggacttctccagggagggtggaggtgagggtggaccccatctggctgtgctgcacagtgtcctccaccgcaacatcgaccgcctaggtcttttctctggccgtttccaggcaccttcaccgtccactctccttcgacaggggacgtagccttttcttgctctggaagcccagggaggttgagcagtgagagagggaagggactaacgtgctccggaagggtggaggtttctcttctaagtccttggtctaaagagcgctgtcacttttttctctcccacttttttttttctaaataaaatttgccaacttgaaaaaaaaaaaaaaaaaaaaaaaaaaaaaaaaaaaaaaaaaaaaa

SEQ ID NO: 889 - DNA, 345 bp, Homo sapiens
  misc_feature (313)..(313): n equals a,t,g, or c
  misc_feature (345)..(345): n equals a,t,g, or c
agctcgtctgggcgttagtgttaatattctgtacttgaagcaagcccaccaagcggctgaactgggtggataatggaaaatgtcctgtggatttgggagtragacaaaccggcttgagtctaacctctsgagttagtctaaggctccaagcttggaaagggttaaatgaaagtactatatttgttttgtttcgttttcgttttgtttgaggctttgctctgttgcccaggctgggagtgtagtgggcacaatctgctggttcactgcaaccttcgatctcccaggtttcaggcggttctcttggcctcagccnccagagttagctgggatttgcaaggtgcccgn

SEQ ID NO: 890 - DNA, 2677 bp, Homo sapiens
ggcacgagcgaaaatcttcatcagtatttgaggacttggttcttaagatatattcaagaatgctttccctttgcccaaaggtgaaagtatcattaaagttgtcttagtatggtaaggatttttttttctctgcttggcagttaagagttcaacatggggctgggcggggtggttcacgcctgtaatcccagcactttgggaggcttaggcaggcgttcgagaccagcctgggcaacatggcgaaaccctgtctctacccaaaatacaaaaattggccaggcatagtgctgcatgcctgtggtccctcctgagtggctgggactgcaggcgcccgccaccatgcctgcctaattttttttgtatttttagtggagacggggtttcaccgtgttggccaggatggtctcgatctcctgaccttgtgagatccgcctgccttggcctcccagggtgcttggattacagacatgagccactgcccccagctgatttttttttttttttttgaggcggagtcttgctctgttgcccaggctggagtgtggtggcacagtcttggctcactgcaacctctgcctcccgggttcaggctattctcctgcctcacctcttgagtggctgggattataggcacacgccaccacgcccagctaatttttgtatttttagtggagacggggtttcaccacgttggtcaggctggtcttgaactcctggccttgtggtccgcctgcctcagcctcccaaggtgctgagattgcgggcatgagccaccgtgcccggccagctcagtgaattttgtaaagcaatcatgttcatgtagctaccactcaattaaaaaagtactggccaggtgtggtgattcacatttgtggtccaggcactttgggaagctgaggcaggaggatcacttgaggccaggagtttgaaaacagcctgggcaagatccttgtttccacaaaaaatttttaaaaaacccatctgagcttggtggtgtggacctgtggtcacagctgctcaagaggcgttcttagcccaggagttcaagattgcagtgagtgatcattgtactccagcctgggggacagaggtgagaccctgtcttaaaaaacaaaaattaagataatacctaccagcaaaaaccagagggaagaatacttttaaaattagaggccgggtgcggtggctcacccctgtagtcccggcaccttgggaggcctaggtgggcagatcacctgaggtcaggtgttcgagaccaggctggtcggcatggtggagccctgtctctactgaaggtacacaaattggctgggtgtggtggcgggcgcctgtggtcccagctactcgggaggctgaggcggaagagtctcttgaacccgggaggcggaggttgtagtgagccgagattatgccattgcactccagcctgggcgacagagtgagactttgtctaaaaagaatataaataatattagacagttgtcttatggagatacaatttacattttaaaaaaactcatagtttttttttttttttaggcagtcttgctctgtcacccaggctggagtgcagtggcgtgatctcggctcattgcaggctccacctcccgggttcacgccattctcctgcctcgacctcccgagtggctgggactgcaggcgtcccccaccacgcctggctaatttttttttgtatttttggtggagatggggtttcgccgtgttggccagggtggtcttgatctcctgaccttgtgatctgcccacatcggcctcccagggtgctgggattgcaggcgtgagccaccacgcccggcaaacccatacattttaagtgtatacacagacaattccactctctgatcaaggtatacaacattactcttacctcaaagttcccttgttgccagtcaactctgcccttccctccagagtcagagcactattttgatttttttgtaatttagttttcctgaatctagaacttaaggaaacatacagtagatgtgtgtgggggcatgatcttaatataaaatactagatggaagactggaaatacagatcagactattataacaaaataacttggacattatattcctttaaaaaaactttgcccccaatccctaaagaatgttggttcttaaggaagcagtgtttgttctatcagaatcctattatcactccttggacttagttggtaaagtaacagaccttatgaaaaggaacagtcgattgctctgtggatgtggccccatgtatcccactttgatttcccttaaacttttttctcaccacaggaaagtaaaacaggattcaaccctaattagaaaatgtagatattaactgtcattcaaatgtttattagcctctagaattaacttttttttagccagatgcggtggctcacgcctgtaatccagcactttgggaggctgaggtgtgtggatcacttgagatcagagttcaaggccggcctggtgaaaccctctctctgctaaaaatacaaaaattggccaggtgtggtggcgtgcgcctgtggtcccagctactcaggaggctgaggcaggagagttgcctgagcccgggaggcggaggtgcagtgagccgagatcacgccaactgcactccagcctgggtgacagagggagactgtctcaaaaaaaaaaaaaaaaaa

SEQ ID NO: 891 - DNA, 1708 bp, Homo sapiens
ccatttggtctggccttcgcgcagatgttcacgccggaagtgggtaaagtcattatggcgctgatggtgatgtcctgctgcggttcgctacttggctggcagttcaccattgcccaggtgtttaaatcttcatctgatgaaggctacttccctaaaattttctcccgtgtaaccaaagtggatgcaccggtgcagggaatgttgaccattgtgattattcagagtggattggcactgatgaccattagcccgtcgctaaacagtcagttcaacgtgctggttaacctggccgtggcttccagcgtttcttcaaggcggttgaaccgaaatgggatctgaaaacggactggcaaatcatcagtgaaatcgccacccgtatgggttatccgatgcactacaacaacacccaggagatctgggatgagttgcgtcatctgtgcccggatttctacggtgcgacttacgagaaaatgggcgaactgggcttcattcagtggccttgccgcgatacttcagatgccgatcaggggacttcttatctgtttaaagagaagtttgataccccgaacggtctggcgcagttcttcacctgcgactgggtagcgccaatcgacaaactcaccgacgagtacccgatggtactgtcaacggtgcgtgaagttggtcactactcttgccgttcgatgaccggtaactgtgcggcactggcggcgctggctgatgaacctggctacgcacaaatcaataccgaagacgccaaacgtctgggtattgaagatgaggcattggtttgggtgcactcgcgtaaaggcaaaattatcacccgtgcgcaggtcagcgatcgtccgaacaaaggggcgatttacatgacctaccagtggtggattggtgcctgtaacgagctggttaccgaaaacttaagcccgattacgaaaacgccggagtacaaatactgcgccgttcgcgtcgagccgatcgccgatcagcgcgccgccgagcagtacgtgattgacgagtacaacaagttgaaaactcgcctgcgcgaagcggcactggcgtaataccgtcctttctacagcctcctttcggaggctgtttttttatccattcgaactctttatactggttactccctacccaatcgtattatcaaaatgaaaaaaattatcgcattgatgttgtttttgacattctttgcccacgccaacgactccgagcctggcagccagtatttaaaggcagcagaggccggggaccgacgcgcacaatattttcttgccgacagctggtttagctccggcgatttgagcaaagccgaatattgggcacagaaagccgccgacagcggtgatgctgatgcctgcgcgctgctggcgcagatcaaaatcaccaatccggtcagtctggactatccacaagcaaaagttcttgcagagaaagcggcgcaagcgggcagtaaagaaggtgaagtaacgctggcgcatattctggtaaatactcaagcgggtaaaccggattatccaaaggcaatttcgctgttagaaaacgcctcggaagatctggagaacgactctgccgtcgatgcccaaatgctgcttggtttgatttacgccaacggcgtgggcattaaggccgacgatgacaaggcaacctggtatttcaaacgcagctctgcaatttcccgaaccggttattccgagtactgggc

SEQ ID NO: 892 - DNA, 1225 bp, Homo sapiens
aacgcactcaatattcagaagtttgaattctaccactctcaaacacagttcaaaagatagctgtttgagaatgcttcttaactaatactagtacaatatcttcaataatgtatgtaccttatagaaaatcttgaacagtacaagattttcataattaaggcatgcaaaactgcttgggctctttgattccaggtgtcctcttctcccttctgcttttgccatctatgttcaatataattctaacccagtctaagtatggagaaaattcctaccctgcctgcttttatagctcatcaaatttccctgtatcagctatcacttttctggtaggtgtagtctgatttctgtctgtcatgcctttgccacaatcctttctttgaagagtaggtaaaatgatctatttaaagtgttaatcacattgctctaatatataaagcctccagtggtttcccatatcactctgtaaaatgccccttgccagcctctcccatcaacctcgctttttctgttcttgtatatgcacatctcttcctgagcctttattgccatcctcatgtggggatgtttctgtctcagagatagtctttattcaggtcccactctgcagtcctctccagaggggctgctttcaccaccccttctaagtaagcctctctaaacacctctatcatattctatcccttagccagcactaattttttcataatgcttaccactaactgaaatttactttatcatttaatctcttcctcattagaatgtaagctcgtaagggaggggcagctctgtagtttattcattattgtatgtccctcacctaatcctatgagtgtctggcccatattagggtatgtaataaatattacttgaggaatgaatgaatttaacatactaccaattctctgagtgactctttttaaagccttcatcatcattcacactttcttgtctttcatatgggcatgtccaatcacccttccatgaatatctgtacctgttacaaagagaggactaggttcctggagttcatagatgtaaacaacatcctargggtagcaaactggtgggccctgagccaaatcctggcctgcacatgtattttgtttgagttgtacaatgtttgttataaatgaactggctgataatattttttaattggaaatgtttacattaaaaacctagacttctagctgctcttaaaaaataaaaatacggctgggcactg

SEQ ID NO: 893 - DNA, 1532 bp, Homo sapiens
ggcacgagaatacaatatatacaagtgaagtttttacctcagttttgcaatggactgcaaactatacttattacaccactacaccttctctcaagcctgccagggcctccatttatgtatgtggcttacagcttaaagtcagtagttggactactatatgaactgttactatcatgttttataccggtcgtaaatgcactccccaaactacaggaaagcggtatgtttattttttaaaccagcttttaattttcttagtattatttattgtagatgcaactgtttttattctgttggggggcttgggattattgcacttaactttgcagtttgagtgaactgtgttgaaaaagttaatgaaagcagttggtactcagacaaatagctgaaaactagtgaatgctagttgttatcaagtttttatttgacattaaggttaaaaagatatatttattttctaaatattttggactttttttttgtttaactctttattagctgctaagtaaattgaagtgtatttaatgatgtgttaagttaacccgatttatggaagacagtaaagaacagccctctgtagtcagaaaagtttcaccttctaaagaatatattttgaattagttttatgaactctgttaaaattctgacccattacttgccaatttataaaagcctattttattacaaggcattgtctctggaaaaaaaaaattcccttaattcttaaatgtcattagatgtagaaagaaaaactaaatgttactaaggattattaagaaatagttttttaactattaagattttaaaaactttcctgtaaagttgcttttaataagtatcaaattttctgtatgatcatgtaaaattcataatttgtgcaaagcagaggaaaaataaattcttaattttgtttagacttaacctaaaatgacatttataagttttaaatatgcagattttagagttacatattgtacaatgttgataggtttttctagtttttatttttcatctgaatggagactttatttgggaaagtgttttaattgttaaaactgatatttagtttgagaatgactttgtttacttttgtttagactactaaaatgtgacttacatgttttgattggactagtctgcaattttctcatcatagcatgagttggcagagaatatctacttccagcagtacatttaaagtttggtttataggaattaatttgagaatcaaaatgtaggaattttaaaataatttgctcactaaaaaaattaagatgttaaataatgggttattctttgtacttatctctgtcagaaactcttgctttactctttgttctcccagcagtttttggtttaatttctaatgtgtctaatttgtgtaggcgtcgaccagaagattatgatattcataacagcagaaagaaaccaaggattgactatccccctgagtttcaccagagaccaggttaatattttataatcctgcagatatttgatttcaaattattggaaaaaaaaaaaaaaaaaaa

SEQ ID NO: 894 - DNA, 554 bp, Homo sapiens
gaattcccgggtcgacccacgcgtccgaatttcaaaaacaacgaaaccttcttttgccccctccgcagcagtcgcctccgggctttattgcaagtttacggttccatacaagtaaatccgaaaaaaagtgtgtgtgggggggtccacaccactaattattatggcgaggaagataaagaagacatggacagaaggcggatggctctgcggcctggctcccgcagaccgaccgccttcttcttccattcgagatggctcgtaccgaacctccttgccttcttcctgggtctctcgggggctggaccaatacatctgccgatgccctggccgaatggcaggcgacatcgggtcctggacccccacacgcagctcagtacccacgaggccccaggccgctggaagcctgtagctccgcggaggatgaaagcctgcccgcaggttctcctggagtggtgagcctctgtcggaagggggcgcccacgtctttttaatgggtcctaacacaccagtggaataaatctctaagattccacaaaaaaaaaaaaaaaaaaaaa

SEQ ID NO: 895 - DNA, 2240 bp, Homo sapiens
  misc_feature (1545)..(1545): n equals a,t,g, or c
ccacgcgtccgctgctggtgggagaggactcaggctaaggtggcccccactgaagactcctgctaagcaacccactgaagacccctccgaatcatcgacggggcgtccttggggtgcagcccaggaagctcagttcacagccttggggcgcgcggcccatggagtcggggctgctgcggccggcgccggtgagcgaggtcatcgtcctgcattacaactacaccggcaagctccgcggtgcgcgctaccagccgggtgccggcctgcgcgccgacgccgtggtgtgcctggcggtgtgcgccttcatcgtgctagagaatctagccgtgttgttggtgctcggacgccacccgcgcttccacgctcccatgttcctgctcctgggcagcctcacgttgtcggatctgctggcaggcgccgcctacgccgccaacatcctactgtcggggccgctcacgctgaaactgtcccccgcgctctggttcgcacgggagggaggcgtcttcgtggcactcactgcgtccgtgctgagcctcctggccatcgcgctggagcgcagcctcaccatggcgcgcagggggcccgcgcccgtctccagtcgggggcgcacgctggcgatggcagccgcggcctggggcgtgtcgctgctcctcgggctcctgccagcgctgggctggaattgcctgggtcgcctggacgcttgctccactgtcttgccgctctacgccaaggcctacgtgctcttctgcgtgctcgccttcgtgggcatcctggccgcgatctgtgcactctacgcgcgcatctactgccaggtacgcgccaacgcgcggcgcctgccggcacggcccgggactgcggggaccacctcgacccgggcgcgtcgcaagccgcgctcgctggccttgctgcgcacgctcagcgtggtgctcctggcctttgtggcatgttggggccccctcttcctgctgctgttgctcgacgtggcgtgcccggcgcgcacctgtcctgtactcctgcaggccgatcccttcctgggactggccatggccaactcacttctgaaccccatcatctacacgctcaccaaccgcgacctgcgccacgcgctcctgcgcctggtctgctgcggacgccactcctgcggcagagacccgagtggctcccagcagtcggcgagcgcggctgaggcttccgggggcctgcgccgctgcctgcccccgggccttgatgggagcttcagcggctcggagcgctcatcgccccagcgcgacgggctggacaccagcggctccacaggcagccccggtgcacccacagccgcccggactctggtatcagaaccggctgcagactgacaccctcggcccacgactgtcttcccaagttttacagacttgttctttttacataaaggaatttgtaggaaatgcagccaaaggtgcagtcggaaaagatgcaggggaaatgtatttatgcagcgacaccccacaatgtgaacaaacagacaaaaaatctgtgccctcgtggaattgacgttctgcttgngaacacagaaaagaactcggtgatgaaataatggagatgattccagtgacaaacgacagagatggtgatggtggtcagggaagacctctctgcagaggtagtgacttgtgatgtgagctgagacctctgtcctgggaagaccaaaagaaaagcatttcaggatgagggaatggcatgcgcaaaggccctgaggctgaaatgtgcccatgtgttctaagaaatgcagcgatgctggtgtgcctggagcagggacggagggggagaatgggaggagacaaggagctgaaggagtagttcccgaaggaccttgtgggtgatatagaggacttcgcttttgctctgagtgaggtgggagccatagaagcttctaagcagaagagggacttgccctaattcaggtgatcacaggtgtcttgtggcctccatgggaggttgaaaaccagagaaggtgaaggggggctgcactgagccacaggaacaatgatggagattccagctaagcccagaccccgtggattctagatagattttagaggcagcagacagaattactgaggaattgagtgtaagagtggaataaagttatcaaggacaatgccaagggtggggcacccccaaatttgactctgggagactcagccaaatcctatctggtaataaaatttcttttttatttttcaaaaaaaaaaaaaaaa

SEQ ID NO: 896 - DNA, 1122 bp, Homo sapiens
  misc_feature (711)..(711): n equals a,t,g, or c
gtcgacccacgcgtccgaaagattgaaacaggctggcacacggttagaactcagtactaaaatataaaggagataacatattgcccactaacattttggctatttttaatatattgttcttgtctttttaatgaccacagatactctttagtatctgtttgctgcagtttttgcaggtattcatgatgcctgttatgcctttcctattttacctccttttcagattatgatagttttagcaaagaagtattcagttctagagactcattatcaaggaaagagagagctcttcatttggttttatcagataatagataataataaawaggcctggctttctttgcactggggaagatagagaaggaggaagagaagactattagtcatctaaggttatctgttttatcgaactgaggaggagttagcttctccaactcggggcagattaccgagagtaggagccagttacattctcttgggagaacagtgctatcaggctgatctctcaataaggacttcatattagatyatttaaatctcaaatattgaaatactctcatttttctaacaakgataattaagaaaactttgtaaagttacaaataaagtgaaattgaaaaggtttgctgaatgaagtattttactattgaaaggtcttctagaatgtaagtttcaaacacatcgtctggttggtgcattacttaatctatncctgtktggctgctgcttggtatttcccacgcaggagttcattgacttcaaggcaattgaatgcattattagccagaagaagaaaacatgtgagtctccttcacccaacaatagattttttaaaatacattgtgcacagtcctcttaaaaaaggcatcaatggcaggtgggtgtgaacagaggaatttcctcctccaccctggctgttgctgagctgtaagctgtaaacattgtgagagacaaaaagtatcaaggtctcaactttctttcggatattgctttgtatttctgtttactagtatgaatgaaaattttcctgaaaatgctggctaaaactgaatttttgtgttgtctttctaatggaatttctgatcaacaattccattagaawaaaaaaaaaaaagggcggcc

SEQ ID NO: 897 - DNA, 3641 bp, Homo sapiens
  misc_feature (3609)..(3609): n equals a,t,g, or c
  misc_feature (3625)..(3625): n equals a,t,g, or c
gcggacgcgtgggcggacgcgtgggcggacgcgtgggcagcggtaggcgagagcacgcggaggagcgtgcgcgggggccccgggagacggcggcggtggcggcgcgggcagagcaaggacgcggcggatcccactcgcacagcagcgcactcggtgccccgcgcagggtcgcgatgctgcccggtttggcactgctcctgctggccgcctggacggctcgggcgctggaggtacccactgatggtaatgctggcctgctggctgaaccccagattgccatgttctgtggcagactgaacatgcacatgaatgtccagaatgggaagtgggattcagatccatcagggaccaaaacctgcattgataccaaggaaggcatcctgcagtattgccaagaagtctaccctgaactgcagatcaccaatgtggtagaagccaaccaaccagtgaccatccagaactggtgcaagcggggccgcaagcagtgcaagacccatccccactttgtgattccctaccgctgcttagttggtgagtttgtaagtgatgcccttctcgttcctgacaagtgcaaattcttacaccaggagaggatggatgtttgcgaaactcatcttcactggcacaccgtcgccaaagagacatgcagtgagaagagtaccaacttgcatgactacggcatgttgctgccctgcggaattgacaagttccgaggggtagagtttgtgtgttgcccactggctgaagaaagtgacaatgtggattctgctgatgcggaggaggatgactcggatgtctggtggggcggagcagacacagactatgcagatgggagtgaagacaaagtagtagaagtagcagaggaggaagaagtggctgaggtggaagaagaagaagccgatgatgacgaggacgatgaggatggtgatgaggtagaggaagaggctgaggaaccctacgaagaagccacagagagaaccaccagcattgccaccaccaccaccaccaccacagagtctgtggaagaggtggttcgagaggtgtgctctgaacaagccgagacggggccgtgccgagcaatgatctcccgctggtactttgatgtgactgaagggaagtgtgccccattcttttacggcggatgtggcggcaaccggaacaactttgacacagaagagtactgcatggccgtgtgtggcagcgccattcctacaacagcagccagtacccctgatgccgttgacaagtatctcgagacacctggggatgagaatgaacatgcccatttccagaaagccaaagagaggcttgaggccaagcaccgagagagaatgtcccaggtcatgagagaatgggaagaggcagaacgtcaagcaaagaacttgcctaaagctgataagaaggcagttatccagcatttccaggagaaagtggaatctttggaacaggaagcagccaacgagagacagcagctggtggagacacacatggccagagtggaagccatgctcaatgaccgccgccgcctggccctggagaactacatcaccgctctgcaggctgttcctcctcggcctcgtcacgtgttcaatatgctaaagaagtatgtccgcgcagaacagaaggacagacagcacaccctaaagcatttcgagcatgtgcgcatggtggatcccaagaaagccgctcagatccggtcccaggttatgacacacctccgtgtgatttatgagcgcatgaatcagtctctctccctgctctacaacgtgcctgcagtggccgaggagattcaggatgaagttgatgagctgcttcagaaagagcaaaactattcagatgacgtcttggccaacatgattagtgaaccaaggatcagttacggaaacgatgctctcatgccatctttgaccgaaacgaaaaccaccgtggagctccttcccgtgaatggagagttcagcctggacgatctccagccgtggcattcttttggggctgactctgtgccagccaacacagaaaacgaagttgagcctgttgatgcccgccctgctgccgaccgaggactgaccactcgaccaggttctgggttgacaaatatcaagacggaggagatctctgaagtgaagatggatgcagaattccgacatgactcaggatatgaagttcatcatcaaaaattggtgttctttgcagaagatgtgggttcaaacaaaggtgcaatcattggactcatggtgggcggtgttgtcatagcgacagtgatcgtcatcaccttggtgatgctgaagaagaaacagtacacatccattcatcatggtgtggtggaggttgacgccgctgtcaccccagaggagcgccacctgtccaagatgcagcagaacggctacgaaaatccaacctacaagttctttgagcagatgcagaactagacccccgccacagcagcctctgaagttggacagcaaaaccattgcttcactacccatcggtgtccatttatagaataatgtgggaagaaacaaacccgttttatgatttactcattatcgccttttgacagctgtgctgtaacacaagtagatgcctgaacttgaattaatccacacatcagtaatgtattctatctctctttacattttggtctctatactacattattaatgggttttgtgtactgtaaagaatttagctgtatcaaactagtgcatgaatagattctctcctgattatttatcacatagccccttagccagttgtatattattcttgtggtttgtgacccaattaagtcctactttacatatgctttaagaatcgatgggggatgcttcatgtgaacgtgggagttcagctgcttctcttgcctaagtattcctttcctgatcactatgcattttaaagttaaacatttttaagtatttcagatgctttagagagattttttttccatgactgcattttactgtacagattgctgcttctgctatatttgtgatataggaattaagaggatacacacgtttgtttcttcgtgcctgttttatgtgcacacattaggcattgagacttcaagcttttctttttttgtccacgtatctttgggtctttgataaagaaaagaatccctgttcattgtaagcacttttacggggcgggtggggaggggtgctctgctggtcttcaattaccaagaattctccaaaacaattttctgcaggatgattgtacagaatcattgcttatgacatgatcgctttctacactgtattacataaataaattaaataaaataaccccgggcaagacttttctttgaaggatgactacagacattaaataatcgaagtaattttgggtggggagaagaggcagattcaattttctttaaccagtctgaagtttcatttatgatacaaaagaagatgaaaatggaagtggcaatataaggggatgaggaaggcatgcctggacaaacccttcttttaagatgtgtcttcaatttgtataaaatggtgttttcatgtaaataaatacattcttggaggagcaaaaaaaaaaaaaaaaaaaaaaaaaaaaaaaaaaaaaaaaaaaaaaaacccccgggggggncccccccccccctttncccccttggggggggg

SEQ ID NO: 898 - DNA, 1366 bp, Homo sapiens
  misc_feature (1102)..(1102): n equals a,t,g, or c
  misc_feature (1166)..(1166): n equals a,t,g, or c
  misc_feature (1207)..(1207): n equals a,t,g, or c
  misc_feature (1268)..(1268): n equals a,t,g, or c
  misc_feature (1352)..(1352): n equals a,t,g, or c
  misc_feature (1355)..(1356): n equals a,t,g, or c
  misc_feature (1358)..(1361): n equals a,t,g, or c
  misc_feature (1363)..(1364): n equals a,t,g, or c
gagcagatgaggaagtggcaggcaggcaggctggccccggggacttctctctggccctgctccctccgagcgctccgccgttgcccgcctggcccctacggagtccttagccaggatggaggctgttgtgaacttgtaccaagaggtgatgaagcacgcagatccccggatccagggctaccctctgatggggtcccccttgctaatgacctccattctcctgacctacgtgtacttcgttctctcacttgggcctcgcatcatggctaatcggaagcccttccagctccgtggcttcatgattgtctacaacttctcactggtggcactctccctctacattgtctatgagttcctgatgtcgggctggctgagcacctatacctggcgctgtgaccctgtggactattccaacagccctgaggcacttaggatggttcgggtggcctggctcttcctcttctccaagttcattgagctgatggacacagtgatctttattctccgaaagaaagacgggcaggtgaccttcctacatgtcttccatcactctgtgcttccctggagctggtggtggggggtaaagattgccccgggaggaatgggctctttccatgccatgataaactcttccgtgcatgtcataatgtacctgtactacggattatctgcctttggccctgtggcacaaccctacctttggtggaaaaagcacatgacagccattcagctgatccagtttgtcctggtctcactgcacatctcccagtactactttatgtccagctgtaactaccagtacccagtcattattcacctcatctggatgtatggcaccatcttcttcatgctgttctccaacttctggtatcactcttataccaagggcaagcggctgccccgtgcacttcagcaaaatggagctccaggtattgccaaggtcaaggccaactgagaagcatggcctagataggcgcccacctaagtgcctcaggactgcaccttagggcagtgtccgtcagtgccctctccacctacacctgtgaccaaggcttatgtggtcaggactgagcaggggactggccctcccctccccacagcntgctctacagggaccacggctttggttcctcacccacttcccccgggcagctccagggatgtgnctcattgctgtctgcactccagagctgggggctaaaagggnctgtacagttatttccccctccctgcttaaaaacttgggaagaggagcactcagggctggncccacarrgggtytcgtggscttttcctcayacaagaagacgtaagcaataatgtccctgtggacccaagtttattccttcaantanntnnnngnnta

SEQ ID NO: 899 - DNA, 834 bp, Homo sapiens
  misc_feature (700)..(700): n equals a,t,g, or c
  misc_feature (704)..(704): n equals a,t,g, or c
  misc_feature (736)..(736): n equals a,t,g, or c
  misc_feature (793)..(793): n equals a,t,g, or c
gctccaagattaatgaaggaattggtgacaaaattggaatgttctttcagtcaatggcaacatttttcactgggtttatagtaggatttacacgtggttggaagctaacccttgtgattttggccatcagtcctgttcttggactgtcagctgctgtctgggcaaagatactatcttcatttactgataaagaactcttagcgtatgcaaaagctggagcagtagctgaagaggtcttggcagcaattagaactgtgattgcatttggaggacaaaagaaagaacttgaaaggtacaacaaaaatttagaagaagctaaaagaattgggataaagaaagctattacagccaatatttctataggtgctgctttcctgctgatctatgcatcttatgctctggccttctggtatgggaccaccttggtcctctcaggggaatattctattggacaagtactcactgtatcttttctgtattaattggggcttttagtgttggacaggcatctccaagcattgaagcatttgcaaatgcaagaggagcagcttatgaaatcttcaagataattgataataagccaagtattgacagctattcgaagagtgggcacaaaccagataatattaagggaaatttggaattcagaaatgttcacttcagttacccatctcgaaaagaagttaagatcttgaagggncctnaacctgaaggtgcagagtgggcagacggtggnccttggttggaaaaagtggctgtgggaagatcacaacagtccagctgaagcagaagntctatgaccccacagaaggggatggtcagtgttgattgaca

SEQ ID NO: 900 - DNA, 794 bp, Homo sapiens
cccgggtcgacccacgcgtccggcagtttcttgatacctctgtgaagtcttgagaaagagtagctattgcttatccctcgtaacaggaagaaacttgtgacttaaaaaaaaaaaaaacatgttatctctctctagaactttggactgtggctagggcaagaatgtcagaggtacaatgctttgattttgggtccataactcacatactgtaagcatgtgacataataattaatggtcattagtcaggtcatcaatgttgatttatgatcttttttgttttatgtatattttcacctacctgaatgtttggcatatctctttggaggtataatttctattaaataatcttcaagtagccctaaatatcaaggacaaacatattaaaccccttttctccaaactactggtcattataaatctttgatttttactccagatgtttggagaacaagacagaaaggtgtgataatgataaagaatgtgatttagcctgggcgcagtggcttacacatgtaatcccaacattttgggaggtggaggcagaaggattgcttgagtccaggagcttgagacaagcctgggcaacatagtgagaccccatctcaaaaaaaaaaaaataaaaaataaaaaattagccaggtgaactggtgcgcacctgtagtccttgctactcaggaggctgaagtggaaagattgcttgaacccagcagttcgatgctgcagtgagctgtgattgtggcactgcactccagcctgggtaacaaagtgtgaccccatctaaaaaaaaaaaaaaa

SEQ ID NO: 901 - DNA, 1521 bp, Homo sapiens
gccgaatggaatgatgaccacccagcaggctggctacatggcaggcatggcagctatgccccagactgtgtatggggtccagccagctcagcagctgcaatggaaccttactcagatgacccagcagatggctgggatgaacttctatggagccaatggcatgatgaactatggacagtcaatgagtggcggaaatggacaggcagcaaatcagactctcagtcctcagatgtggaaataaaaacaaaacacctgtatggctgccattctcttcagccctcgctctcccctttccacagcctccacccctgacccccatcctcttttcctacctctctgtttggtttagaaattgctcaataagtcatttggggtttggcatcctgcccagccacttcccaaacatgaagacctctctgttgctttatgttgtacatgccccatagccatcccaacgtcctccccagtcctctcctggcaccagcaccttagaagttgttggcagaaggcacttaaactgtgggagaagtgtgcacacctttgagtcccttccctcaaggttaaagctcctgtcagactctcagaagggtctgtgggtgttgtatattaggcaaacaggggaaagcttagaggtccttctatatgtgttaataagctgtttctaagtgtttaaatttgaaaagcatcatgttctcatgatttatgggaatgaagcaagtactgaaatcaaattaaatactccctgggtcctgggtcagtttgaccctagccctggggtgaggcaagccccctcctatgaggatgagcaaaaatactactctcttcgccctgagttgctttctggatctggggcttcaggacttgctgcttcagtcagcctttattagcaccaaagactttatgaagatcccacacacagacacacatcccttcccgcctcccccctgccttcagtaggatctggctccgtggctggaggaccaacccctatagtgggaatgcagagcttaacgtgtactgcttgtgtgtgtgcgtgagtgtgtgtgtgtgtatgagtgtgtgttccgcctcccaccctctccccatctgctctgggtatttttgtttttgtttagttttaggtttacaacagagaggaattaatttatcagcagcctaaaactgttgtgtttttcttatggtttaaaaaacgccatgtcattgataactccctttctcccttcccttctcccggtctgctgatcactctttcatgcctgtgtatccagggtgctctgtttccccaccgttcccaggtgtacgaggcagagggccgggacagctttcctctcagtcattgttcaccccacttgaaaattcagacaagaaaactttgcttaaaagatttcatgtgtgggaaccacagttcctggctgcctttctcctgtgtatgtgtaaattccttaataaatattgcagggaaggaaaaaaaaaaaaaaaaaaaaaaaaaaaaaaaaaaaaaaaaaaaaaaaaaaaaaaaaa

SEQ ID NO: 902 - DNA, 1876 bp, Homo sapiens
cccgggtcgacccacgcgtccggggctactcatttgttttcacatatttatctatttgttcccttggtttcaaggctttaaacagaaattcagagcattttcatggtatctgggcatcattacaatatttactaaaagagaagtcctaaacatggtcattttatgggagaaatcagtagcacatggtgtttatgcaatgttatatatgattttactcattatgccaactgtattaaggggattccatctttctttgggccctcatcaggctaccacgatatacaatgagtggtatacttaagctctggctgaattgttctgtaatgtaatctgactcaaggagaacaaatggagaggtctttgtcattctactgtgtcatgtgaattttctcgtttctggagtctaagttgttctgtttttcacctgctatttgagaaattttttacaattttcgtgtcataagccagaatgcaatgggatgaatatggagcctttctttttatacactctcttgaaactcttcatgaaaagctttcttattgaattgtttcattctagcttgaatatcgaaatggaatgtgttacgataaattcataagtacgtttctattattatactatttatatagttatgacacattgtgaattgaatgaaaggtcttataaaattctgaaaagctgtgctgttgcttgtgtattatttatttatatctctaaaattatccactgactgcaaattgtccgtaagggacatattcaatgtaaaacaatcattcccagaactaaaaaaggtctaaaaatttcttttgaattttctttctactacaaatttttgcataagaacagaaacagtaacttctttctaaaacaacaatggaatctcaatatcaaaattagtctggttaagtacagcatgactgtatgcctagctgcttgggaggctgaggtgggaggatcacttgaggctcagagtttgaggctgcagtgtactataatagtgcctaggaacagccactgtacttgaagctggtcagcataatgagaccacatctttctcaaaaaaaaaaaaatctgatgctcagtatcaatcatttaaaaataaatgaatgaatgatcatgggacagaaaaatgataaattctgtattcaatctacatttgaacttatatttttgttacatctctgcaaattattttcatgggtttaagtatttttaattcattttatttttatttgcaaaaacattgcacatacatctaatttttaaaaattttctgggatcataagactacatggttaaaatattctattatacttttatagcagattcaatcaaaataagataattactgaataaaatgtaaacattgactagaaatgtcccttttaatgaaatcaataggcatcctgtatatctatagatgaataatttttagtgctagttaagcagatacaggtttttgtctcaattatatttctttcttggtttttcttggtttttaattgaggtacgtgctgagtaacttgttcacataataaagtagatgacagtggaaagtattttattttcagtattagtcaattatttgaacttgccaaaaatcacataatgatttattatcaaaaattatttgtaatgatctgtggactgacaattcacttgaatcttccctcaatattgtgaagagcagaaaattggaaaccatctgattaacaaaaagattatttctagtcaataaacttagcatttctgagaagtgtctcaaaaacatttaccaaaacttaaaaaatgaaaataactatactgcctttttatcatttagaggcaaaaaaaaaaaaaaagggcggccgctctagaggatccctcgaggggccc

SEQ ID NO: 903 - DNA, 765 bp, Homo sapiens
ccacgcgtccgcccacgcgtccgggatggtctcaatctcctgtcctcgtgatcggcccgccttggcctcccaaaatgccgggattacaggcatgagccactgtgccagcccacatttcttttatttatttatttatttttttgagatggagtcctgctctgttgcccaggctggagtgcagtggcgtgatctcggctcactgcaacctctgcctctcaggttcaagcgattttccagcctcagcctcccaagtagctgggattccaggtgtccaccaccacacttggctaatttttttgtatttttagtagagatggggtttcaccatgttggacaggtggtttcaaactcatgacctcaagtgatccacctgcctcggcctcccaaagtgctaggattccaggcatgagccactgtgccctgcctgtttttctttttctttctttttattttcttgagacggagtgctgccctgtcgcttaggctggagtgcagtggcatgatctcagcctactgcaacctctgcttcccagggtcaaatgattctcctgcctcagcttctgagtagctgggattacaggtgcccactaccatgcccaggaaatttttttgtatatttagtagagatgggtttcaccatgttggccaggctgatcttgtactccttacctcaggtgatccacctgccttggcctcccaaaatgctgtgattataggcgtgagccactgcgcccggccagaccacataaaaaaaaaaaaaaaaaa

SEQ ID NO: 904 - DNA, 2054 bp, Homo sapiens
tcgacccacgcgtccggagcgcccccgagcagcgcccgcgccctccgcgccttctccgccgggacctcgagcgaaagacgcccgcccgccgcccagccctcgcctccctgcccaccgggcccaccgcgccgccaccccgaccccgctgcgcacggcctgtccgctgcacaccagcttgttggcgtcttcgtcgccgcgctcgccccgggctactcctgcgcgccacaatgagctcccgcatcgccagggcgctcgccttagtcgtcacccttctccacttgaccaggctggcgctctccacctgccccgctgcctgccactgccccctggaggcgcccaagtgcgcgccgggagtcgggctggtccgggacggctgcggctgctgtaaggtctgcgccaagcagctcaacgaggactgcagcaaaacgcagccctgcgaccacaccaaggggctggaatgcaacttcggcgccagctccaccgctctgaaggggatctgcagagctcagtcagagggcagaccctgtgaatataactccagaatctaccaaaacggggaaagtttccagcccaactgtaaacatcagtgcacatgtattgatggcgccgtgggctgcattcctctgtgtccccaagaactatctctccccaacttgggctgtcccaaccctcggctggtcaaagttaccgggcagtgctgcgaggagtgggtctgtgacgaggatagtatcaaggaccccatggaggaccaggacggcctccttggcaaggagctgggattcgatgcctccgaggtggagttgacgagaaacaatgaattgattgcagttggaaaaggcagctcactgaagcggctccctgtttttggaatggagcctcgcatcctatacaaccctttacaaggccagaaatgtattgttcaaacaacttcatggtcccagtgctcaaagacctgtggaactggtatctccacacgagttaccaatgacaaccctgagtgccgccttgtgaaagaaacccggatttgtgaggtgcggccttgtggacagccagtgtacagcagcctgaaaaagggcaagaaatgcagcaagaccaagaaatcccccgaaccagtcaggtttacttacgctggatgtttgagtgtgaagaaataccggcccaagtactgcggttcctgcgtggacggccgatgctgcacgccccagctgaccaggactgtgaagatgcggttccgctgcgaagatggggagacattttccaagaacgtcatgatgatccagtcctgcaaatgcaactacaactgcccgcatgccaatgaagcagcgtttcccttctacaggctgttcaatgacattcacaaatttagggactaaatgctacctgggtttccagggcacacctagacaaacaagggagaagagtgtcagaatcagaatcatggagaaaatgggcgggggtggtgtgggtgatgggactcattgtagaaaggaagccttgctcattcttgaggagcattaaggtatttcgaaactgccaagggtgctggtgcggatggacactaatgcagccacgattggagaatactttgcttcatagtattggagcacatgttactgcttcattttggagcttgtggagttgatgactttctgttttctgtttgtaaattatttgctaagcatattttctctaggcttttttccttttggggttctacagtcgtaaaagagataataagattagttggacagtttaaagcttttattcgtcctttgacaaaagtaaatgggagggcattccatcccttcctgaagggggacactccatgagtgtctgtgagaggcagctatctgcactctaaactgcaaacagaaatcaggtgttttaagactgaatgttttatttatcaaaatgtagcttttggggagggaggggaaatgtaatactggaataatttgtaaatgattttaattttatattcagtgaaaagattttatttatggaattaaccatttaataaagaaatatttacctaaaaaaaaaaaaaaaaaaaa

SEQ ID NO: 905 - DNA, 3787 bp, Homo sapiens
aattcccgggtcgacccacgcgtccggcattacctggtagtaataaaaataaataggtctaagccagaggccacaggttggaaatcttctgatattgcagcatgacatttctgacctggaaagatctatagaatgcaggcttcaccttgttaatttattgatgcacagacagaggcatgaaggggaggtgctttgtcagggccaacatcaatggccacaccagggctggaacccaggctcaccgactcccaggccactgtgcttggctctgccctctccctgaaccagccttagcacctcaaggcgggagttgatggtcctcattcccttccctctgtgtctccttacagcctagcagaactggagaaggaggtgggcaacctcaggaggggcctgagagcggtggaggtggagctggagtatcagaggcgccaggtacgggagcccagtgacaagtttgtccctgtcatgagcgacttcatcacggtgtccagcttcagcttctccgagctggaggaccagctaaatgaggccagggacaagttcgccaaggccttgatgcacttcggggagcatgacagcaagatgcagccagacgaattctttggcatctttgataccttcttgcaggccttctcagaggcccggcaggatctagaggccatgaggaggaggaaggaggaggaggagcggcgggcgcgcatggaagccatgctgaaggagcagagggaacgtgacaaggccggcaattaaccctcactaaagggaacaaaagctggagcccaccgcggtggcggccgctagaactagtggatcccccgggctccagggattcggcacgagggacttatgcaagctcaagcgcaccgcaagcgatcagggagccaggccctggaagttacccgggagcgggcaataaaccggctaaattattgacctggggaactagccacacaggaggccgggagacagggactggtgagaatggggctgagtggaggaggtggtgatatttaaaccatttggtgcttggtttagagccttgggctgggtcctgggatggggggctgtgtgaggctggaccaggtgtctccccacgcttaccttaaggggctcctcttatctccccttcacacgattccttctgtgccctggccccaggtattattctgaggctgccttggatggcctcaggccaggtaaccccaggctgaaggggccctgctccccatcccctaccatgggcacccatgtgctggcacagaacagttcgagatctagactggagaggtccacagccttgtccagagttcctgtgtagcacggggagcagtgatggagggagcccctgagagggaatctggtgagggaatccagactcccttctctcaaggggaggctcaacagaacattgacctgggggcaaactttcctcttgaatgggaaacagaggaggcattatatattctagttagatcagctctggtaggttccagagaacagtcaatgttggaaggatgatgcagggaccaaagccatcaggacagagtagcagtgtctgtttcccatgtcacaagtcctctggcctctccctgcatgtcttaagtatctttcccttccttctctaccctcacctccatcctgtctactaatccacagtcctagaagactcaccttgggtttccacagctatggctcactaccaggtgcttgatgaatctggcgaggggctcaagacagacctcatgcatcaccacacctcatgccttttgggcatctcccatgtccccatcttcctggacacctgccattgttgtgaagccagacagtgacctcaaatggtgccttggagtcccctacagcccctcagcagacggcagcacttgaatgcttagctccatcccatagttctctacttcatataaattgctcaagcccttccaccccttctctaacactagcttcaaggcagaagccacagcagcctctgtccagcctgcaggtggccacttggaaccatgtgtccactggcgttggggagttggttcctgagaggtctgagggccagagctgccctctacattaacatgctgtctctaagggtggcccctcctctcaggcgttcagatggtgcgaacagcagagcaggcaagggaaactggggagatggggatggaggaggaaggctgatatcctctggggagcacatcacctgaaggtgccaaggaggaaggctgagaggggggccaccccatttctggtacccaatttggttcttcagcccaacttgcaaggggttccttctggtcctcccatccactgccaccttccattttgtccatctcatgctggccttggtggatgggatggctgtatctagacaaaatttttctaaaactccatcaaggctcttattcaataccacgttccgagttggcctttcatcttctttgagactggccctgcctaacctctaccatcaatgagctcttgggccctttggcccttccctgtgtttctcactttccaacctaatccctggctcagggttattgccagtggagaactggtgagctggggcctactctcagctgcctatcttctgcctttcacttgcatccaactcctggggctgggaccgtagtagctgcgggggggaagaaacacagggtcggtgagcccagcatgtgcgttggtttgagggggcgggcggtgtgtgtgtgttctggtgggagggatctgagcaagtgcaagcctggctgacacaggtgtgaagaggccatcctggaacccaggtgagggcaagatgaaggcttccaggcagaacagctgcagagagtttggctatatgcatctgcagccccaagagctcccactgcaagacaagtgttggggaagatgggaggttgtgggtgaggcctctaaaggtcctctcccaaactgaccaggctgatgtcaacctaaccccctcagggccagggaacaggggagggctccacaagcgtgtctggcattcccacccaccatgggaagactggatacgcacctggaaacaaaaggactatggaagctgttcaagatacatttgatcttcagaaaagcagaatttggttcaactgttgacagaggacacaaatacgttgttccagagctcaaccttctcactctaaaagaaagatatttttctatttattttctacatctggccagtggctctggtgctagatgccactgtagccagatctccaacagtgccttggaccatggactcatactcaactgagtaagaaggggctggtgcccagtcggggtggctgagctggtccttaataggttgtttcttggtcttgctttcttcatgccctccccactgctcctgccacctttagataagtttctctagctaattttgtggccaatgtaaaattcgtcatcaacctaacaaacacaaccttctcagcagcatttctcccctgtgatggaaataaagtgtttagggcagtgggaggagaaaattctccaggtgaatggggaagggtctgttccagcctctccctactcccatcccatttccaccaactggggaactgtgactatctatctcccccgacttctaccagggatgccttcacgccaaggctgttctcaccagctgcctcagatgacaaatgaggctaatggacataatctacagtgtcctttttcacttgcaccttttttataagaatatattgtaatactaaaaaatattaaattcataccatccctaaaaaaaaaaaaaaaaaaa

SEQ ID NO: 906 - DNA, 2899 bp, Homo sapiens
  misc_feature (2680)..(2680): n equals a,t,g, or c
gggtctagagtatgccctcccctacgcccaaggatatagagaaagaaactgcaaaggatgaagaggaagagcctcccagcatgactcagctacttcgaagaagaagagctgtcttgccacagacccggtatgtggagctgttcattgtcgtagacaaggaaaggtatgacatgatgggaagaaatcagactgctgtgagagaagagatgattctcctggcaaactacttggatagtatgtatattatgttaaatattcgaattgtgctagttggactggagatttggaccaatggaaacctgatcaacatagttgggggtgctggtgatgtgctggggaacttcgtgcagtggcgggaaaagtttcttatcacacgtcggagacatgacagtgcacagctagttctaaagaaaggttttggtggaactgcaggaatggcatttgtgggaacagtgtgttcaaggagccacgcaggcgggattaatgtgtttggacaaatcactgtggagacatttgcttccattgttgctcatgaattgggtcataatcttggaatgaatcacgatgatgggagagattgttcctgtggagcaaagagctgcatcatgaattcaggagcatcgggttccagaaactttagcagttgcagtgcagaggactttgagaagttaactttaaataaaggaggaaactgccttcttaatattccaaagcctgatgaagcctatagtgctccctcctgtggtaataagttggtggacgctggggaagagtgtgactgtggtactccaaaggaatgtgaattggacccttgctgcgaaggaagtacctgtaagcttaaatcatttgctgagtgtgcatatggtgactgttgtaaagactgtcggttccttccaggaggtactttatgccgaggaaaaaccagtgagtgtgatgttccagagtactgcaatggttcttctcagttctgtcagccagatgtttttattcagaatggatatccttgccagaataacaaagcctattgctacaacggcatgtgccagtattatgatgctcaatgtcaagtcatctttggctcaaaagccaaggctgcccccaaagattgtttcattgaagtgaattctaaaggtgacagatttggcaattgtggtttctctggcaatgaatacaagaagtgtgccactgggaatgctttgtgtggaaagcttcagtgtgagaatgtacaagagatacctgtatttggaattgtgcctgctattattcaaacgcctagtcgaggcaccaaatgttggggtgtggatttccagctaggatcagatgttccagatcctgggatggttaacgaaggcacaaaatgtggtgctggaaagatctgtagaaacttccagtgtgtagatgcttctgttctgaattatgactgtgatgttcagaaaaagtgtcatggacatggggtatgtaatagcaataagaattgtcactgtgaaaatggctgggctcccccaaattgtgagactaaaggatacggaggaagtgtggacagtggacctacatacaatgaaatgaatactgcattgagggacggacttctggtcttcttcttcctaattgttccccttattgtctgtgctatttttatcttcatcaagagggatcaactgtggagaagctacttcagaaagaagagatcacaaacatatgagtcagatggcaaaaatcaagcaaacccttctagacagccggggagtgttcctcgacatgtttctccagtgacacctcccagagaagttcctatatatgcaaacagatttgcagtaccaacctatgcagccaagcaacctcagcagttcccatcaaggccacctccaccacaaccgaaagtatcatctcagggaaacttaattcctgcccgtcctgctcctgcacctcctttatatagttccctcacttgatttttttaaccttctttttgcaaatgtcttcagggaactgagctaatactttttttttttcttgatgttttcttgaaaagcctttctgttgcaactatgaatgaaaacaaaacaccacaaaacagacttcactaacacagaaaaacagaaactgagtgtgagagttgtgaaatacaaggaaatgcagtaaagccagggaatttacaataacatttccgtttccatcattgaataagtcttattcagtcatcggtgaggttaatgcactaatcatggattttttgaacatgttattgcagtgattctcaaattaactgtattggtgtaagatttttgtcattaagtgtttaagtgttattctgaattttctaccttagttatcattaatgtagttcctcattgaacatgtgataatctaatacctgtgaaaactgactaatcagctgccaataatatctaatatttttcatcatgcacgaattaataatcatcatactctagaatcttgtctgtcactcactacatgaataagcaaatattgtcttcaaaagaatgcacaagaaccacaattaagatgtcatattattttgaaagtacaaaatatactaaaagagtgtgtgtgtattcacgcagttactcgcttccatttttatgacctttcaactataggtaataactcttagagaaattaatttaatattagaatttctattatgaatcatgtgaanmgcatgacattcgkwcasaatagmacttktaaaarttataagatagggacacagataaaacctacctcaattgtgcaggaaatagaaggaaaaaacactaattggaaagacagaaagtagcaaaggaactgtgatacaaagaccaagagtagcaaaaaaaataatgtaagagaataaagtaaaggagtttttcttctttttattttcttctgtgtgagt

SEQ ID NO: 907 - DNA, 567 bp, Homo sapiens
  misc_feature (13)..(13): n equals a,t,g, or c
  misc_feature (567)..(567): n equals a,t,g, or c
ggcacgagcgcantagctacagcacagatcagcaccatgaagcttctcacgggcctggttttctgctccttggtcctgggtgtcagcagccgaagcttcttttcgttccttggcgaggcttttgatggggctcgggacatgtggagagcctactctgacatgagagaagccaattacatcggctcagacaaatacttccatgctcgggggaactatgatgctgccaaaaggggacctgggggtgyctgggctgcagaagcgatcagcgatgccagagagaatatccagagattctttggccatggtgcggaggactcgctggccgatcaggctgccaatgaatggggcaggagtggcaaagaccccaatcacttccgacctgctggcctgcctgagaaatactgagcttcctcttcactctgctctcaggagatctggctgtgaggccctcagggcagggatacaaagcggggagagggtacacaatgggtatctaataaatacttaagaggtggaaaaaaaaaaaaaaaaaaaaaaaaaaaaaaaaaaaaaaaaaaaaaaaaaatn

SEQ ID NO: 908 - DNA, 839 bp, Homo sapiens
ccacgcgtccgcacaccctgacctaaagacatagccccaaatcactttcaccatgtagggtctgagcctctttaaatccatattcccgtccatccagtgttgtgcaaacatgagccagagtgtgctttggtccttccttggagtcagcgtcgcctgtggccccctccgttattgtctcgtggccttttgtgctaaactcggggcctctgctgtggagtaaagaatgtgggtttgtgtccctacctctgtcactgctggttctgcaacccaggaccattctcattctactatggtgatgcccctgacttcgttgacagcacacagacatgacttcagagttccgtgcacatgtgtgcatcttctttcccttctctagagatgtttggcatcttcctcctgctgggttgcaacacaggctgctacagcattctcttatcttcctttgcccttacacagactccaagcccacggtagagacgctgggacccactgtgaagagcgaagagacaaccaccccctaccccaccgaagaggaggccacagagtgtggggagaactgcagctttgaggatgacaaagatttgcagctccttcgggattcaattgcaacttcgatttcctcgaggagccctgtggttggatgtatgaccatgccaagtggctccggaccacctgggccagcagctccagcccaaacgaccggacgtttccagatgacaggaatttcttgcggctgcagagtgacagccagagagagggccagtatgcccggctcatcagcccccctgtccacctgccccgaagcccggtgtgcatggagttccagtaccaggctacgg

SEQ ID NO: 909 - DNA, 1577 bp, Homo sapiens
acgcgtccgggggattggagagttgaaagggttttcgggagcatctatttctctcagttctcctgctttgcctctggctactgcaggctgctgccttgcatttggtgaaagcctcgtgctttctaggaggggatttctttcagctttcctgccttacccccagtgtgtaatggggactgccttgcaatggatgaacctcacatgccttggagaatccctcttgcttctcctgccttgcttcctgtgctcagtgggctactttcttgtactttgggaagacctggtgtacctggggagggtatttctcagttctcctaccctggcaccagctttcagtgtacgactcccatccactcaatggaggctgggtgggtacagactagttctattcctggggtaccttgtgattctactctgttatgccaacccatatacaatcatccaaaatttgtttaaagataggctggcttctcccttcctcttctgtgctccttccaacatgtccctaggaacaaaagcagctgtgggactcttctctctaggaagagcttgatccttttggaaatgtagttaatttgagggatttttttctttttttttttttttttttttggctcctgggttctctgatgagtgtgaaacatgcaaatgaaagcaacaacaaataaaactgtcatttgtagcgcttctggtctgttctcatggttagagtaagagtgatagactcctgcaaatttctgcatcttataaaagagtggaggcttgtcccctcattgggttttgtacattgtctttgggctgtaggttgtacctgtcactaaggtaccttaaataaacatacacacacatttcgttttttaaaaatggctaagtcaagcctctaagttcaacatccaaactccatgtgaaggagtttcaactttctttggttttcaaaaatcccctctaagatcttccatatttgtgatggaatttacataaaacatttattcaaaaaaaagttattgaatacctagtatgcactaagggctgtttcaggacctggagatgcaagataacagtgccatggagctaacgttctagtggacttctggaaaaactaagggatcgtgacttagctgtgactgcaagtcacatatgcaagttcaccacagttgaccttttgaaacagtcatttcaggagttaaattataaggaaaattcattccagacctctgctgaaataaacaatgcttctaaattctatagagatgtgtagccagtggggagctgtctgactacatcagtttacagacttctttcagcaaaatcagagatccacatggaaaaccaagtattcaggagcctctatgtatattacagcatgccctggggcctcaagcagtctcctttatgtgtaattttttcatctgtgacagatttaatgtggataataatgcttacttaataagcaatccagtataatttaacagaagttactaatgtaagttcaaatgagttttcatttacaattttaagaacaccatgtgtatgacaggaaaacagtgggtgaagagctgatctaaaaaaaaaaaaaa

SEQ ID NO: 910 - DNA, 1601 bp, Homo sapiens
ctaagccataatagaaagaatggagaattattgattgaccgtctttattctgtgggctctgattctccaatgggaataccaagggatattatttttacagatggttttccatactggaacccaaaggtaaagacactcaaggacagacatttttggcagagcatagatgaaaatggcaagttccctggctttccttctgctcaactttcatgtctccctcctcttggtccagctgctcactccttgctcagctcagttttctgtgcttggaccctctgggcccatcctggccatggtgggtgaagacgctgatctgccctgtcacctgttcccgaccatgagtgcagagaccatggagctgaagtgggtaagttccagcctaaggcaggtggtgaacgtgtatgcagatggaaaggaagtggaagacaggcagagtgcaccgtatcgagggagaacttcgattctgcgggatggcatcactgcagggaaggctgctctccgaatacacaacgtcacagcctctgacagtggaaagtacttgtgttatttccaagatggtgacttctatgaaaaagccctggtggagctgaaggttgcagcactgggttctaatcttcacgtcgaagtgaagggttatgaggatggagggatccatctggagtgcaggtccaccggctggtacccccaaccccaaatacagtggagcaacgccaagggagagaacatcccagctgtggaagcacctgtggttgcagatggagtgggcctatatgaagtagcagcatctgtgatcatgagaggcggctccggggagggtgtatcctgcatcatcagaaattccctcctcggcctggaaaagacagccagcatttccatcgcagaccccttcttcaggagcgcccagccctggatcgcagccctggcagggaccctgcctatcttgctgctgcttctcgccggagccagttacttcttgtggagacaacagaaggaaataactgctctgtccagtgagatagaaagtgagcaagagatgaaagaaatgggatatgctgcaacagagcgggaaataagcctaagagagagcctccaggaggaactcaagagraaaaaaatccagtacttgactcgtggagaggagtcttcgtccgataccaataagtcagcctgatgctctaatggaaaaatggccctcttcaagcctgggcctcccattggccaaacacagcagcaaaccagaggacaagggagcccagtggcactgtccatagaggacagattcctggggtccagaagagggtggagaaagctgaaggctggagagtgaatctagggcatataaggccccacacagagcccagcacagagacggccttgcagctatcaggaagatgaggagcttccttcatggcctgctgtgggctgagtaaataatatgattgccttctacagcgctagagattcatatgtttatccccatttttcaggtgaggaaatgcttcagatgaggctccaccttgttaaataaattggatgtatggaaaaatagactgcaaaaaaaaaaaaaaaaaaattaaaaaactcgaggggggcccggtacc

SEQ ID NO: 911 - DNA, 1623 bp, Homo sapiens
  misc_feature (4)..(5): n equals a,t,g, or c
  misc_feature (10)..(10): n equals a,t,g, or c
  misc_feature (29)..(30): n equals a,t,g, or c
  misc_feature (100)..(100): n equals a,t,g, or c
  misc_feature (1588)..(1588): n equals a,t,g, or c
  misc_feature (1596)..(1596): n equals a,t,g, or c
  misc_feature (1618)..(1618): n equals a,t,g, or c
  misc_feature (1620)..(1620): n equals a,t,g, or c
  misc_feature (1622)..(1622): n equals a,t,g, or c
ttannccagntggccgcaggttttcccgnntgaaaagcggcagtgagcgcaacgcaattaatgtgagttagctcactcattaggcaccccaggctttacnctttatgcttccggctggtatgttgtgtggaattgtgagcggatamcaatttcacacaggaaccagctatgaccatgattacgccaagctcgaaattaaccctcactaaagggaacaaaagctggagctccaccgcggtggcggccgctctagaactagtggatcccccgggctgcaggaattcggcacgagaagacagcacgtggacctcgcacagcctctcccacaggtaccatgaaggtctccgcggcagccctcgctgtcatcctcattgctactgccctctgcgctcctgcatctgcctccccatattcctcggacaccacaccctgctgctttgcctacattgcccgcccactgccccgtgcccacatcaaggagtatttctacaccagtggcaagtgctccaacccagcagtcgtccacaggtcaaggatgccaaagagagagggacagcaagtctggcaggatttcctgtatgactcccggctgaacaagggcaagctttgtcacccgaaagaaccgccaagtgtgtgccaacccagagaagaaatgggttcgggagtacatcaactctttggagatgagctaggatggagagtccttgaacctgaacttacacaaatttgcctgtttctgcttgctcttgtcctagcttgggaggcttcccctcactatcctaccccacccgctccttgaagggcccagattctaccacacagcagcagttacaaaaaccttccccaggctggacgtggtggctcacgcctgtaatcccagcactttgggaggccaaggtgggtggatcacttgaggtcaggagttcgagaccagcctggccaacatgatgaaaccccatctctactaaaaatacaaaaaattagccgggcgtggtagcgggcgcctgtagtcccagctactcgggaggctgaggcaggagaatggcgtgaacccgggaggcggagcttgcagtgagccgagatcgcgccactgcactccagcctgggcgacagagcgagactccgtctcaaaaaaaaaaaaaaaaaaactcgagggggggcccggtacccaattcgccctatagtgagtcgtattacaattcactggccgtcgttttacaacgtcgtgactgggaaaaccctggcgttacccaacttaatcgccttgcagcacatccccctttcgccagctggcgtaatagcgaagaggcccgcaccgatcgcccttcccaacagttgcgcagcctgaatggcgaatggcaaattgtaagcgttaatattttggtaaaattcgcgttaaatttttggtaaatcagctcattttttaaccaataggccgaaatcggcaaaatcccttataaatcaaaagaatagaccgagatagggttgagtggtggtccagtttggaacaagagtcactattaaagaacggggactccaamgtcaaagggccgaaaaaccggctatcaaggcgaagggcccactacgngaaccatnccctaatcaagttttttggggncnang

SEQ ID NO: 912 - DNA, 1287 bp, Homo sapiens
aattcggcacgagcagcgacgcgactctggtgcgggccgtcttcttccccccgagctgggcgtgcgcggccgcaatgaactgggagctgctgctgtggctgctggtgctgtgcgcgctgctcctgctcttggtgcagctgctgcgcttcctgagggctgacggcgacctgacgctactatgggccgagtggcagggacgacgcccagaatgggagctgactgatatggtggtgtgggtgactggagcctcgagtggaattggtgaggagctggcttaccagttgtctaaactaggagtttctcttgtgctgtcagccagaagagtgcatgagctggaaagggtgaaaagaagatgcctagagaatggcaatttaaaagaaaaagatatacttgttttgccccttgacctgaccgacactggttcccatgaagcggctaccaaagctgttctccaggagtttggtagaatcgacattctggtcaacaatggtggaatgtcccagcgttctctgtgcatggataccagcttggatgtctacagaaagctaatagagcttaactacttagggacggtgtccttgacaaaatgtgttctgcctcacatgatcgagaggaagcaaggaaagattgttactgtgaatagcatcctgggtatcatatctgtacctctttccattggatactgtgctagcaagcatgctctccggggtttttttaatggccttcgaacagaacttgccacatacccaggtataatagtttctaacatttgcccaggacctgtgcaatcaaatattgtggagaattccctagctggagaagtcacaaagactataggcaataatggagaccagtcccacaagatgacaaccagtcgttgtgtgcggctgatgttaatcagcatggccaatgatttgaaagaagtttggatctcagaacaacctttcttgttagtaacatatttgtggcaatacatgccaacctgggcctggtggataaccaacaagatggggaagaaaaggattgagaactttaagagtggtgtggatgcagactcttcttattttaaaatctttaagacaaaacatgactgaaaagagcacctgtacttttcaagccactggagggagaaatggaaaacatgaaaacagcaatcttcttatgcttctgaataatcaaagactaatttgtgattttactttttaatagatatgactttgcttccaacatggaatgaaataaaaaataaataataaaagattgccatgaaaaaaaaaaaaaaaaaaa

SEQ ID NO: 913 - DNA, 1461 bp, Homo sapiens
  misc_feature (1447)..(1447): n equals a,t,g, or c
  misc_feature (1450)..(1450): n equals a,t,g, or c
  misc_feature (1459)..(1459): n equals a,t,g, or c
ccgcccaaggaccgcgagtggggccgcgagtgctgagcccggcgcgcccgagccgctcctcctcccggcctgctccctgggcggagccggggcagtgcggctctgggctggccgaaggggtggcgctgcgatcccgcagggcagcgacgcgactctggtgcgggccgtcttcttccccccgagctgggcgtgcgcggccgcaatgaactgggagctgctgctgtggctgctggtgctgtgcgcgctgctcctgctcttggtgcagctgctgcgcttcctgagggctgacggcgacctgacgctactatgggccgagtggcagggacgacgcccagaatgggagctgactgatatggtggtgtgggtgactggagcctcgagtggaattggtgaggagctggcttaccagttgtctaaactaggagtttctcttgtgctgtcagccagaagagtgcatgagctggaaagggtgaaaagaagatgcctagagaatggcaatttaaaagaaaaagatatacttgttttgccccttgacctgaccgacactggttcccatgaagcggctaccaaagctgttctccaggagtttggtagaatcgacattctggtcaacaatggtggaatgtcccagcgttctctgtgcatggataccagcttggatgtctacagaaagctaatagagcttaactacttagggacggtgtccttgacaaaatgtgttctgcctcacatgatcgagaggaagcaaggaaagattgttactgtgaatagcatcctgggtatcatatctgtacctctttccattggatactgtgctagcaagcatgctctccggggtttttttaatggccttcgaacagaacttgccacatacccaggtataatagtttctaacatttgcccaggacctgtgcaatcaaatattgtggagaattccctagctggagaagtcacaaagactataggcaataatggagaccagtcccacaagatgacaaccagtcgttgtgtgcggctgatgttaatcagcatggccaatgatttgaaagaagtttggatctcagaacaacctttcttgttagtaacatatttgtggcaatacatgccaacctgggcctggtggataaccaacaagatggggaagaaaaggattgagaactttaagagtggtgtggatgcagactcttcttattttaaaatctttaagacaaaacatgactgaaaagagcacctgtacttttcaagccactggagggagaaatggaaaacatgaaaacagcaatcttcttatgcttctgaataatcaaagactaatttgtgattttactttttaatagatatgactttgcttccaacatggaatgaaataaaaaataaataataaaagattgccatgaatcttgcaaaaaaaaaaaaaaaagggcggccctcscgatccccctttggngantccttttanaa

SEQ ID NO: 914 - DNA, 738 bp, Homo sapiens
agaaggaaaactaggaagcctgggttcacacccggcyccccagcaatgtctccaccactgctgctgctacccttgctgctgctgctgcctctgctgaatgtggagcctgctggggccacactgatccggatccctcttcgtcaagtccaccctggacgcaggaccctgaacctactgaggggatggggaaaaccagcagagctccccaagttgggggccccatcccctggggacaagcctgcctcggtacctctctccaaattcctggatgcccagtattttggggaaattgggctgggaacgcctccacaaaacttcactgttgcctttgacactggctcctccaatctctgggtcccgtccaggagatgccacttcttcagtgtgccctgctgtgagcttctatgtgggagaataaggctgaatgggggtgaagggagaaggcggggctgggcctcagcttcccaaaggtttttgaggaactgttcttttctgacaccctcaaaggtcagaaggttaaaggggcagaaggcattcggaaagctcccctcccacagtgacacctctctgacttctgacctagggttccaccaccgcttcaatcccaatgcctccagctccttcaagcccagtgggaccaagtttgccattcagtatggaactgggcgggtagatggaatcctgagtgaggacaagctgactgtgagtggcctttgactccaggaagcctcgagcctg

SEQ ID NO: 915 - DNA, 1348 bp, Homo sapiens
ggcagaggaacattctttgtcccttttggacttggagcaaaaactaaaagaaatcagaaatctcgttgagcagcataagtcttcttcttggattaataaagatggatccaaacctttattatgccattatatgatgccagatgaagaaactccattagcagtgcaggcctgtggactttctcctcgagacattaccactattaaacttctcaatgaaactagagacatgttggaaagcccagattttagtacagttttgaatacctgtttaaaccgaggttttagtagacttctagacaatatggctgagttctttcgacctactgaacaggacctgcaacatggtaactctatgaatagtctttccagtgtcagcctgcctttagctaagataattccaatagtaaacggacagatccattcagtttgcagtgaaacacctagtcattttgttcaggatctgttgacaatggagcaagtgaaagactttgctgctaatgtgtatgaagcttttagtacccctcagcaactggagaaatgatttttccttcaagaaaaactacagtgggattcatttactttttaaaatacactgggtaaatcacctatacttagagtaacagtttgttatcaaaatgcctgataaaatatattcttaataaaagtcttcatttcataatgaaatcaatttatttggcatcttaatatatttttttagattcatcaacagaccagtttttgtgggcatatatatatacacgtgcaaatatcagaattgttaataatttgttacacatggacatttgttccaaactgactaaaaatcaatatagatattttatatacatatatatatatataaatacaaaattcagtgtactttaccatattaatactgaggaaaaatctgttggagacataggtctaggatgtgtgaagtttggaaaaatatgctatttaattataatgttccctagactgctgtaaacagaagtgaatcagacttttctccagctacctttcaaaataataaattatttgtctcaaatataccttgatggaggacttttttattcttatggaaatagtgaattccaacaactatgatgaactatgttctttgctatttcttcactatattttttaaggttttattaaaaagccttagaaagttacatattggtttagaggctaaaattgtgttgatgctgtttactcacctaattacatagttttaatcatttgtacataattttaaaaacttactttgtattgattttgaatacagtgaaaatcttattgcaataaactattttagtaaaataaaaaaaaaaaaaaaaaaactcga

SEQ ID NO: 916 - DNA, 1465 bp, Homo sapiens
cagggcgagggatcagtctcgaggctgccggttcccctggccctcagggatggagccaagaacaagaggaaagtatggggaaggagccaagcaggagacgttcacctttgccttaactttggtcttcattcaatgtgtgatcaatgctgtgtttgccaagatcttgatccagttttttgacactgccagggtggatcgtacccggagctggctctatgctgcctgttctatctcctatctgggtgccatggtctccagcaattcagcactacagtttgtcaactacccaactcaggtccttggtaaatcctgcaagccaatcccagtcatgctccttggggtgaccctcttgaagaagaagtacccgttggccaagtacctgtgtgtgctgttaattgtggctggagtggcccttttcatgtacaaacccaagaaagttgttgggatagaagaacacacagtcggctatggagagctactcttgctattatcgctgaccctggatggactgactggtgtttcccaggaccacatgcgggctcattaccaaacaggctccaaccacatgatgctgaacatcaacctttggtcgacattgctgctgggaatgggaatcctgttcactggggagctctgggagttcttgagctttgctgaaaggtaccctgccatcatctataacatcctgctctttgggctgaccagtgccctgggtcagagcttcatctttatgacggttgtgtattttggtcccctgacctgctccatcatcactacaactcgaaagttcttcacaattttggcctctgtgatcctcttcgccaatcccatcagccccatgcagtgggtgggcactgtgcttgtgttcctgggtcttggtcttgatgccaagtttgggaaaggagctaagaagacatcccactaggaagagagagactacctccacatcaagaatatttaagttattatctcaaacagtgacatctcttgggaaaatggacttaataggaatatgggactgagttccagtcttttttaataaaataaaatcaagcaaaatcacatattctaaaaaatgcacttggattttaacaagacagagtggtggtttttgttcttcatgccctggagcagtctatggtaaatmaaagagggagggaagaggcagagctggatgttcattacccaggctgctcctctcacgggtgtggttagcatggttgagtgggcgattcctccaagaacctgaggattatagggaggaactctgtgagatcgcagaattgtgctaatggcttctgttccgatgggtgaggcttgtcccgttagagctggtcccattagaggacgggtggctgtccattagagccagagaatgtaaaagtcacttcctctcctaaagctcctgtgggcaaatatttcattaaaaaaacaaagttgtgttctgtaaaaaaaaaaaaaaaaa

SEQ ID NO: 917 - DNA, 1054 bp, Homo sapiens
  misc_feature (412)..(412): n equals a,t,g, or c
  misc_feature (676)..(676): n equals a,t,g, or c
  misc_feature (927)..(927): n equals a,t,g, or c
gtttacaactgctatattttcctacagaatggcacttttatttatttgtttgtttgtttgtttgttttttgagacggggtctcgctctgtcgcccaggctggagtgcagtggggccacgttggctcactgcaacttccatctcatgggttcgagcagttctcctgcctcagccttctgggtagctgggattgcggacgcccactaccacgcccggctaatttttttgtatttttagtagagacagggtttcaccacgttggccaggctggtctcgaactcctgacctcaggtgatccacccgcctcggcctcccaaagtgctgggattacaggtgtgagccaccgcgcctggccagaatggcactttcaggatcatataakgtatctattcatctctggtaatattccttgntcggatatctattttayctgatactaacatctccgccccagctttcttttaatagttcagaatataactatttctgtcccttaccttcaatccacttatgtttttatgytatttttytttcttttgtagacagcatagagttggatcttgyttttatatctacccaacctaaaaatctggatatttttattgggaagttgaatttaaatctaccaccttgacatttattttgtatttgtctcgtctgttctttttaaataattnttccttttttcttccttctattggatcaagtacttttttttaaagtgaaagccaatttattaagaaagtgaaggaataaaagaatggctactccataggcagagctgctgagtattttttattatttcattttatcttcactattgccttgttatacctcttagtgtagctgttcatggttgcagtagggcttatgataaagttacagctgtagcttctcagtctgccattacacaatattctaccacttnacatacatgtagtaacctgacagcaaggtctgtacttcctccctcccatacttggtactgttgttaccacagatttgcttctgcatgttacaaaccccacaatacacttttcccgtctttgcaaaaa

SEQ ID NO: 918 - DNA, 778 bp, Homo sapiens
ggcacgagccgaggaagagcgttttggggacgggggctggtgaggctcacgttggagggcttcgcgtctgcttcggagaccgtaaggatattgatgaccatgagatccctgctcagaacccccttcctgtgtggcctgctctgggccttttgtgccccaggcgccagggctgaggagcctgcagccagcttctcccaacccggcagcatgggcctggataagaacacagtgcacgaccaagagcatatcatggagcatctagaaggtgtcatcaacaaaccagaggcggagatgtcgccacaagaattgcagctccattacttcaaaatgcatgattatgatggcaataatttgcttgatggcttagaactctccacagccatcactcatgtccataaggaggaagggagtgaacaggcaccactaatgagtgaagatgaactgattaacataatagatggtgttttgagagatgatgacaagaacaatgatggatacattgactatgctgaatttgcaaaatcactgcagtagatggtatttggccatctcctggttatatacaaatgtgacccgtgataatgtgattgaacactttagtaatgcaaaataactcatttccaactactgctgcagcattttggtaaaaacctgtagcgattcgttacactggggtgagaagagataagagaaatgaaagagaagagaaatgggacatctaatagtccctaagtgctattaaataccttattggacaaggaaaaaaaaaaaaaaaaaa

SEQ ID NO: 919 - DNA, 873 bp, Homo sapiens
  misc_feature (847)..(847): n equals a,t,g, or c
ggaatgatgaacattcagacatccgataaatattattgaatggtgcacaaatgaatgctgttattcaagttgaggttcttatcacttagcacctaatgggctccaccatcttctttgctggcttccaatccttacccccatgctgtttgtaaaaccaccctttcaaaagaaatttatgctgctgcttcccttattaataaccagttgtgactctcattggcctaatcaaatttctgttggtctccttggcattcaaagccttccataaaccagccttatcatatttattcaaccataaaccttaacagatatacctattttacttaaactggttgtttatactttagacctgttaaaagacaatccttaaccaaattaaatataactcagtttaattgagcaaatctggcggcttcttgaacccgagtagtctgagagagactccattgcagccacgtgctggaagatttatggacagaaaaaggaaagtgacgtacagaaaacaaaatagaggtacagaaacagctggattggktacagctccgcatttgccttatttgaacgtagtttgaacagttggccccctttggccaaaactcagtgattgtcacaagagcagattacagtctgsttacacatccttttagawtatagttcacactgtgkatgagaaacctttaggctgaatttaaaatatgtaaggaggcagytttagggtaaacttgatttaacagaccaaaccttatccccatccctaatatcatgttcagttttactttcttacctttattaatgctttattccctcatctgtaatgcttatattccttgctttttcaaatgttggngattcttgctctccactcaaattctt

SEQ ID NO: 920 - DNA, 1043 bp, Homo sapiens
ggggaagcttcgcaggctgtgcacggagcagtgagatcactggcgttataaatatcccggtgccagcgcggagatccgtcgggtggcctctctcttcccctctccccttctcttccccgaggctatgtccacccggtgcggcgaggcgggcagcgccagaggcacgcagccgcacaggggctacagagcccagaatcagccctacaagatgcacttaggacccccgcggctggaagaatgagcttgtccttcctcctcctcctcttcttcagccacctgatcctcagcgcctgggctcacggggagaagcgtctcgcccccaaagggcaacccggacccgctgccactgataggaaccctagaggctccagcagcagacagagcagcagtagcgctatgtcttcctcttctgcctcctcctcccccgcagcttctctgggcagccaaggaagtggcttggagcagagcagtttccagtggagcccctcggggcgccggaccggcagcctctactgcagagtgggcatcggtttccatctgcagatctacccggatggcaaagtcaatggatcccacgaagccaatatgttaagtgttttggaaatatttgctgtgtctcaggggattgtaggaatacgaggagttttcagcaacaaatttttagcgatgtcaaaaaaaggaaaactccatgcaagtgccaagttcacagatgactgcaagttcagggagcgttttcaagaaaatagctataatacctatgcctcagcaatacatagaactgaaaaaacagggcgggagtggtatgtggccctgaataaaagaggaaaagccaaacragggtgcagcccccgggttaaaccccagcatatctctacccattttctgccaagatttcaagcagtcggagcagccagaactttcttttcacggttactgttcctgaaaaggaaaagccacctagccctatcaagccaaagattcccctttctgcacctcggaaaaataccaactcagtgaaatacagactcaagtttcgctctgcc

SEQ ID NO: 921 - DNA, 1793 bp, Homo sapiens
gttaatacagctatattttggcaaatctcagcagtattgcttaatattattccgggagataaaatcttagagaaagaccagattctctagaccccatcaaaattccaaacaccaagtttagagtgcaaaacatctgaagagaaactcaaatccaggcagatcttaccagagtcctgaaatttgtagagacaattcacaagaagtggctgaatctcacatatatttgaaaaggtccccctggtccttgtgaaaaactccggtgttcctggtaaccacatagtgtataaagcccctcattgcactagtgacaatcctgtaacccagaagcaaaggagagaattgtctttgtgttcatttgggggagacggttgctatggagatggatgatatcataactccattgtgaaccagtaagaacactctcgtgagtctaacggtcttccggatgaaggctatttgaagtcgccataacctggtcagaagtgtgcctgtcggcggggagagaggcaatatcaaggttttaaatctcggagaaatggctttcgtttgcttggctatcggatgcttatatacctttctgataagcacaacatttggctgtacttcatcttcagacaccgagataaaagttaaccctcctcaggattttgagatagtggatcccggatacttaggttatctctatttgcaatggcaacccccactgtctctggatcattttaaggaatgcacagtggaatatgaactaaaataccgaaacattggtagtgaaacatggaagaccatcattactaagaatctacattacaaagatgggtttgatcttaacaagggcattgaagcgaagatacacacgcttttaccatggcaatgcacaaatggatcagaagttcaaagttcctgggcagaaactacttattggatatcaccacaaggaattccagaaactaaagttcaggatatggattgcgtatattacaattggcaatatttactctgttcttggaaacctggcataggtgtacttcttgataccaattacaacttgttttactggtatgagggcttggatcatgcattacagtgtgttgattacatcaaggctgatggacaaaatataggatgcagatttccctatttggaggcatcagactataaagatttctatatttgtgttaatggatcatcagagaacaagcctatcagatccagttatttcacttttcagcttcaaaatatagttaaacctttgccgccagtctatcttacttttactcgggagagttcatgtgaaattaagctgaaatggagcatacctttgggacctattccagcaaggtgttttgattatgaaattgagatcagagaagatgatactaccttggtgactgctacagttgaaaatgaaacatacaccttgaaaacaacaaatgaaacccgacaattatgctttgtagtaagaagcaaagtgaatatttattgctcagatgacggaatttggagtgagtggagtgataaacaatgctgggaaggtgaagacctatcgaagaaaactttgctacgtttctggctaccatttggtttcatcttaatattagttatatttgtaaccggtctgcttttgcgtaagccaaacacctacccaaaaatgattccagaatttttctgtgatacatgaagactttccatatcaagagacatggtattgactcaacagtttccagtcatggccaaatgttcaatatgagtctcaataaactgaatttttcttgcgaaaaaaaaaaaaaaaaaaa

SEQ ID NO: 922 - DNA, 1252 bp, Homo sapiens
  misc_feature (243)..(243): n equals a,t,g, or c
gagaagaagtactactccaaaaactttggtaaagtgcttattcttccctagcagtaggctgttgctgagttgtagactggtggttttatgaaaaaaaaacaggttggggaggtgtgaagatggaaatgagggctgtgttatgtatatctggtatctacttctgttccaggtgcttaattcaccctcatactgatgtttaaagttagaggattcttgtccatttgtcttgtcttctgttggcanggtcacatgcaggtaataggctatgggaaggggaagatgcctagattacttctaggctggtctccaagccccaagttcaagcctcctgagtagctgagactacaggcacacaccatcgttctcaacttttcttttttaacataggctagctagctcccaccttagccttctagacccctccattataattcttattcaattgccttggcctcccaaagtgctggaattacaggtgtgagccactgcacccagctattttttctatatttttatgtagttcattgagggtaataattttatcctacaacaaacatgtaagttattgaagaatattggagttttatgataatgctgtcataaatataaaaggtagggtaagagggatccaaatagagctcacttatattgtcactgataggcagtcacgctgtgctgatagaatgtggcctgacacttgatggagtgcagcatatgtatacttgggcaatttgagcagatatatacggtcccgagtttaaagaagagaacaaacaccagtgcacagctatagtattcctaatataggatgcattttaaagaatttcacattctacaaatggagagagatggcaggagaagccttattttaagtcctgcactaaggcaggttaacctcatgggtgtaattacctggacctttttgtaaggacaaaatatttaatcattaaaaggccctctgtagggtttgaaatatctatattttatatatgaatgcttcttttattaatatttatggtaagatattttatactgctgataaacggacattaatgatatatagcctattgtttgaaaaaagcattttggattatagcccaaaactggaaataaccaacagataaataaatggtggtatattcatacaataaaatactactcagataaaaaagatgaacttaatctcataaacattatgggcaacatagtgagaacccatctcttttaaaaaaaaaaaaaaaaaaaactcgta

SEQ ID NO: 923 - DNA, 1500 bp, Homo sapiens
cacgagcttttctctccatggatctttgctcatgctagtgtgcagtctggaatttgtgtctttccttctccagctttggttttctcttttagcaaagctcatttctaatatttcttcttccacaaagtcatctctgacccccagagtgtttaatctctcctttctctgtacttaaagcaatgtctgtgtattatttctatcatatgttttttttttttttttgttttgttttgtttttgagacagagtctcgctctgtcgcccaggctggagtgcagtggcgcgatctcggctcactgcaagctccgcctcccgggttcacgccattctcctgcctcagcctcccgagtagctgggactacaggcgcccgctaccacgcccggctaattttttgtatttttggtggagacggggtttcaccgtgttggtcaggatggtctcgatctcctgacctcgtgatccgcccgcctcggtctcccaaagtgctgggattacaggcgtgagccaccgcgcccggtctatcatatgttttacctctagatatttgtgtctaaattataattgcattcagttaattctaaagggaaaaataaatttttactttacacaaaggctagcggctagcacagtgctttatggattgtagacattcagatatgtggtaagtattaagcaaaatctacctggagtgaaagtgattgttgtaggaggaggtagtagaagtagttacaagctttatcgtagcagacgtttctgactctcttcctgaatgttattttttctgaacctggatatttaagtgtgaagattatacaaatctgaagtgtggcagtgttcttatattgatgtagaagactaggttgactgatcctggacctacaagcttcattttaacttcctacattttggctttgagggttaacaggacatttataatcacatatctcttttcagagtattttacatttgcaaatattatcatgaactttgtgtccttttaaccagagaggaattgtggaatcacaggaattagatgatgtgttaaagaagagagataactatcagctgatttaatttgaacccaacaagtatctaataatatgcatactctgtgttcaaataaacctctaagctagactttcaagcttatcaaaatgctagactattttccagtgtttagaaaataccagccaggtgtggtggcttatgcctgtaatcccagcactttgggaggctgaggcgggtgaatcacaaggtcaggagatggagaccatcctggccaacatggtgaagctttgtctctactagaatacagaaaattagccaggcgtggtggcacgggcatggtggccacccgcctgtagtcccagctacccaggaggctgagcaggggaattgcttgaacccgggaggcacaggttgcagtgagccgagattgcatcactgcattctagcctggcaacagagcaagacatcgtctaaaaaaaaaaaaaaaaaaaa

SEQ ID NO: 924 - DNA, 662 bp, Homo sapiens
ggtcagggggtagcaccattccccttgttctcttgtccttgtcatgagccgctgatcaggaaacatcccaggtaccctcatgtcaggccctgctggacgccatgatattggggccagagttgtattaacatcctcattaaacccagttaaatgacataaatggatgagcactggggaggtgactttttatgcctgctcttatcatctttatttttgctactagttgccttccccaattgattatagcttttccctcatgctctttctttttttgcagcctggatatatattttttcagacagatacatatttatttattaaagatgcttattgaattgcattaaaatgttatttaggctgggcacggtgcttacgcctgtaattccagcactttgggaggccgatgcaggtggatcacctgaggtcaggagctcgagaccagcctggccaacatggtgaaaacccgtctctactaaaaatataaaaactagctgggtgtggtggtgggcgcctgtaattccagctactcgggaggctgaggcaggagaattgcttgaacccgggagacgaaggttgcagtgtcccgacacagtgctactgcactccagcctccatgacaaagtgagactccgtctcaaaaaaaaaaaaaaaaaaaactcgta

SEQ ID NO: 925 - DNA, 1275 bp, Homo sapiens
ggcacgagcaagtatgaaagcttcaagacacattcatgagagttccacctttgcactaaagggtggttacagggcctgttctgtttgggtttggtagggacagggcagtgcagtccatactaccaatattgtagcagaaactgctgttgtctgtggcaggggagggcacctgaggacaggaaagaagaaatgtgtctccatggaacagtgcattgttcctaaatgtctgttattaagaacagaaatgggtggactttttttgcaagtcttgattcttctgcctgtgggtgtggtggcagcaggtaaacaggttctgttgacattttaaaaggcatagtctcaagatgcaggtgtgatttgtttggagcatgtcatctgagcaggaattttacagaaattggaaaaagaagaataaatggcgatttttcagctaatcatgtcccagatcaagagctgtgtccactctgcctcctggactgtcatgcatttagtacttgcaagcctttacttctctacttgtatttttcctccctaatgagtttaactactttttaaaattcttatgatagtcaagggtctctgaaaaatatttccttcctacataccagatctttctctacattctctacatcatagctttttatgtgccatgcagaattctcaccgattataaattaatctgcaatattaaaaatgttctcttgtggctgtgaaacaggaggtgtggatactcaaggtttctattagggaaaggtgggggtcctcagtaaagatggagaacatgtaatgttgaggttccatctgtgttctccattggctttatgcagaacaggattttcaaaatgcttatttaaacaggatggcatttatcacccagaaagttctaaaaaataatatatattaggaggtacctgttctctagagtgctaaaaaaagactactttaaatcactactaaaaattatagaacacttgactgggtgcagtggctcacacctgtaatcttaacactttgggaggccgtggtgggtggataacttgaggtcaggagttcaaaacctgtctgaccaacatggtgaaaccccatctctactaaaaatacaaaaattagccgggcgtggtggcaggtgcctgtaatcctagctactgtggaggctgaggcaggagaatcgcttgaacccaggaggtggaggttgcagtgagccgaaattgtgccattccactccagcctgggggacagagtgagactccgtctcaaaaaaaaaaaaaaaaaaaa

SEQ ID NO: 926 - DNA, 613 bp, Homo sapiens
  misc_feature (11)..(11): n equals a,t,g, or c
  misc_feature (26)..(26): n equals a,t,g, or c
  misc_feature (67)..(67): n equals a,t,g, or c
  misc_feature (87)..(87): n equals a,t,g, or c
acccttgaagntttaccattcctggnacaaaataccttggaaaccaagttggcagacattgaacatntgccggccgcaacgcagggntctgttgccagttaaatgggcycctgtatgtggttggaggggatgatggatcctgcaacttggcttcggtggagtactacaatcctgtcactgacaaatggacgctgcttccaacgaacatgagccacggggcggagctatgcaggtgttgccgtgattcacaagtccttgtgacccaaactcctactgccaggaggtggaggaaggagcaggtgctgcctgtgactctgaacagcaggaccttggtgactggattcaacttgcttgggagggtctgtgctgctgtgagaaccgctctcctctgacttggcagactggtgttgttcatcgcagtgtggacaccattacccacccccgttcccctgaggtgctctggcctatgccctgagcaaggggggtcttgacatccccaggcagcacctttgggctttgttttggtgtttctacagggacaatacagaccctggagtgtgaaaaaaaaaaaaaaaaaaaaaaaaaaaaaaaaaaaaaaaaaaaaaaactcgta

SEQ ID NO: 927 - DNA, 1177 bp, Homo sapiens
tctgagaaaggttccactgaggcaatgaaactagctagttcttaaaagtagggtggcatatagtaagagtaaaacagagtttctaggcatggggaagggcaaatatgtaattctcagctgaggctgtatcttttaaaatgttttgaaaatacctttgtacagaaagcaacactggccacacctaagaaagcgatgcttccactccccctccttgccctcacttctctttcccctctcacacagtccctttctctcaaagccattccccatgtctccacctcaatggcctgtggtagtttagagcaggggtccccaacccctgggccatggaccactaccgtggcctgttaggaacctggcccacagccagaggtaagtgacaggcgagctctgcctcctttgatgtaagcagtggcattagattctcataggagcacaaaccctactgtgaactgcacatgtgagggatctaggttgcatgctccttatgagaatctaaatataaatgtgatgcacttgattcatccagaaaccatcccctccatccccatccatggaaaaattgtctttcatgaaaccagtccctggtgccagaaaggttagggaccactggcttacaggagaaatgaatggttgagatatcatggatgggagtagcctgcacttgtaaatagtgtagaggcagaaaaaaaggttgggaaaaccttgaactagatagagatcaggagaagccagcattgtttatgttactcttctgcttaaaggccaattttagatatttccttggggattttagttatttcctgtgcctttgcaggttctaaaatgattcttttcagacttagagtcaaagtagctaaagaatattaaattctggctggttgcagtggctcaggcctgtaatcccagcaacgggaggccgaggtgggcagatcacgaggtcaagagatcgagaccatctggcaaacatggtgaaaccctgtctctactaaaaatacaaaaaattagctggatgtgctggtacgtgcctgtagtcccagctacttgggaggctgaggcaggaggattgcttgaatccgagaggcagaggttgtagtgagctgagattccatgccactgcactccagcctggcgacagagtgagattctgtctcaaaaaaaaaaaaaaaaaaaaaaa

SEQ ID NO: 928 - DNA, 2225 bp, Homo sapiens
gctggcagaacgaaraggatggggacagtatttattcaaaaacaaacctcctgacgggaatgctcctcccaactctttttatagagcactttatcctaaaattatacaagacattgagacaatagaatctaattggagatgtggaagacatagtttacagagaattcactgccgaagtgaaacaagcaaaggagtttactgtttacagtatgatgatcagaaaatagtaagcggccttcgagacaacacaatcaagatctgggataaaaacacattggaatgcaagcgaattctcacaggccatacaggttcagtcctctgtctccagtatgatgagagagtgatcataacaggatcatcggattccacggtcagagtgtgggatgtaaatacaggtgaaatgctaaacacgttgattcaccattgtgaagcagttctgcacttgcgtttcaataatggcatgatggtgacctgctccaaagatcgttccattgctgtatgggatatggcctccccaactgacattaccctccggagggtgctggtcggacaccgagctgctgtcaatgttgtagactttgatgacaagtacattgtttctgcatctggggatagaactataaaggtatggaacacaagtacttgtgaatttgtaaggaccttaaatggacacaaacgaggcattgcctgtttgcagtacagggacaggctggtagtgagtggctcatctgacaacactatcagattatgggacatagaatgtggtgcatgtttacgagtgttagaaggccatgaggaattggtgcgttgtattcgatttgataacaagaggatagtcagtggggcctatgatggaaaaattaaagtgtgggatcttgtggctgctttggacccccgtgctcctgcagggacactctgtctacggacccttgtggagcattccggaagagtttttcgactacagtttgatgaattccagattgtcagtagttcacatgatgacacaatcctcatctgggacttcctaaatgatccagctgcccaagctgaacccccccgttccccttctcgaacatacacctacatctccagataaataaccatacactgacctcatacttgcccaggacccattaaagttgcggtatttaacgtatctgccaataccaggatgagcaacaacagtaacaatcaaactactgcccagtttccctggactagccgaggagcagggctttgagactcctgttgggacacagttggtctgcagtcggcccaggacggtctactcagcacaactgactgcttcagtgctgctatcagaagatgtcttctatcttttgtgaatgattggaacttttaaacctcccctcctctcctcctttcacctctgcacctagttttttcccattggttccagacaaaggtgacttataaatatatttagtgttttgccagaatctctcttgctttgccattaagcagaagaactagtttccctgtatagcctgctgggagagacccacttctagggtatgggggatgcagcttcaagcccagtgcccagtgtctccctgttaactgcaggaatgccaagcacctggccagagcagcccagccccaatatgcttaggaggagacagagttccctctgtatagcctctgggacaagaaaaagaaaacacaagaatgtatacactggaagatttgggcctcctgcctgccttctctttgtttctgttcctcttcccatctactcccctacgccccttcaaccttttttctctgtctgcttcacctgagaagaaagtgtaygaagagagtgtcctcctctcrcatgagccagatcagccagaaaatgcaacacttggaagagttaaatgctgttcagtgaagatttcagccccaggcctttgctgcaagtgaccctgtggcaacagtggattctcagacatgatactctcatcatatttgcaactcttctctctctttcttccccacacccaagaggaggattggtggtagggggcaggcagagggggtggggagaagtttcctgggctccatcaatggctgcatcttttctggactcagcagtctccttgattccatgtagagtgtggaaaggagttgctgattgcatttcctctcattaacaattgggtgtgtaataaaaagcattgtacttcatcttaaaaaaaaaaaaaaaaaactcgagggggtcc

SEQ ID NO: 929 - DNA, 1035 bp, Homo sapiens
ggcacgagctcggcctcccaaagtgttgggattataggcctgagccactgcacccagcccttgtttttttatttttaagctttgccaacatctgagttccccgacaatcgtgttcttaattcttgttaatatgttattagagttagaaaggattccttcttatattgcagataaaagaaggaaatgtgtagaaggtttttttttcttttttttctttttttgcccttttttttgtgcctcaaatctgaaggccttttatgtatagattgtactaggacctgcagatctagtgtctttactcatcataggtaacaattggatttagcgagaaaatataggtatttctgtttttgagtttcgttaacagcaaattgtttagatgggattaaaggcccaaaatgtactctagttatctttgtggaacccatggatgaacacctatatatatagagagagagtgtgtgtgtgtatgtatatgtatgtacgtgtgtatactcaccgttggactcaaactcaggtaattctactgcctcagcttcttgagtaggggggattacaagtgtgtgccactgtgcctagtttatgttgtgttttagtggtgttaaatcttgtgtaccagtcagaataattgttttagttggaggagctaagttgaaataagtatttggttatcataagttacagttcataagcactttaaaaataaccccttttcttcaattaactatatattggcttggtgtgttggctcacacctgtaattctaacactttgagaggccaaggtgggtggattgcttgagcttaggagtttgaaacccccctgggcaacatggcaaaacttcgtcttaccaaaaatacaaaaattacctgggcatggtggtatgtgcctctggtcccagccactcaggaggctgaggtgggtggattgcttgagtccgtgaggtggaggctgcagtgagtggagatcgcaccactccactccagcctgggtgacagagtgagatcttgcctcaaaaaaaaaaaaaaaaaaaaa

SEQ ID NO: 930 - DNA, 1138 bp, Homo sapiens
gtctcacttctccaaggttgggttcarggggaggagagatgagagaaaggatacagcatcacatggtggttatggatctcatctggtgatgggtctctctggatgtgacaaatacacaaagccgcactttttctcatggggagcttttggagagcttctttggagaccctcacatagaatgttggaagatggcttttagccttttctctcactgtgatgccttcacacatcctcacacttcctgtctttaccctcttctggtcctttggctctattgggtggagttcctwacaaaatggctcttgggattcccccatgtagttcacttctggcttatgagaaacacccacattttcccaccatcaccagaaccgacacagcttgcttccaatacagtcccctctcttcacatggggctgcctgagatttttccaggtgggatctaggtagcattgcttatgcttgaaggactctctgttctccaaagcacccgtttcaggctctgtgacaccgaatggctctgtgacaccttctcctttggcttgtgctgagaggaaacctgtactttccttttcctgacccagttgcacagcccttagtcccttcttcctccacccaaaagatgagggtgccagataattccactcactctctatttggaggtttcctgtggattattgtaaatgtgcgctaaccaatttcataccctttattattttttaaataatgtaacaggtcaccttgggctgcagggacacttggcaaccatttttacagcttttaacttttggtgcccgggccgggtgtggtgtggtggctcatgcctgcaatcccagcactttgggaggccaaggcaggtggatcacctgaggtcaagagttcgagaccagcctggccaatatggtgaaaccccgtctctactaaaaatacaaaaaattagccaggcgtggtggcgggcacctgtaatccccactacttggaaggctgaggcaggagaatcccttgaaccagggaggtggaggttgcagtgagccgagatcatgccactgcactccagcctgggcaagaagagcaaaacttcatgtaaaaaaacaaaaaaaaaaaaaaaaaactcgagggggggcccggtacccaatcg

SEQ ID NO: 931 - DNA, 1090 bp, Homo sapiens
  misc_feature (1030)..(1030): n equals a,t,g, or c
  misc_feature (1062)..(1062): n equals a,t,g, or c
gcaccatcatagctcactgcagccttgaactcatgggctcaagaattaactctcaccccagcctgccaagtagctaggactgaaggcatacaccaccaaacccagctaattgttttttgttttttgttttytttgacagaatcttgctctgttgcccaggctggaatgcaatggtgcagtcttgcctcactgcagcctctgccttctgggttcaaactgttctcctgcctcagcctcccaagtagctgggattaccagcacctgccatcacacctggctaatttttgtatttttagtagagatgaggtttcaccatgttagccaggctgatcttgaactcctgagctcaggtgaaccgcccgccttggcctcccaaagtggtgggattacaggtgtgakccactgcamccggcccaaacctagctaatttaaaattttttaataaatataaaawttagctcatcttgaacttttggcctctagcagtcctcccacttcagcctccgaaagtgctgggattgcaagcgtgaaccaccatgaccagcttgggaccatgtcttaatcatttttgtacaacccagtttcaatcagaatgttgggcacatagtaggtgaactaattttagtgaatttcttaggcaaataggattttacaataaatctaatttccccccagaatatatttaccatatttatttgaattgaaataacaagcatgggaagaagtttattttgatatcagaacaggaccatagtgagagtctgattgaaacttccctttgatttgcccattgaaattgagtccaaatgagaggcatacctgccattaatagcttttattttattttaattttatttatttattttgagatggagtctcgctctgtcacccacgctggagtgcaatggcgtgatcttggctcactgcaacctccacctcccatgttcaagtgattctcctgcctcagctactctggaggctgaggtgggagaattgcttgaaccccagaggcccgagattgccccactgnacttcagcctcagcgacaaagtgagactctgnctttaaaaaaaaaaaaaaaaaactcgag

SEQ ID NO: 932 - DNA, 834 bp, Homo sapiens
ggcacgagtatccgtttctccagctatttgattactcggatcgtgtagacatgcccgagtacatgatggcacttctagttgcaatgttccactcaggctgtagagggattgccaagaaacaaatccgatttccaggatcttgtgacttaaacaagcgaggcagatggctcttgtgctccataaaaatgtgtgttttcatttggctcattactgtagaagcttccctcttgtttttttttttaagttgtctgagtcatagcttgaggacccatgccaactttgtttgaaagtgaagacaccatgaattttaagtatccagacaaaagattttttgttctacgctgaagttgattttgtttggtaagtgtaaggctttgctggccacttttatagctaacctgtaccttttccctttcttcttctcctgaaggttgcttcagttattaacatcaaccccaatacaactcactccacaggcagctgccgttctcacactgctctacttagactcaatagcagcaccattaagtatctagactttgtctttgctgtggtgagtaacagattttttaaagttaggttcattctcttagaaacacatctgaaagtctaaatagttgcatggggggaggggggtatttagctttattttccagttctacagtactcaattataaagtgtagtccattcatccctgttcatccctcagagtctgtgcaatggtctgtggactggactcttgcattaatgttcaccaagagtggccattttaccattagagagactctagggtagaagcaagaattaactcacatcaaaaaaaaaaaaaaaaa

SEQ ID NO: 933 - DNA, 3453 bp, Homo sapiens; identical to SEQ ID NO: 134

SEQ ID NO: 934 - DNA, 4303 bp, Homo sapiens
gccattgccgggcactcgcggcgctgctaacggcctggtcacatgctctccggagagctacgggagggcgctgggtaacctctatccgagccgcggccgcgaggaggagggaaaaggcgagcaaaaaggaagagtgggaggaggaggggaagcggcgaaggaggaagaggaggaggaggaagaggggagcacaaaggatccaggtctcccgacgggaggttaataccaagaaccatgtgtgccgagcggctgggccagttcatgaccctggctttggtgttggccacctttgacccggcgcgggggaccgacgccaccaacccacccgagggtccccaagacaggagctcccagcagaaaggccgcctgtccctgcagaatacagcggagatccagcactgtttggtcaacgctggcgatgtggggtgtggcgtgtttgaatgtttcgagaacaactcttgtgagattcggggcttacatgggatttgcatgacttttctgcacaacgctggaaaatttgatgcccagggcaagtcattcatcaaagacgccttgaaatgtaaggcccacgctctgcggcacaggttcggctgcataagccggaagtgcccggccatcagggaaatggtgtcccagttgcagcgggaatgctacctcaagcacgacctgtgcgcggctgcccaggagaacacccgggtgatagtggagatgatccatttcaaggacttgctgctgcacgaaccctacgtggacctcgtgaacttgctgctgacctgtggggaggaggtgaaggaggccatcacccacagcgtgcaggttcagtgtgagcagaactggggaagcctgtgctccatcttgagcttctgcacctcggccatccagaagcctcccacggcgccccccgagcgccagccccaggtggacagaaccaagctctccagggcccaccacggggaagcaggacatcacctcccagagcccagcagtagggagactggccgaggtgccaagggtgagcgaggtagcaagagccacccaaacgcccatgcccgaggcagagtcgggggccttggggctcagggaccttccggaagcagcgagtgggaagacgaacagtctgagtattctgatatccggaggtgaaatgaaaggcctggccacgaaatctttcctccacgccgtccattttcttatctatggacattccaaaacatttaccattagagaggggggatgtcacacgcaggattctgtggggactgtggacttcatcgaggtgtgtgttcgcggaacggacaggtgagatggagacccctggggccgtggggtctcaggggtgcctggtgaattctgcacttacacgtactcaagggagcgcgcccgcgttatcctcgtacctttgtcttctttccatctgtggagtcagtgggtgtcggccgctctgttgtgggggaggtgaaccagggaggggcagggcaaggcagggcccccagagctgggccacacagtgggtgctgggcctcgccccgaagcttctggtgcagcagcctctggtgctgtctccgcggaagtcagggcggctggattccaggacaggagtgaatgtaaaaataaatatcgcttagaatgcaggagaagggtggagaggaggcaggggccgagggggtgcttggtgccaaactgaaattcagtttcttgtgtggggccttgcggttcagagctcttggcgagggtggagggaggagtgtcatttctatgtgtaatttctgagccattgtactgtctgggctgggggggacactgtccaagggagtggcccctatgagtttatattttaaccactgcttcaaatctcgatttcactttttttatttatccagttatatctacatatctgtcatctaaataaatggctttcaaacaaagcaactgggtcattaaaaccagctcaaagggggtttaaaaaaaaaaaaccagcccatcctttgaggctgatttttcttttttttaagttctattttaaaagctatcaaacagcgacatagccatacatctgactgcctgacatggactcctgcccacttgggggaaaccttatacccagaggaaaatacacacctggggagtacatttgacaaatttcccttaggatttcgttatctcaccttgaccctcagccaagattggtaaagctgcgtcctggcgattccaggagacccagctggaaacctggcttctccatgtgaggggatgggaaaggaaagaagagaatgaagactacttagtaattcccatcaggaaatgctgaccttttacataaaatcaaggagactgctgaaaatctctaagggacaggattttccagatcctaattggaaatttagcaataaggagaggagtccaaggggacaaataaaggcagagagaagagacagaactaaaaatacgaggaaaggagagtgaggattttcattaaaagtctcagcagtgggtttcttgggttatttaaaacatcacctaaataggccttttcttcctaattggccatcaaattaaagcctatcctttctcaagcaggagctggtattgtagggagtggccgggtattctgggctgggctcttctggagtagggggtcagcaaacattgtctgcaaagggccagatactgaatccagtactttcagtttggcgagccgtgaggtctctgtcgaaactactcaactctgccgtcctagcacaaaagcagccatagacaacacacaaacgagagggcttggctcccttccaggaagatttatttaacaggctcccagctgaatttcactcacaggacacagtttactgatctctgttctagtgagtgggtcaaaaagcatatgcatccttatccgtcaactcatcagctcttcctcaaggcaacctgaggccagacaccaagaaaccaagcgtatctgctctaaaatgacttgttcctggggaatgccttcaaccaaaacacagctagtatttctatgccccaaatccaatcccagtctttcatgatccatgccggcggttgggtggggaggggaatcattggttgggggaagggaggaaaccccacctccagcccccgccaccgggctccctgggcacccagcaagatctggggctgcagagaacagaagagctggtgcacttaatccagctctgcccttggggggaggaggacctgtgtgtcaggctctgccatgggaacgagtgtaaaccgtggctgtctcctgcagtgagccaccgcggcaggcacgttgactgttttactgacatcactcaaaagctaaagcaataacattctcctgcgttgctgagtcagctgttcatttgtccgccagctcctggactggatgtgtgaaaggcatcacatttccattttcctccgtgtaaatgttttatgtgttcgcctactgatcccattcgttgcttctattgtaaatatttgtcatttgtatttattatctctgtgttttccccctaaggcataaaatggtttactgtgttcatttgaacccatttactgatctctgttgtatatttttcatgccactgctttgttttctcctcagaagtcgggtagatagcatttctatcccatccctcacgttattggaagcatgcaacagtatttattgctcagggtcttctgcttaaaactgaggaaggtccacattcctgcaagcattgattgagacatttgcacaatctaaaatgtaagcaaagtagtcattaaaaatacaccctctacttgggctttatactgcatacaaatttactcatgagccttcctttgaggaaggatgtggatctccaaataaagatttagtgtttattttgagctctgcatcttaacaagatgatctgaacacctctcctttgtatcaataaatagccctgttattctgaagtgagaggaccaagtatagtaaaatgctgacatctaaaactaaataaatagaaaacaccaggccagaactatagtcatactcacacaaagggagaaatttaaactcgaaccaagcaaaaggcttcacggaaatagcatggaaaaacaatgcttccagtggccacttcctaaggaggaacaaccccgtctgatctcagaattggcaccacgtgagcttgctaagtgataatatctgtttctactacggatttaggcaacaggacctgtacattgtcacattgcattatttttcttcaagcgttaataaaagttttaaataaaaaaaaaaaaaaaaaaaaaaaaaaaaaaaaaaagggcggcc

SEQ ID NO: 935 - DNA, 1604 bp, Homo sapiens
ggcacgaggttttgtcccacagtcagcaggccactagtttattaacttccagtcaccttgatttttgctaaaatgaagactctgcagtctacacttctcctgttactgcttgtgcctctgataaagccagcaccaccaacccagcaggactcacgcattatctatgattatggaacagataattttgaagaatccatatttagccaagattatgaggataaatacctggatggaaaaaatattaaggaaaaagaaactgtgataatacccaatgagaaaagtcttcaattacaaaaagatgaggcaataacaccattacctcccaagaaagaaaatgatgaaatgcccacgtgtctgctgtgtgtttgtttaagtggctctgtatactgtgaagaagttgacattgatgctgtaccacccttaccaaaggaatcagcctatctttacgcacgattcaacaaaaattaaaaaagctgactgccaaaaggttttgcagacatacctaactttaaggaagactcgattttacaggaaatttgatagaagatatagaagatggtactttttcaaaactttctctgttagaagaactttcacttgctgaaaatcaactactaaaacttccagcccttccccccaagctcactttatttaatgcaaaatacaacaaaatcaagagtaggggaatcaaagcaaatgcattcaaaaaactgaataacctcaccttcctctacttggaccataatgccctggaatccgtgcctcttaatttaccagaaagtctacgtgtaattcatcttcagttcaacaacatagcttcaattacagatgacacattctgcaaggctaatgacaccagttacatccgggaccgcattgaagagatacgcctggagggcaatccaatcgtcctgggaaagcatccaaacagttttatttgcttaaaaagattaccgatagggtcatacttttaacctctattggtacaacatataaatgaaagtacacctacactaatagtctgtctcaacaatgagtaaaggaacttaagtattggtttaatattaaccttgtatctcattttgaaggaatttaatattttaagcaaggatgttcaaaatcttacatataataagtaaaaagtaagactgaatgtctacgttcgaaacaaagtaatatgaaaatatttaaacagcattacaaaatcctagtttatactagactaccatttaaaaatcatgtttttatataaatgcccaaatttgagatgcattattcctattactaatgatgtaagtacgaggataaatccaagaaactttcaactctttgcctttcctggcctttactggatcccaaaagcatttaaggtacatgttccaaaaactttgaaaagctaaatgtttcccatgatcgctcattcttcttttatgattcatacgttattccttataaagtaagaactttgttttcctcctatcaaggcagctattttattaaatttttcacttagtctgagaaatagcagatagtctcatatttaggaaaactttccaaataaaataaatgttattctctgataaagaaaaaaaaaaaaaaaaaaa

SEQ ID NO: 936 - DNA, 2013 bp, Homo sapiens
ggcacgagggaggatgggcgagcagtctgaatgccagaatggataaccgttttgctacagcatttgtaattgcttgtgtgcttagcctcatttccaccatctacatggcagcctccattggcacagacttctggtatgaatatcgaagtccagttcaagaaaattccagtgatttgaataaaagcatctgggatgaattcattagtgatgaggcagatgaaaagacttataatgatgcactttttcgatacaatggcacagtgggattgtggagacggtgtatcaccatacccaaaaacatgcattggtatagcccaccagaaaggacagagtcatttgatgtggtcacaaaatgtgtgagtttcacactaactgagcagttcatggagaaatttgttgatcccggaaaccacaatagcgggattgatctccttaggacctatctttggcgttgccagttccttttaccttttgtgagtttaggtttgatgtgctttggggctttgatcggactttgtgcttgcatttgccgaagcttatatcccaccattgccacgggcattctccatctccttgcaggtctgtgtacactgggctcagtaatgttgttatgttgctggaattgaactactccaccagaaactagagctccctgacaatgtatccggtgaatttggatggtccttctgcctggcttgtgtctctgctcccttacagttcatggcttctgctctcttcatctgggctgctcacaccaaccggaaagagtacaccttaatgaaggcatatcgtgtggcatgagcaagaaactgcctgctttacaattgccatttttatttttttaaaataatactgatattttccccacctctcaattgtttttaatttttatttgtggatataccattttattatgaaaatctattttatttatacacattcaccactaaatacacacttaataccactaaaatttatgtggtttactttaagcgatgccatctttcaaataaactaatctaggtctagacagaaagaaatggatagagacttgacacaaatttatgaaagaaaattgggagtaggaatgtgaccgaaaacaagttgtgctaatgtctgttagacttttcagtaaaactaaagtaactgtatctgttcaactaaaaactctatattagtttctttgggaaacctctcatcgtcaaaactttatgttcactttgctgttgtagatagccagtcaaccagcagtattagtgctgttttcaaagatttaagctctataaaattgggaaattatctaagatcattttccctaagcattgacacatagcttcatctgaggtgagatatggcagctgtttgtatctgcactgtgtctgtctacaaaaagtgaaaaatacagtgtttacttgaaattttaactttgtaactgcaagaattccagttcagccgggcgaggattagtattatttttaactctccgtaagattttcagtaccaccaaattgttttggattttttttctttcctcttcacataccagggttattaaaagtgtgctttctttttacattatattacagttacaaggtaaaattcctcaactgctatttatttattccagcccagtactataaagaacgtttcaccataatgaccctccagagctgggaaacctaccacaagatctaaagttctggctgtccattaacctccaactatggtctttatttcttgtggtaatatgatgtgcctttccttgcctaaatcccttcctggtgtgtatcaacattatttaatgtgcttctaattcagtcatttttttataagtatgtctataaacattgaactttaaaaaacttatttatttattccactactgtagcaattgacagattaaaaaaatgtaacttcataatttcttaccataacctcaatgtcttttttaaaaaataaaattaaaaatgaaaagagaaaaaaaaaaaaaaaaaaaaaaaaaaaaaaaaaaaa

SEQ ID NO: 937 - DNA, 1417 bp, Homo sapiens
  misc_feature (1402)..(1402): n equals a,t,g, or c
ccctccgtcgtggtctggcgtgtattccgagccktsgtggtctggcgtgtattccgagcsttggtgtctggcggtttccgagcgttggtgtctggcggtttccgaccgttggtgtctggcggtttccgaccgttggtgtctggcacgcgccaccctctcttgctttggttgcgccatgccgatgtaccagacaagaagacaagaaaatgatttgaggacagcttcaatcgcggtgtgaagaagaaagcagcaaaacgaccactgaaaacaacgccggtggcaaaatatccaaagaaagggtcccaagcggtacatcgtcatagccggaaacagtcagagccaccagccaatgatmttttcaatgctgcgaaagctgccaaaagtgacatgcagcaccgagaagtccgcgtgaagtgcgtgaaggctctgaaagggctgtacggtaaccgggacctgaccgcacgcctggagctcttcactggccgcttcaaggactggatggtttccatgatcrtggacagagagtacagtgtggcagtggaggccgtcagattactgatacttatccttaagtgagtcctgggaagaggggaggccagtgtctcagacctttgcccttccagggtcatctccctccacctgtcacagctgactcttccatctgtgcaggttgactgaggtcattcctgagttgcagtatgttgagagggtaatatttctgtcttctctaactccccatactcccttgtcttccactctccayttaggagttttttgtgagttatgtccttgttgcttttgcctctttttctttctagccttgattgtgccagaagacaatgtccctattcacacactctttctgcttttctgtgggcaggaacatggaaggggtgctgatggacgtggactgtgagagcgtctaccccattgtgtaggcctctaattgaggcctggcctctgctgtgggtgaatttctgtactggaagtgagtggggctccttttacgtttctttaacaccaccctctcggtttctctcccacatgtgctgctgccctacttaaggcctccccatctccgtggaagtctctctgstgtctcttttcctctctcagctccttggggctttccttagctctgcacctccttttcctttatcatctccttgggccatctcctccstctgtggtcatsattacacctccttgtttcctcctgtgctgagccctttccttgtgtccattccaccagacttttctaccctgagtgcgagataagaacgatgggtggaagagagcaacgccagagcccaggygcccagaggactttcttccagcttctgctgtgccttctttgtggagagcaagcaaatcgcagtcttctccaggctgacaaggcgangggcatggcttcgaa

SEQ ID NO: 938 - DNA, 2827 bp, Homo sapiens
ccgcgtccggtcagaacaaatgtaccaaagttcagagagctgtttactaggcacgactgcgaaggcaagggggcaccagctcaggactgcatctgcctgccatttcccttccactcctcctttctggagtctgacattagaaagccagcgagaaggaagattcaaacaaccaaccctgatttcctgcttctccttttcatgagtgttcctgtggtctctgcacctcctttctgtcccccggcagagggcagtagagatggccggcccaaggcctcrgtggcgcgaccagctgctgttcatgagcatcatagtcctcgtgattgtggtcatctgcctgatgttatacgctcttctctgggaggctggcaacctcactgacctgcccaacctgagaatcggcttctataacttctgcctgtggaatgaggacaccagcaccctacagtgtcaccagttccctgagctggaagccctgggggtgcctcgggttggcctgggcctggccaggcttggcgtgtacgggtccctggtcctcaccctctttgccccccagcctctcctcctagcccagtgcaacagtgatgagagagcgtggcggctggcagtgggcttcctggctgtgtcctctgtgctgctggcmggcggcctgggcctcttcctctcctatgtgtggaagtgggtcaggctctccctcccggggcctgggtttctagctctgggcagcgcccaggccttactcatcctcttgcttatagccatggctgtgttccctctgagggctgagagggctgagagcaagcttgagagctgctaaaggcttacgtgattgcaagggttcagttccaaccatggtcagaggtggcacatctgctcagccatctcattttacagctaacgctgatctccagctccagcgatggaacccactacagaggaggtggggcccctgtgtcaaagaggccgaggggcagcaagggcagccagggcacctgtgacttcttagtacaagattgtctgtccttcaggacttccaaggctcccaaagactccctaaaccatgcagctcattgtcacaccaattcctgctttaattaatggatctgagcaaatcttcctctagcttcaggagggtggggagggagtgattgctgtcatggggccagacttccaggctgatttgccaaatgccaaaatgaaacctagcaaagaacttacggcaacaaacgaggacattaaaagagcgagcacctcagtgtctctggggacatggttaaggagcttccactcagcccaccatagtgagtgggccgccataagccatcactggaactccaaccccagaggtccaggagtgatctctgagtgactcaacaaagacaggacacatggggtacaaagacaaggcttgactgcttcaaagcttccctggacctgaagccagacagggcagaggcgtccgctgacaaatcactcccatgatgagaccctggaggactccaaatcctcgctgtgaacaggactggacggttgcgcacaaacaaacgctgccaccctccacttcccaacccagaacttggaaagacattagcacaacttacgcattggggaattgtgtgtattttctagcacttgtgtattggaaaacctgtatggcagtgatttattcatatattcctgtccaaagccacactgaaaacagaggcagagacatgtactctggtgtgatctcttgtcctcagtgtctcttctgggctcctgtccctcttgctttatagctagctgcccggrgaccaaggtacaggtgaaagcaaggtagcagcttgcgggaggaggcctgtctggcttaccagtctatacactgtggcctcaacctcccagacagggcagagaactgtgggcagctcgtttgctttctaggctggctggagaggtgggagctcattgatagactcatgatggaaactatttttgaaacaggcttcctccttcaggagagatcatgcggactaaactgtagcaattccagtgcacctggcagtgatccttttctttgcaaagtactgtctctttggttccagtaagttggaccaccacatgacatcattttccctggaacctggtcactgactaacacagacaattgggactccagagcctcaagagccaggagagggcacagtacatacagagggagtcaaatgggatctcattttgagtcctgccttccgcacactcagaacggcagccccaaggcccggagtgtccaggggcttctggcctgaggtgaatctgccaggcccaagaaggcacaaaggtaggagcacagagagccccattcccacaggcgggcggcccagcagcaccagtggaagctcagctgtcctccagctgctctcggcagacagttcagtgcacagtttatgccctagctgaaaaagatctcccggacgtatttcagcacatcctcttcctcctcctcctcagggctcctgctacaggcagagctggaaccccccggcctctgggaagggctgaggcctggagccagtgcctgtttcccactgtcctcttcctcactgctgctcccagaacttgtgtgaggcgacacggagcagggaggggagtgctctgggttatcagcccccgccagggccggctgctcgcaggccttttcctgtttgcggctctcaatcaggattcccagagcaacatcaactatctcagcctcattcatgcagtacacagtccttgtcgcagggagtcacgcaggaggtaccagcacctttgagctgaggagctttctgacacggacacaatttcctcagcc

SEQ ID NO: 939 - DNA, 1600 bp, Homo sapiens
  misc_feature (52)..(52): n equals a,t,g, or c
gctggcatgatccccaccacgatgacttgtaccccaatgccacagtatggcnggaagaactttctgcgtgtgggccacctggtgctgattgggggccctgatgatggtgttattactccctggcagtccagcttctttggtttctatgatgcaaatgagaccgtcctggagatggaggagcaactgcctgccaggcccacccaccagtctgagctgcttctgctgaggctggtctgcttgaagcctcccaggagaaagaagccagcctgtagggtccagcgtcaaagcgaatcatggggtccagggctgagctgtgcactctcttaggcggattctccttcctcctgctactgataccaggcgagggggccaagggtggatccctcagagagagtcagggagtctgctccaagcagacactggtggtcccgctccactacaacgagtcctacagccaaccagtgtacaagccctacctgaccttgtgcgctgggaggcgcatctgcagcacttacaggaccatgtaccgcgttatgtggcgggaggtgaggcgggaggttcagcagacccatgcagtgtgctgccagggctggaagaagcggcacccgggggcgctcacctgtgaagccatctgcgccaagccttgcctgaacggaggcgtctgcgttaggcctgaccagtgcgagtgcgcccccggctggggagggaagcactgtcatgtggacgtggatgaatgtaggaccagcatcaccctctgctcgcaccattgttttaatacggcaggcagcttcacctgcggctgcccccatgacctagtgctaggcgtggacgggcgcacctgcatggaggggtccccagagcccccaaccagtgccagcatactcagcgtggccgttcgggaggcggaaaaagatgagcgcgctctgaagcaggagattcacgagctgcgagggcgcctggagcggctggagcaggtgagccaagcctgctgggtggggcgaggccagacgtcactgtcaataccctgrggcatctyttcctttctagtgggccggtcaggctggggcctgggtcagagcggtgctgcccgtgccgcctgaagagctgcagccagaacaggtggctgagctgtggggccggggtgaccggatcgaatctctcagcgaccaggtgctgctgctggaggagaggctaggtgcctgctcctgtgaggacaacagcctgggcctcggcgtcaatcatcgataagaagcctctacagcacccctgccccctaatttatacagaaaccggacccactaatcctctgggattggccgactgtgagctgcagataaggctatcagccaccaaagagcaatgaacaatggaaacttcagagagctgaagaaagggggaggcctgtgttcttggcctgcccctgagtcttctggctgggggcaggttgcctgggcaagaactgcttcttcaattccttaacaaatgcaaccaccaacacccagatctctctctctctttattttcagtttttttgctgttatccagataattaataaaaaccaaccacgcaaaaaaaaaaaaaaaaaaaaaaaaaraaaaa

SEQ ID NO: 940 - DNA, 1847 bp, Homo sapiens
  misc_feature (1844)..(1844): n equals a,t,g, or c
ggcacgagccgagttccgtctctcgcgtcttttcctggtcccaggcaaagcggagcggagatcctcaaacggcctagtgcttcgcgcttccggagaaaatcagcggtctaattaattcctctggatttacaaaaggtgcaggtatgagcaggtctgaagactaacattttgtgaagttgtaaaacagaaaacctgttagaaatgtggtggtttcagcaaggcctcagtttccttccttcagcccttgtaatttggacatctgctgctttcatattttcatacattactgcagtaacactccaccatatagacccggctttaccttatatcagtgacactggtacagtagctccagaaaaatgcttatttggggcaatgctaaatattgcggcagttttatgcattgctaccatttatgttcgttataagcaagttcatgctctgagtcctgaagagaacgttatcatcaaattaaacaaggctggccttgtacttggaatactgagttgtttaggactttctattgtggcaaacttccagaaaacaaccctttttgctgcacatgtaagtggagctgtgcttacctttggtatgggctcattatatatgtttgttcagaccatcctttcctaccaaatgcagcccaaaatccatggcaaacaagtcttctggatcagactgttgttggttatctggtgtggagtaagtgcacttagcatgctgacttgctcatcagttttgcacagtggcaattttgggactgatttagaacagaaactccattggaaccccgaggacaaaggttatgtgcttcacatgatcactactgcagcagaatggtctatgtcattttccttctttggttttttcctgacttacattcgtgattttcagaaaatttctttacgggtggaagccaatttacatggattaaccctctatgacactgcaccttgccctattaacaatgaacgaacacggctactttccagagatatttgatgaaaggataaaatatttctgtaatgattatgattctcagggattggggaaaggttcacagaagttgcttattcttctctgaaattttcaaccacttaatcaaggctgacagtaacactgatgaatgctgataatcaggaaacatgaaagaagccatttgatagattattctaaaggatatcatcaagaagactattaaaaacacctatgcctatacttttttatctcagaaaataaagtcaaaagactatgatatcatagttttttataccttatttaagagaaacaacctgacgtgcaccaatcagtctgcacatcccaacccttcacattttataaattattgtagatcatgttttgttaggagcacttttatgagagacattttccatgactaaataatcagcattagtcagtaaatcctttagaactgggttttgaaatgggagttttatcatattaaatcatttcttgtagtcttacattttttgttgttgttctggaatctacctgtaaaggaaagtagacctggattcatgtgggctcttccatggcttaagtgttgcccaagagattttgtaggtaacgatttttttttttctggccacaatgccagatactaagctaattggtctatcatacacatgcttgcagtagtttcatgaagtttagtctctggcgtgaaattttaatcaccaatgaaggagagaggcacctgtaggtaaatttactttagtcatattttatataaaacaagggttagtattcatgtaacattgagaagtttgggaataacagcagatatgattaataaaagtcataaccataaaaaaaaaaaaaanaaa

SEQ ID NO: 941 - DNA, 1608 bp, Homo sapiens
  misc_feature (6)..(6): n equals a,t,g, or c
  misc_feature (11)..(11): n equals a,t,g, or c
  misc_feature (44)..(44): n equals a,t,g, or c
  misc_feature (63)..(63): n equals a,t,g, or c
  misc_feature (94)..(94): n equals a,t,g, or c
  misc_feature (104)..(104): n equals a,t,g, or c
  misc_feature (1523)..(1523): n equals a,t,g, or c
  misc_feature (1557)..(1557): n equals a,t,g, or c
  misc_feature (1576)..(1576): n equals a,t,g, or c
  misc_feature (1580)..(1580): n equals a,t,g, or c
  misc_feature (1582)..(1582): n equals a,t,g, or c
aggggngaaanccggccttgggtaatcctttaaaaggccctgtngggggttttcggccaaccntcttgacttgaagcggtcgaattttttggtnatgctcggtnaagggggccggaagcctatggaaaaaacgccagcaacggggcctttttacgggttcctggccttttgctggccttttgctcacatgttctttcctgcgttatcccctgattctgtggataaccggtattaccgcctttgagtgagctgataccgctcgccgcagccgaacgaccgagcgcagcgagtcagtgagcgaggaagcggaagagcgcccaatacgcaaaccgcctctccccgcgcgttggccgattcattaatgcagctggcacgacaggtttcccgactggaaagcgggcagtgagcgcaacgcaattaatgtgagttagctcactcattaggcaccccaggctttacactttatgcttccggctcgtatgttgtgtggaattgtgagcggataacaatttcacacaggaaacagctatgaccatgattacgccaagctcgaaattaaccctcactaaagggaacaaaagctggagctccaccgcggtggcggccgctctagaactagtggatcccccgggctgcaggaattcggcacgagcttaaacacagccgagaagttgcttctttgtactttttctacttttcctacttttttgtagaaaaaaaagataatgcctctgcttctatttctctgggggtgggggtgggggccgggagccgtcgcagacccgtttcatgcagcgtctccctcggcaccgcgttcggaggacgcaccctcactcccctgctgccttcactcctttctgaccaagcaacgctaacttttgtacagatcgatttgataaaattaaacaaagtgctttttatggacgtgggctgcaaaaaaaaaaaaaaaaaaaaaaaaaaaaaaactcgagggggggcccggtacccaattcgccctatagtgagtcgtattacaattcactggccgtcgttttacaacgtcgtgactgggaaaaccctggcgttacccaacttaatcgccttgcagcacatccccctttcgccagctggcgtaatagcgaagaggcccgcaccgatcgcccttcccaacagttgcgcagcctgaatggcgaatggcaaattgtaagcgttaatattttgttaaaattcgcgttaaatttttgttaaatcagctcattttttaaccaataggccgaaatcggcaaaatcccttataaatcaaaagaatagaccgagatagggttgagtgttgttccagtttggaacaagagtccactattaaagaacgtggactccaacgtcaaagggcgaaaaaccgtctatcagggcgatggcccactacgtgaaccatcaccctaatcaagttttttggggtcgaggtgccgtaaagcactaaatcggaaccctaaagggagcccccgatttagagcttgacggggaaagccggcgaacgtggcgagaanaggaagggaagaaagccaaaggagcgggccctanggcccttgcaaggtgtacngtcncncttgggcggtaaccccccaaacccgc

SEQ ID NO: 942 - DNA, 388 bp, Homo sapiens
ctgcgggaatttttaccaaacacgcttaagagtctctgagagcccgaacatgttcaaaaaaatcctcttcccgttagttgctctgtttatgcttgcaggatgcgcaaaaccgccaacaactattgaagtttccccgacgattacactgccacagcaggatccaagcctgatgggcgtcaccgtaagcattaatggtgccgatcagcgtaccgatcaggcgctggcaaaagtcacccgcgataatcaaatcgttaccctgaccgcctcccgcgatctgcgtttcctgctgcaagaagtgctggaaaaacagatgaccgcgcgtggttacatggttggtccgaatggcccggttaatctgcaaatcatcgttagccaactgtatgctgac

SEQ ID NO: 943 - DNA, 1440 bp, Homo sapiens
ggcacgagttcacacgcagctagacacagctaacttgagtcttggagctcctagagggaagcttctggaaaggaaggctcttcaggacctcttaggagccagagaagaggacgttgtcacagataaagagccaggctcaccagctcctgacgcatgcatcatgaccatgagacacaactggacaccagacctcagccctttgtgggtcctgctcctgtgtgcccacgtcgtcactctcctggtcagagccacacctgtctcgcagaccaccacagctgccactgcctcagttagaagcacaaaggacccctgcccctcccagcccccagtgttcccagcagctaagcagtgtccagcattggaagtgacctggccagaggtggaagtgccactgaatggaacgctgagcttatcctgtgtggcctgcagccgcttccccaacttcagcatcctctactggctgggcaatggttccttcattgagcacctcccaggccgactgtgggaggggagcaccagccgggaacgtgggagcacaggtacgcagctgtgcaaggccttggtgctggagcagctgacccctgccctgcacagcaccaacttctcctgtgtgctcgtggaccctgaacaggttgtccagcgtcacgtcgtcctggcccagctctgggctgggctgagggcaaccttgccccccacccaagaagccctgccctccagccacagcagtccacagcagcagggttaagactcagcacagggccagcagcagcacaaccttgaccagagcttgggtcctacctgtctacctggagtgaacagtccctgactgcctgtaggctgcgtggatgcgcaacacaccccctccttctctgctttgggtcccttctctcaccaaattcaaactccattcccacctacctagaaaatcacagcctccttataatgcctcctcctcctgccattctctctccacctatccattagccttcctaacgtcctactcctcacactgctctactgctcagaaaccaccaagactgttgatgccttagccttgcactccagggccctacctgcatttcccacatgactttctggaagcctcccaactattcttgcttttcccagacagctcccactcccatgtctctgctcatttagtcccgtcttcctcaccgccccagcaggggaacgctcaagcctggttgaaatgctgcctcttcagtgaagtcatcctctttcagctctggccacattctgcagacttcctatcttcgtgctgtatgtttttttttttcccccttcactctaatggactgttccagggaagggatgggggcagcagctgcttcggatccacactgtatctgtgtcatccccacatgggtcctcataaaggattattcaatggaaaaaaaaaaaaaaaaaaaaaaaaaaaaa

SEQ ID NO: 944 - DNA, 1101 bp, Homo sapiens
ggcagagtggtggggacggggtgtgtggtgggtggggtgtttgtggtggagacagggatggggcgtgtragggcactggaggtgtggatagcagttggatgcccagctgggggtaggcagtctggagggtcctgaatttgggagctcagatgtgtgggccacccggacatgctggagaagggcatttggggaaaacggctctgaggggtggacacctgccctctggcctcaccagctgtggacaggtgtgtgctgattgtgtttctggtcttttraggacatcgtgctgggctgcagatgttgctgttttttaattgaaactttattgcccgctggacatggtggctcatgccccctaatccccacctaaccctaatcctaatcacagcactttgggaggctgtggtgggaggatcgcttgagcctaggaggttgagactggagtgctgtacaatcgcaccactgcattccacagcctgggcaacagagggggaccctgtctcaaaaaaaagagaaactgctgttgccataatagttgtaagaaataatacagagcgatcccttgttccctctgcccaacttttcctaacagtgagtctttgcagaacaccacagtctcacacaaggacatggactttgatgccatccggtggccttacttagcctccgcccatctcgcttagcatccccaggaagatccctgtgtggccctttcacacctatgtctctaacgccatcttatccctaatccctggcaaccatagcccatcttccgtttctagaattttgtcatctcagaaatatcatatccagctgggcatggtggctcacacttgtgatcccggcactttgggagactgaggtgggcggatcacttggggtcgggggttcgagaccagcctggccaacatggtgagattccgtctgtactaaatatacaaaaattggtcgggcgtggtggcgcacgcctgtggtccagctactcgggaggctgaggcgggagagttgcttgagcgggacgagttgcgtgagccggatcgtgccactgtactccagcctgggtgacagagtgagtgagactctgtctccaaaaaaaaaaaa

SEQ ID NO: 945 - DNA, 1073 bp, Homo sapiens
tttcgagcggccgcccgggcaggtacacatttttatatgaacttacattttcatatctcttggggatataccaaggagtaagactgctgggtcaaatgataattctgtttaaactgttttccaaggtggctgtattgtatcattctagatcccaccagcaatgtatgaaggttacaattgctccacattcttaccaacacttgtcttttagatattagccactctagtatgtaggaaatagtatttcactgtggttttgacttgcatttctctaatgactaatgatgttgaacctctttttcatgtgcttatttgctatttgtttatcttctttggagaaatttctttctttcaaatcttgtctatttttaattggagtatttgcttttttattgaattcttcatatgttgtagacacaagtcccttatcagatatacaatttgaaaatattttctccaattctgtatgttgtcttttcactttgaagcacaaaaacttttcattctgatgaggtccaatttatctttttttgttgtttgttgatatgcttttgatatcatatttaagacacctagcccaaggtcacagagatgtacgcctatatttcttccaagatttttgtagtttcagctcttacatttgggtctttgacccattttgagttaacttttggatatgatatgtggtagggataaaatttcattattttgtatgtggatgtccaattgacacagcatcattttttgaagagactattctttctcccattaaaggttcttggcgctcttgtcaaaaaatcaattggctatgtgagactttacttctgggcctttaattcggttccattgatctgcatgtctgtcattatgccaatatcacactgtcttgactactgtagcttcatattaagttttgaaattgggaagtgtgtcttggaactttgtttttccattttaagattgtttcggctattctgggtcccttgcactcccatatgaattttaggatcagcttgtaaatttctcaaaaaaaaaaaaaaaaaactcggggggggcccggtacccaattcgcc

SEQ ID NO: 946 - DNA, 1950 bp, Homo sapiens
gctcgtgccgctgctgcagcatgtgctgttgctggagcaggcccggcagcagagcaccctcattgctgatcctcaccaagacaggggmgmtgcccaggcagcccaccacccaccctgaggagacagaggaggmrctgacggagcagcaggaggtcttgctgggggagggagccctgaccatgccccgggagggctccacagagagtgagagcacacaggaagacctggaggaggaggacgaggaagasgatggggaggaggaggagattgcatccaggttaaggacgaggagggcgagagtggtgctgaggaggggcccgacttggaggagcctggtgctggatacaaaaaactgttctcagatgcccagccgctgcagcctttgcaggtgtaccaggcgcccctcagcctggccactgtgccccaccaggccctgggccgtacccagtcctcccctgctgcccctgggggcatgaagagccccccagaccagcccgtcaagcacctcttcaccacaggtgtggtctacgacacgttcatgctaaagcaccagtgcatgtgcgggaacacacacgtgcaccctgagcatgctggccggatccagagcatctggtcccggctgcaggagacaggcctgcttagcaagtgcgagcggatccgaggtcgcaaagccacgctagatgagatccagacagtgcactctgaataccacaccctgctctatgggaccagtcccctcaaccggcagaagctagacagcaagaagttgctcggccccatcagccagaagatgtatgctgtgctgccttgtgggggcatcggggtggacagtgacaccgtgtggaatgagatgcactcctccagtgctgtgcgcatggcagtgggctgcctgctggagctggccttcaaggtggctgcaggagagctcaagaatggatttgccatcatccggcccccaggacaccacgccgaggaatccacagccatgggattctgcttcttcaactctgtagccatcaccgcaaaactcctacagcagaagttgaacgtgggcaaggtcctcatcgtggactgggacattcaccatggcaatggcacccagcaggcgttctacaatgacccctctgtgctctacatctctctgcatcgctatgacaacgggaacttctttccaggctctggggctcctgaagaggttggtggaggaccaggcgtggggtacaatgtgaacgtggcatggacaggaggtgtggacccccccattggagacgtggagtaccttacagccttcaggacagtggtgatgcccattgcccacgagttctcacctgatgtggtcctagtctccgccgggtttgatgctgttgaaggacatctgtctcctctgggtggctactctgtcaccgccagatgttttggccacttgaccaggcagctgatgaccctggcagggggccgggtggtgctggccctggagggaggccatgacttgaccgccatctgtgatgcctctgaggcttgtgtctcggctctgctcagtgtagagctgcagcccttggatgaggcagtcttgcagcaaaagcccaacatcaacgcagtggccacgctagagaaagtcatcgagatccagagcaaacactggagctgtgtgcagaagttcgccgctggtctgggccggtccctgcgagaggcccaagcaggtgagaccgaggaggccgagactgtgagcgccatggccttgctgtcggtgggggccgagcaggcccaggctgcggcagcccgggaacacagccccaggccggcagaggagcccatggagcaggagcctgccctgtgacgccccggcccccatccctctgggcttcaccattgtgattttgtttattttttctattaaaaacaaaaagtcacacattcaaaaaaaaaaaaaaaaattccgggggttttttt

SEQ ID NO: 947 - DNA, 461 bp, Homo sapiens
  misc_feature (341)..(341): n equals a,t,g, or c
  misc_feature (444)..(444): n equals a,t,g, or c
gaattcggcacgagctcaaactcctgggttcaatcagtcttcctgacttggcctccctagtatcttctaagtaatctagataagacagagccaatgtgtgtgaaaggcaagtggtaaagtgacagttgtttttgtacctgtggtacagcaaatgctctgaattctgtggctttccacactgtttgacgttgaggacaggtgtccttccttgactctagctatggagaaaatgtggcttgtatacctgccattatcttcaactctaagcaccactactggaggcagtattgtcagtatcagcacctcacctcactcctgggacccaggaacaacccctgagngtcgcttaggaccccagagcctcagccaatcaggctttgaacttccttctaggaagtgtgttgcctactccattgaatggctgtctaatgccagttggcaggntcctgatcctcaaaaat

SEQ ID NO: 948 - DNA, 1030 bp, Homo sapiens
gggcaaggatttcatgagcatcctcctctaaacgcgtgtcaagacaaaagatgcttcagctttggaaacttgttctcctgtgcggcgtgctcactgggacctcagagtctcttcttgacaatcttggcaatgacctaagcaatgtcgtggataagctggaacctgttcttcacgagggacttgagacagttgacaatactcttaaaggcatccttgagaaactgaaggtcgacctaggagtgcttcagaaatccagtgcttggcaactggccaagcagaaggcccaggaagctgagaaattgctgaacaatgtcatttctaagctgcttccaactaacacggacatttttgggttgaaaatcagcaactccctcatcctggatgtcaaagctgaaccgatcgatgatggcaaaggccttaacctgagcttccctgtcaccgcgaatgtcactgtggccgggcccatcattggccagattatcaacctgaaagcctccttggacctcctgaccgcagtcacaattgaaactgatccccagacacaccagcctgttgccgtcctgggagaatgcgccagtgacccaaccagcatctcactttccttgctggacaaacacagccaaatcatcaacaagttcgtgaatagcgtgatcaacacgctgaaaagcactgtatcctccctgctgcagaaggagatatgtccactgatccgcatcttcatccactccctggatgkgaatgtcattcagcaggtcgkcgataatcctcagcacaaaacccagctgcaaaccctcatttgaagaggacgaatgaggaggaccactgtggtgcatgctgattggttcccagtggcttgccccacccccttatagcatctccctccaggaagctgctgccaccacctaaccagcgtgaaagcctgagtcccaccagaaggaccttcccagataccccttctcctcacagtcagaacagcagcctctacacatgttgtcctgcccctggcaataaaggcccatttctgcaaaaa

SEQ ID NO: 949 - DNA, 1880 bp, Homo sapiens
cccccgggctgcaggaattcggcacgagctggtcaccatggtgatcaaggtgctcctggctccgtgggtcctgctggtcctaggggccctgctggtccttctggccctgctggaaaagatggtcgcactggacatcctggtacagttggacctgctggcattcgaggccctcagggtcaccaaggccctgctggcccccctggtccccctggccctcctggacctccaggtgtaagcggtggtggttatgactttggttacgatggagacttctacagggctgaccagcctcgctcagcaccttctctcagacccaaggactatgaagttgatgctactctgaagtctctcaacaaccagattgagacccttcttactcctgaaggctctagaaagaacccagctcgcacatgccgtgacttgagactcagccacccagagtggagcagtggttactactggattgaccctaaccaaggatgcactatggatgctatcaaagtatactgtgatttctctactggcgaaacctgtatccgggcccaacctgaaaacatcccagccaagaactggtataggagctccaaggacaagaaacacgtctggctaggagaaactatcaatgctggcagccagtttgaatataatgtagaaggagtgacttccaaggaaatggctacccaacttgccttcatgcgcctgctggccaactatgcctctcagaacatcacctaccactgcaagaacagcattgcatacatggatgaggagactggcaacctgaaaaaggctgtcattctacagggctctaatgatgttgaacttgttgctgagggcaacagcaggttcacttacactgttcttgtagatggctgctctaaaaagacaaatgaatggggaaagacaatcattgaatacaaaacaaataagccatcacgcctgcccttccttgatattgcacctttggacatcggtggtgctgaccaggaattctttgtggacattggcccagtctgtttcaaataaatgaactcaatctaaattaaaaaagaaagaaatttgaaaaaactttctctttgccatttcttcttcttcttttttaactgaaagctgaatccttccatttcttctgcacatctacttgcttaaattgtgggcaaaagagaaaaagaaggattgatcagagcattgtgcaatacagtttcattaactccttcccccgctcccccaaaaatttgaatttttttttcaacactcttacacctgttatggaaaatgtcaacctttgtaagaaaaccaaaataaaaattgaaaaataaaaaccataaacatttgcaccacttgtggcttttgaatatcttccacagagggaagtttaaaacccaaacttccaaaggtttaaactacctcaaaacactttcccatgagtgtgatccacattgttaggtgctgacctagacagagatgaactgaggtccttgttttgttttgttcataatacaaaggtgctaattaatagtatttcagatacttgaagaatgttgatggtgctagaagaatttgagaagaaatactcctgtattgagttgtatcgtgtggtgtattttttaaaaaatttgatttagcattcatattttccatcttattcccaattaaaagtatgcagattatttgcccaaagttgtcctcttcttcagattcagcatttgttctttgccagtctcattttcatcttcttccatggttccacagaagctttgtttcttgggcaagcagaaaaattaaattgtacctattttgtatatgtgagatgtttaaataaattgtgaaaaaaatgaaataaagcatgtttggttttccaaaaaaaaaaaaaaaaaaaa

SEQ ID NO: 950 - DNA, 2364 bp, Homo sapiens
ggcacgagaatcactgagggaacaggttttgaatctttcttttgtgttatgaagtttatcgtctctacttgcttgagatttttgttattttgggggtttgggggtgctttttgttttgtttttgccaaatgtaacatgaaagcagatgctgcagctttagtctgttatgctgatttagtaaaaaaaaattttttacatatattgcttgctttcgatgcttctgtgaaatttttttctaaagcttttgtgcagctgtatggtaaaaatatggtgattaatttgaagagcttacattgaaagacaatgtaataggaaataaatgtagattgcagttggtcaagaattttgtagagaggataacaagacttaattactgaaaaacagtaacatagcattttgaaatataatcttttaaaatattgatgctttccttttaaatggaaatttaaattttatgattaaaagtttaaacatttatgataattttcctcatcagttctcccataggaaataaagcatgtgaaagggtatttaaagttttggaggactctttttaaaatgactgtgttgataactagtttgggctggttttgttttagaaaaaacattttcatgtaggagtattctgtgaaggaaaggaatcatgcaaaatatactttttgctttggcgtcttacagttgtaaaggaatggtgatcattctgaatacttctgtagtgagtattcattaagaaaagaatgacaaaaatagtattcatacataggaattgggaccagttctctgaaaatgaagatatactcacactgggtccattttacgggtcccagtaacatttgactgagggaaaacaagtaagctcgactgttgttggggtaccttaatggtttcggtctgttatatacctataaaatagacaagtatatgtttgtccctttgtaggtaactgctatgatgattgctatatagtgaaactgacatgagtttaaaactagatggagcagcttttattgctggcaggaaaaagcatggtgtaatattaaggactggggcccaggtctagactccaggactccataaaagagtttaagttcaagcccttccattaatgaactgtgtaagcataggcagttacaaaaggacccatctctaaaatgggaataataatactttacctccctcacagtattgttgtgagggaaacaatagcataactgcaaaagtgctttgaacagtaaaaagatatacaagtaaaaggcattatttatatgagtaagaaagacatttttgaggggagaaaagttattccactttaaaaatcaatagccaagtctcatgccttttgttactttagtaagcgaaaatttcaggtactaaatacctttcttagccaagtttataacaaaaacatctcagtatacttcattacttatttaagcgtgatgtctttttttttttttgagacggagtctcgctgtctcccaggctggagtgcagtggcatgatctcggctcactgcaagctccgcctcccaggttcacgccattctcctgcctcagcctccggagtagctgggagtacaggcgcggctaattttttgtatttttagtagagacggggtttcaccatgttagccaggatggtctcgatctcctgacctcgtgatccacctgcctcggcctcccaaagtgctgggattacaggtgtgagccaccacgcccggccacgtgatcttattttaaaagaacactgctatagaagaatttacacaccaaattccctgaaagctaaagtattgttccataacttacacttgaggcaatctgctcagtgtgtaaccactttataaaaaataacttaccattgataacctggaaggtggactacttgtaagtagctggtgtttattgattaaaccatggaagttttcatgatacccaagcatgttgctgaaactgatgcatttgaaagagctgttgaaataatgcaaaactttggttttataagaatctactcatgttttaaaagtatttaactctgtagaccacaattatagaaagctcagtaatgctgctaatgacatttgtaaactatatctgtaatgtagtgcaatatttttatatttcactgggagaggcagtagagacatcatagttgtactttagtgcaagtgggggaacactccaaatagcctagagtatagtaaggtacaaagcttcaatgaaaaaagctgtattatattacattactgatgtaatcttgctgccatgctatgtatcaatagctaaaaaataataataaagactaccacagaaaaaaaaaaaaaaaaaaaaaaaaaaaaaaaaaaaaaaaaaaaaaaactcgtag

SEQ ID NO: 951 - DNA, 2520 bp, Homo sapiens
  misc_feature (2520)..(2520): n equals a,t,g, or c
ggcacgagcacttcctggccaggaaacctgagcggtgagactcccagctgcctacatcaaggccccaggacatgcagaaccttcctctagaacccgacccaccaccatgaggtcctgcctgtggagatgcaggcacctgagccaaggcgtccagtggtccttgcttctggctgtcctggtcttctttctcttcgccttgccctcttttattaaggagcctcaaacaaagccttccaggcatcaacgcacagagaacattaaagaaaggtctctacagtccctggcaaagcctaagtcccaggcacccacaagggcaaggaggacaaccatctatgcagagccagtgccagagaacaatgccctcaacacacaaacccagcccaaggcccacaccaccggagacagaggaaaggaggccaaccaggcaccgccggaggagcaggacaaggtgccccacacagcacagagggcagcatggaagagcccagaaaaagagaaaaccatggtgaacacactgtcacccagagggcaagatgcagggatggcctctggcaggacagaggcacaatcatggaagagccaggacacaaagacgacccaaggaaatgggggccagaccaggaagctgacggcctccaggacggtgtcagagaagcaccagggcaaagcggcaaccacagccaagacgctcattcccaaaagtcagcacagaatgctggctcccacaggagcagtgtcaacaaggacgagacagaaaggagtgaccacagcagtcatcccacctaaggagaagaaacctcaggccaccccaccccctgcccctttccagagccccacgacgcagagaaaccaaagactgaaggccgccaacttcaaatctgagcctcggtgggattttgaggaaaaatacagcttcgaaataggaggccttcagacgacttgccctgactctgtgaagatcaaagcctccaagtcgctgtggctccagaaactctttctgcccaacctcactctcttcctggactccagacacttcaaccagagtgagtgggaccgcctggaacactttgcaccaccctttggcttcatggagctcaactactccttggtgcagaaggtcgtgacacgcttccctccagtgccccagcagcagctgctcctggccagcctccccgctgggagcctccggtgcatcacctgtgccgtggtgggcaacgggggcatcctgaacaactcccacatgggccaggagatagacagtcacgactacgtgttccgattgagcggagctctcattaaaggctacgaacaggatgtggggactcggacatccttctacggctttaccgccttctccctgacccagtcactccttatattgggcaatcggggtttcaagaacgtgcctcttgggaaggacgtccgctacttgcacttcctggaaggcacccgggactatgagtggctggaagcactgcttatgaatcagacggtgatgtcaaaaaaccttttctggttcaggcacagaccccaggaagcttttcgggaagccctgcacatggacaggtacctgttgctgcacccagactttctccgatacatgaagaacaggtttctgaggtctaagaccctggatggtgcccactggaggatataccgccccaccactggggccctcctgctgctcactgcccttcagctctgtgaccaggtgagtgcttatggcttcatcactgagggccatgagcgcttttctgatcactactatgatacatcatggaagcggctgatcttttacataaaccatgacttcaagctggagagagaagtctggaagcggctacacgatgaagggataatccggctgtaccagcgtcctggtcccggaactgccaaagccaagaactgaccggggccagggctgccatggtctccttgcctgctccaaggcacaggatacagtgggaatcttgagactctttggccatttcccatggctcagactaagctccaagcccttcaggagttccaagggaacacttgaaccatggacaagactctctcaagatggcaaatggctaattgaggttctgaagttcttcagtacattgctgtaggtcctgaggccagggatttttaattaaatggggtgatgggtggccaataccacaattcctgctgaaaaacactcttccagtccaaaagcttcttgatacagaaaaaagagcctggatttacagaaacatatagatctggtttgaattccagatcgagtttacagttgtgaaatcttgaaggtattacttaacttcactacagattgtctagaagacctttctaggagttatctgattctagaagggtctatacttgtccttgtctttaagctatttgacaactctacgtgttgtagaaaactgataataatacaaatgattgttgtccatggaaaggcaaataaattttctacagtgaagatgcaaaaaaaaaaaaaaaaaaaaaaaaaaaaaaaaaaaaaan

SEQ ID NO: 952 - DNA, 1943 bp, Homo sapiens
ggcacgagggctgggtggaggagggagcagaaaaaacccaactcagcagatctgggaactgtgagagcggcaagcaggaactgtggtcagaggctgtgcgtcttggctggtagggcctgctcttttctaccatggcagcccagggctatggctattatcgcactgtgatcttctcctttgtcatgccatcattggtggaagagatccctttggacaaggatgatttggggttcatcaccagcagccagtcggcagcttatgctatcagcaagtttgtcagtggggtgctgtctgaccagatgagtgctcgctggctcttctcttctgggctgctcctggttggcctggtcaacatattctttgcctggagctccacagtacctgtctttgctgccctctggttccttaatggcctggcccaggggctgggctggcccccatgtgggaaggtcctgcggaagtggtttgagccatctcagtttggcacttggtgggccatcctgtcaaccagcatgaacctggctggagggctgggccctatcctggcaaccatccttgcccagagctacagctggcgcagcacgctggccctatctggggcactgtgtgtggttgtctccttcctctgtctcctgctcatccacaatgaacctgctgatgttggactccgcaacctggaccccatgccctctgagggcaagaagggctccttgaaggaggagagcaccctgcaggagctgctgctgtccccttacctgtgggtgctctccactggttaccttgtggtgtttggagtaaagacctgctgtactgactggggccagttcttccttatccaggagaaaggacagtcagcccttgtaggtagctcctacatgagtgccctggaagttgggggccttgtaggcagcatcgcagctggctacctgtcagaccgggccatggcaaaggcgggactgtccaactacgggaaccctcgccatggcctgttgctgttcatgatggctggcatgacagtgtccatgtacctcttccgggtaacagtgaccagtgactcccccaagctctggatcctggtattgggagctgtatttggtttctcctcgtatggccccattgccctgtttggagtcatagccaacgagagtgcccctcccaacttgtgtggcacctcccacgccattgtgggactcatggccaatgtgggcggctttctggctgggctgcccttcagcaccattgccaagcactacagttggagcacagccttctgggtggctgaagtgatttgtgcggccagcacggctgccttcttcctcctacgaaacatccgcaccaagatgggccgagtgtccaagaaggctgagtgaagagagtccaggttccggagcaccatcccacggtggccttccccctgcacgctctgcggggagaaaaggaggggcctgcctggctagccctgaacctttcactttccatttctgcgccttttctgtcacccgggtggcgctggaagttatcagtggctagtgaggtcccagctccctgatcctatgctctatttaaaagataacctttggccttagactccgttagctcctatttcctgccttcagacaaacaggaaacttctgcagtcaggaaggctcctgtacccttcttcttttcctaggccctgtcctgcccgcatcctaccccatccccacctgaagtgaggctatccctgcagctgcagggcactaatgacccttgacttctgctgggtcctaagtcctctcagcagtgggtgactgctgttgccaatacctcagactccagggaaagagaggaggccatcattctcactgtaccactaggcgcagttggatataggtgggaagaaaaggtgacttgttatagaagattaaaactagatttgatactgaaaaaaaaaaaaaaaaaaa

SEQ ID NO: 953 - DNA, 1692 bp, Homo sapiens
ggttgtgtgggacaagctgctcccgacagaaggatgtcgctgctgagcctgccctggctgggcctcagaccggtggcaatgtccccatggctactcctgctgctggttgtgggctcctggctactcgcccgcatcctggcttggacctatgccttctataacaactgccgccggctccagtgtttcccacagcccccaaaacggaactggttttggggtcacctgggcctgatcactcctacagaggagggcttgaaggactcgacccagatgtcggccacctattcccagggctttacggtatggctgggtcccatcatccccttcatcgttttatgccaccctgacaccatccggtctatcaccaatgcctcagctgccattgcacccaaggataatctcttcatcaggttcctgaagccctggctgggagaagggatactgctgagtggcggtgacaagtggagccgccaccgtcggatgctgacgcccgccttccatttcaacatcctgaagtcctatataacgatcttcaacaagagtgcaaacatcatgcttgacaagtggcagcacctggcctcagagggcagcagttgtctggacatgtttgagcacatcagcctcatgaccttggacagtctacagaaatgcatcttcagctttgacagccattgtcaggagaggcccagtgaatatattgccaccatcttggagctcagtgcccttgtagagaaaagaagccagcatatcctccagcacatggactttctgtattacctctcccatgacgggcggcgcttccacagggcctgccgcctggtgcatgacttcacagacgctgtcatccgggagcggcgtcgcaccctccccactcagggtattgatgattttttcaaagacaaagccaagtccaagactttggatttcattgatgtgcttctgctgagcaaggatgaagatgggaaggcattgtcagatgaggatataagagcagaggctgacaccttcatgtttggaggccatgacaccacggccagtggcctctcctgggtcctgtacaaccttgcgaggcacccagaataccaggagcgctgccgacaggaggtgcaagagcttctgaaggaccgcgatcctaaagagattgaatgggacgacctggcccagctgcccttcctgaccatgtgcgtgaaggagagcctgaggttacatcccccagctcccttcatctcccgatgctgcacccaggacattgttctcccagatggccgagtcatccccaaaggcattacctgcctcatcgatattataggggtccatcacaacccaactgtgtggccggatcctgaggtctacgaccccttccgctttgacccagagaacagcaaggggaggtcacctctggcttttattcctttctccgcagggcccaggaactgcatcgggcaggcgttcgccatggcggagatgaaagtggtcctggcgttgatgctgctgcacttccggttcctgccagaccacactgagccccgcaggaagctggaattgatcatgcgcgccgagggcgggctttggctgcgggtggagcccctgaatgtaagcttgcagtgactttctgacccatccacctgtttttttgcagattgtcatgaataaaacggtgctgtcaaaaaaaaaaaaaaaaaaaaaaaaaaa

SEQ ID NO: 954 - DNA, 799 bp, Homo sapiens
agctcgaaattaaccctcamtaaagggaacaaaagctggagytcmaccgcggtggcggccgctctagaactagtggatcccccgggctgcaggaattccccccccccccccgagacttcctccttcacttgcctggacgctgcgccacatcccaccggcccttacactgtggtgtccagcagcatccggcttcatggggggacttgaaccctgcagcaggctcctgctcctgcctctcctgctggctgtaagtggtctccgtcctgtccaggcccaggcccagagcgattgcagttgctctacggtgagcccgggcgtgctggcagggatcgtgatgggagacctggtgctgacagtgctcattgccctggccgtgtacttcctgggccggctggtccctcgggggcgaggggctgcggaggcagcgacccggaaacagcgtatcactgagaccgagtcgccttatcaggagctccagggtcagaggtcggatgtctacagcgacctcaacacacagaggccgtattacaaatgagcccgaatcatgacagtcagcaacatgatacctggatccagccattcctgaagcccaccctgcacctcattccaactcctaccgcgatacagacccacagagtgccatccctgagagaccagaccgctccccaatactctcctaaaataaacatgaagcacaaaaaaaaaaaaaaaaaaaaaraaaaaaaaaaaaaaaaaaaaaaaaaaaaaaaaaaaaaaaaaaaaaaaaaaaaaaaaaaaaaaaaaaaaaaaaaaccttgtg

SEQ ID NO: 955 - DNA, 2919 bp, Homo sapiens
  misc_feature (1665)..(1665): n equals a,t,g, or c
  misc_feature (1706)..(1706): n equals a,t,g, or c
  misc_feature (2701)..(2701): n equals a,t,g, or c
  misc_feature (2748)..(2748): n equals a,t,g, or c
  misc_feature (2756)..(2756): n equals a,t,g, or c
  misc_feature (2787)..(2788): n equals a,t,g, or c
  misc_feature (2818)..(2818): n equals a,t,g, or c
  misc_feature (2834)..(2834): n equals a,t,g, or c
  misc_feature (2855)..(2855): n equals a,t,g, or c
gtggatgtgatcttggctccccggggacgatgtcagctcttcctggctccttctcagccttgttgctgtaactgctgctcagtccaccattgaggaacaggccaagacatttttggacaagtttaaccacgaagccgaagacctgttctatcaaagttcacttgcttcttggaattataacaccaatattactgaagagaatgtccaaaacatgaataatgctggggacaaatggtctgcctttttaaaggaacagtccacacttgcccaaatgtatccactacaagaaattcagaatctcacagtcaagcttcagctgcaggctcttcagcaaaatgggtcttcagtgctctcagaagacaagagcaaacggttgaacacrattctaaatacaatgagcaccatctacagtactggaaaagtttgtaacccagataatccacaagaatgcttattacttgaaccaggtttgaatgaaataatggcaaacagtttagactacaatgagaggctctgggcttgggaaagctggagatctgaggtcggcaagcagctgaggccattatatgaagagtatgtggtcttgaaaaatgagatggcaagagcaaatcattatgaggactatggggattattggagaggagactatgaagtaaatggggtagatggctatgactacagccgcggccagttgattgaagatgtggaacatacctttgaagagattaaaccattatatgaacatcttcatgcctatgtgaggccaaagttgatgaatgcctatccttcctatatcagtccaattggatgcctccctgctcatttgcttggtgatatgtggggtagattttggacaaatctgtactctttgacagttccctttggacagaaaccaaacatagatgttactgatgcaatggtggaccaggcctgggatgcacagagaatattcaaggaggccgagaagttctttgtatctgttggtcttcctaatatgactcaaggattctgggaaaattccatgctaacggacccaggaaatgttcagaaagcagtctgccatcccacagcttgggacctggggaagggcgacttcaggatccttatgtgcacaaaggtgacaatggacgacttcctgacagctcatcatgagatggggcatatccagtatgatatggcatatgctgcacaaccttttctgctaagaaatgsagctaaygaaggattccatgaagctgttggggaaatcatgtcactttctgcagccacacctaagcatttaaaatccattggtcttctgtcacccgattttcaagaagacaatgaaacagaaataaacttcctgctcaaacaagcactcacgattgttgggactctgccatttacttacatgttagagaagtggaggtggatggtctttaaaggggaaattcccaaagaccagtggatgaaaaagtggtgggagatgaagcgagagatagttggggtggtggaacctgtgccccatgatgaaacatactgtgaccccgcatctctgttccatgtttctaatgattactcattcattcgatattacacaaggaccctttaccaattccagtttcaagaagcactttgtcaagcagctaaacatgaaggccctctgcacaaatgtgacatctcaanctctacagaagctggacagaaactgttcaatatgctgaggnttggaaaatcagaaccctggaccctagcattggaaaatgttgtaggagcaaagaacatgaatgtaaggccactgctcaactactttgagcccttatttacctggctgaaagaccagaacaagaattcttttgtgggatggagtaccgactggagtccatatgcagaccaaagcatcaaagtgaggataagcctaaaatcagctcttggagataaagcatatgaatggaacgacaatgaaatgtacctgttccgatcatctgttgcatatgctatgaggcagtactttttaaaagtaaaaaatcagatgattctttttggggaggaggatgtgcgagtggctaatttgaaaccaagaatctcctttaatttctttgtcactgcacctaaaaatgtgtctgatatcattcctagaactgaagttgaaaaggccatcaggatgtcccggagccgtatcaatgatgctttccgtctgaatgacgacagcctagagtttctggggatacagccaacacttggacctcctaaccagccccctgtttccatatggctgattgtttttggagttgtgatgggagtgatagtggttggcattgtcatcctgatcttcactgggatcagagatcggaagaagggcctgtaaatggaattcctgcattgctctaaccatgtacaaccttggacttagcttttacctgtaactggcttctgagagacaaagaggagaaaccttcactcctagtacacctattacagctgcagaggtagaggagacagttgcagaactagttacaatgacgataagaaacaatactttgttattccatagcacctttaatgttcatgtgtattatctcagctagccttgaaccgcctaagtaaggtgatgaggacgggtttaagccccactgatattttaaaagcccagagaaaagtgttcgttcctctactaacctgttcttttagagcagggatctgcatactaggcctgcagccnaaatgagtaggtagcccactacctatttttgtatagccagagggctnagaatggnttttacattttaagtggttttacatttaagnncaaaagaaggataatatttcatgacaagtnaaaattatatgaactnaaaattgtatgaattttatgnatttatatttcagtattcataattaaagttttattgaactacaaaaaaaaaaaaaaaaaaaaaa

SEQ ID NO: 956 - DNA, 1587 bp, Homo sapiens
ttttttttttttttttttttttttttagcakggactcaatggtcatatgttttaatatggagtggcagaaaagcatgtccgaaaaaacacattgctttattttgagacaaagaacattgtataaaaaaactccagttgtagaaatcaggacagacacacagcaacttatatacagatactatacacgtgggccctgccctttaggctacactctaggcagaatgtacacatgggcactgcccttacagctacactctaagaacaggttggcacagcccccctgctggcacagctctggggagtgctgccccaggatgggagagaatgcagtacctggctacaaacttctctgtggcagctccacagatgaggtcttgctgggagatgctgggtcagcccaagcatgctgcctctcctgtacctggcttccaagcaagaaactgtttcttgcttttccttcagtcagttcatctgggcatcctggctctctcctggagggggcatctttgacaagctttgcccatccacgtggccccttccagctcagctcccactgtgccttaagggaccatgcctgcacagcttgtttctttggcttaaaggcaggaatggtgggaaaggactgtctccacttctttctccatccctccgaggtgaaggtggggatggcactgtcgggctggttggcctccttccggttgaaaaccttaataytgacccgttttgaggctgctaggtgatagcttatgcctgtggtgggagtggttcccagggctgggggctctgaaagtggccccaagacaggtttggagtgcctgtccctctcttcagcctgtccctctttaaggccaggtgtggcayacaccttcacggggtttgcagcagcagaagtggaaggagcagcacagtccaggcaagtgggaagaggcgtggggcagcactgtgaccgatgctatgtagaacccgcacctctgggtcatctgctgcaagtctcttctcctgtggattgwcatgggcctgaggactgtgagtgattttgccactgacagtcaccttcaacctcaagcagcggtcttcatgctggtggatgggtttggagatgtagtagtagctgtgtccttctttgaactccttgcccagggtgaaaggtgtgaagcgctggaacttctcagacagcttctccgggccatgcttggcactgggccggttgcactgccagcggacttggtccttggactggggctggcacagctggtactcctcatgctccaccaggtacagtatgtactgctccatggcagcgtctgccacagagtgatcttcatagtgcggacagatgatgtccacgtagtcattcagctgcacatgtatggtgtagtcctcattccggaacttgggatttgaactgttccagaagacggtgtggcgatcagcagcggccagactgcagcacagacccaagagaggggcccagaggaactccatagcgcggggcctggccaggccgagcggggacgcgggtctcctatgggtctgggttcccactggctttctccgcggcgcagtcagcgctgggctcacagatct

SEQ ID NO: 957 - DNA, 2415 bp, Homo sapiens
  misc_feature (2395)..(2395): n equals a,t,g, or c
ccgcccgccagacccggatgagagcgcacgcttcggggtctccgggaagtcgcggcgccttcggatgtggcggatgcggccgtgagccggcgggggaggtgctgctgctgcctccactgtactcagacccaggtagcacaggattgtccatcctccagcagctcagtgcaacggtgtgaactcagcctgtttcagagcctccacaccatgacctccaagaagctggtgaactcggtggctggctgtgctgatgacgctcttgctggcctggtggcctgcaaccccaacctgcagctcctgcagggccaccgcgtggccctccgttctgacctggacagcctcaagggccgggtggcactgctgtcgggtgggggctctggccatgagcctgcccatgctggtttcatagggaaggggatgctgactggggtcatcgcgggagctgtgttcacctccccggcagtgggcagcatcctggcagccatcagggccgtggcccaggccggcacagtggggacgctccttatcgtgaagaactacactggggatcggctcaacttcggcctggcccgggagcaggcccgggctgaaggcatcccggtggagatggtggtgattggggacgacagcgccttcactgtcctgaagaaggcaggccggcgggggctgtgcggcaccgtgcttatacacaaggtggcaggtgctctggctgaggctggtgtggggctggaggagatcgcaaagcaggtgaacgtggtcaccaaggccatgggtaccctgggggtgagcttatcctcctgcagcgtccctggttccaaacccaccttcgagctctcagccgacgaggtggagctgggcctggggatccacggggaagctggtgtgcgccggataaagatggcaaccgccgatgagattgtgaaactcatgctcgaccacatgacaaacaccaccaacgcgtcccatgtgcctgtgcagcccggctcctcagttgtgatgatggtcaacaacctgggtggcctgtcattcctggaactgggcatcatagccgacgctaccgtccgctccctggagggccgcggggtgaagattgcccgtgccctggtgggcaccttcatgtcagcactggagatgcctggcatttctctcaccctcctgctggtggatgagcctctcctgaaactgatagatgctgaaaccactgcagcagcctggcctaacgtggctgcagtctccattactgggcggaagcggagccgggtagcccctgccgagccccaggaggcccctgattccactgctgcaggaggctcagcctcgaagcggatggcgctggtgctggaacgggtgtgcagcactctcctgggcctggaggaacacctgaatgccctggaccgggctgctggtgacggcgactgtggcaccacccacagccgtgcggccagagcaatccaggagtggctgaaggagggcccaccccctgccagccctgcccagctgctctccaagttgtctgttctgctcctggagaagatgggaggctcatctggggcgctctatggcctgttcctgactgcggctgcacagcccctgaaggccaagaccagcctcccagcctggtctgctgccatggatgccggcctggaagccatgcagaagtatggcaaggctgctccaggggacaggactatgctggattctctgtgggcagcggggcaggagctccaagcctggaagagcccaggagctgatctgttacaagtcctgaccaaagcagtcaagagtgccgaagctgcagccgaggccaccaagaatatggaagctggagccggaagagccagttatatcagctcagcacggctggagcagccagaccccggggcggtggcagctgctgccatcctccgggccatcttggaggtcttgcagagctagggtgtgtgactgcctcccttggcctcagctcctctcactgctgtgctgaggtggcctttgtcacttccttctgccttccaaccctcaccttcccccggcctggccccattggcccaccctctaagttgagcaggaaatcctccaccaagcttccagaactacagacagcacccagagtgagctggagtgggtccccatgcctctccagcatgccctttccctttgcaggagggtggagtccctgggtcatgccctcccctgccagctctgggcttcagagataaggcattttccttgtgcagcctttacctggcaatcctaatttggttttaagactccctgtgaaatgctttccgcaccttaaccccagtgagcgtgaaaaagaaagttaataaactataatacatggaagcaaaaaaaaaaaaaaaaaaaactcgagggggggcccggtacccaattngccctatagtgggtcttcga

SEQ ID NO: 958 - DNA, 1949 bp, Homo sapiens
aattcggcacgagggctgggtggaggagggagcagaaaaaacccaactcagcagatctgggaactgtgagagcggcaagcaggaactgtggtcagaggctgtgcgtcttggctggtagggcctgctcttttctaccatggcagcccagggctatggctattatcgcactgtgatcttctcctttgtcatgccatcattggtggaagagatccctttggacaaggatgatttggggttcatcaccagcagccagtcggcagcttatgctatcagcaagtttgtcagtggggtgctgtctgaccagatgagtgctcgctggctcttctcttctgggctgctcctggttggcctggtcaacatattctttgcctggagctccacagtacctgtctttgctgccctctggttccttaatggcctggcccaggggctgggctggcccccatgtgggaaggtcctgcggaagtggtttgagccatctcagtttggcacttggtgggccatcctgtcaaccagcatgaacctggctggagggctgggccctatcctggcaaccatccttgcccagagctacagctggcgcagcacgctggccctatctggggcactgtgtgtggttgtctccttcctctgtctcctgctcatccacaatgaacctgctgatgttggactccgcaacctggaccccatgccctctgagggcaagaagggctccttgaaggaggagagcaccctgcaggagctgctgctgtccccttacctgtgggtgctctccactggttaccttgtggtgtttggagtaaagacctgctgtactgactggggccagttcttccttatccaggagaaaggacagtcagcccttgtaggtagctcctacatgagtgccctggaagttgggggccttgtaggcagcatcgcagctggctacctgtcagaccgggccatggcaaaggcgggactgtccaactacgggaaccctcgccatggcctgttgctgttcatgatggctggcatgacagtgtccatgtacctcttccgggtaacagtgaccagtgactcccccaagctctggatcctggtattgggagctgtatttggtttctcctcgtatggccccattgccctgtttggagtcatagccaacgagagtgcccctcccaacttgtgtggcacctcccacgccattgtgggactcatggccaatgtgggcggctttctggctgggctgcccttcagcaccattgccaagcactacagttggagcacagccttctgggtggctgaagtgatttgtgcggccagcacggctgccttcttcctcctacgaaacatccgcaccaagatgggccgagtgtccaagaaggctgagtgaagagagtccaggttccggagcaccatcccacggtggccttccccctgcacgctctgcggggagaaaaggaggggcctgcctggctagccctgaacctttcactttccatttctgcgccttttctgtcacccgggtggcgctggaagttatcagtggctagtgaggtcccagctccctgatcctatgctctatttaaaagataacctttggccttagactccgttagctcctatttcctgccttcagacaaacaggaaacttctgcagtcaggaaggctcctgtacccttcttcttttcctaggccctgtcctgcccgcatcctaccccatccccacctgaagtgaggctatccctgcagctgcagggcactaatgacccttgacttctgctgggtcctaagtcctctcagcagtgggtgactgctgttgccaatacctcagactccagggaaagagaggaggccatcattctcactgtaccactaggcgcagttggatataggtgggaagaaaaggtgacttgttatagaagattaaaactagatttgatactgaaaaaaaaaaaaaaaaaaac

SEQ ID NO: 959 - DNA, 892 bp, Homo sapiens
ggaacaaaagctggagctccaccgcggtggcggccgctctagaactagtggatcccccgggttgcaggaattcggcacgagacagaaagaagttattcaacaggagaccagaagggttatgagaaaggaatagtcttcaagaagtgatttccatgggactcctgcttaaaccatttaaaatattggggtgcttaaaataggtttttaaaatactaagctttataggataaaagtatgtgcaagcttatgtactttttgttcctcttaagaatatattttgatcttttagcaggttcctttgtccacttctcttccattttgctttttattgctttctgtgctgtgcttactgtgcagctctgggactgtttagttctatgtctgatgtgtggaaaaatctattcttactgcctaatagtgtttaggaggtaataagacacaaggagccaggaaccgtatcagtttaatctatcttgagtggactgaatgtactttgtgggcacttattttgaacatgatggtgctgtggtaattggtatgattagtgtaatactttgctatattataaaatagttaaaaatggagttagatgttagataagatagcttgctcattattcattagaatcaattagttattactttgcattcactataaacacatttatttctctttcccaaaagtaaatgcttagcttattggkcaaatcagaagacagtcttttgaaatgattaattataccctattgttttaaaccagaactgttctcgkcattttaattcagctaatggttcctgacatggcttctgttgctctgaaaatggcaaaggaaaaagaagaggtgttttaagatatatcttatcaaaaaaggagacatgctggcatatgtatt

SEQ ID NO: 960 - DNA, 1665 bp, Homo sapiens
ggcacgaggaagattactggtgtggtaaggcttgataaatgctttataaactccctcaaacctttctttactgtttttttgttttgtcttgtttttgtttttgtttttgtttttgtttttgtttttcccttgtctcccctgggaaaatgggaaattttacagttggtaaatctaagccaaaattattttgaaataaaggaattctggatgtccagtttagtcctcgttttcttacgttaatctgggaccttatcacccataatatggtgattacttctctttctaaaaacatagtagctagtaaataagtaaaaagaattgtcttttcattcactttaagtaagatgtggtataattcttaccatgtgccatcctgtcagttttaacaaagcattttcacagaaatttgtgtactaagacaaactgacacattttgactcatacaaatggcaaattagtccttaaaaattctgtgagagaaataactctgtgtgtacatacatatgcatgtaaagtgttgtgtaagatcattggtagcttaattatactggataattgtaatgttatatacaaatttcttatataaaagtatgctgcattattaacatttgtttaacttttcttatttttctttttctgggtttcaactggaatcccattggtggggatgtaccttaagtttccttgtggaataatagactttcacatccagaaagagaagttcagaggcctttctcaatttacagagttgaagaggaaaggcaaatggaggaataaacttcattgtcattgggattaatttggctagactcaatctcttgagccttaaaatgagaaagtaatatccattacatgtttagagttctcaaatagttgatactattattaaatgtttcaaattttattggggtagatactaaaaattagtacactgtcctaatgaagtttaaatgaacaagttttacatttcttaggattcaggaatatatggaatctatttgtatttaattgacttgagagccacagagattgtgttgatttatgagctggactcctattgttttagaaacatgcagtaatgattaacttgtgtcaatgatggtaatgagaccaaacttgtacatttaattaagggtaccagttctttttatgttactagactataccttggcctttaaaaatgaatctcactgattaaagagaacaggcattattaggatagcattccaccacaactagaaacattcaaataatgtgtcttaattgtaatctgtatataggaaaatttttcctatggatatttttggtgttttaccacagtgaactgatttgtagcacttatgaagtgcagaaggtaatattcttgaaaatagaaaaaggttgggtgagcaggctttaatgcctttcccccaagaatatacatcgaatttttcttaatcttttggggttggccagcttccagatttcattaataatgagctctgcctttaataaaagtacatgatcatagctacactgtatgtttaggtggtgtgaaatgatttataatcacagcttgaactgtgtttgcttggtactgtcatagtgattacaaatttcatggaatgcgaagagcaacaataaataaaaaataccactcaccctccaaaaaaaaaaaaaaaaaaa

SEQ ID NO: 961 - DNA, 891 bp, Homo sapiens
ggcacgagcgcagcagccaccgccgcgtccctctctccacgaggctgccggcttaggacccccagctccgacatgtcgccctctggtcgcctgtgtcttctcaccatcgttggcctgattctccccaccagaggacagacgttgaaagataccacgtccagttcttcagcagactcaactatcatggacattcaggtcccgacacgagccccagatgcagtctacacagaactccagcccacctctccaaccccaacctggcctgctgatgaaacaccacaaccccagacccagacccagcaactggaaggaacggatgggcctctagtgacagatccagagacacacaagagcaccaaagcagctcatcccactgatgacaccacgacgctctctgagagaccatccccaagcacagacgtccagacagacccccagaccctcaagccatctggttttcatgaggatgaccccttcttctatgatgaacacaccctccggaaacgggggctgttggtcgcagctgtgctgttcatcacaggcatcatcatcctcaccagtggcaagtgcaggcagctgtcccggttatgccggaatcattgcaggtgagtccatcagaaacaggagctgacaacccgctgggcacccgaagaccaagccccctgccagctcaccgtgcccagcctcctgcatcccctcgaagagcctggccagagagggaagacacagatgatgaagctggagccagggctgccggtccgagtctcctacctcccccaaccctgcccgcccctgaaggctacctggcgccttgggggctgtccctcaagttatctcctctgttaagacaaaaagtaaagcactgtggtctttgaaaaaaaaaaaaaaaaa

SEQ ID NO: 962 - DNA, 1936 bp, Homo sapiens
ggcacgagttgacatgagggaaaggtcttaagacctttaagacatttaagaggaaaaatgagcccaaaatgcatgtgtttggaaggcccacagctgggcacagccatgcatgttcctcacgtccaccataggtttatgctgcctgaccccttgggtctttgctcatttcccttagtttccctagttcattccccatggggagctgggacccttctggatgacctcttctctgaggcgcccatctcgtgctcccagggagcactcccatctcctccctcccaggggaagtacacattgccttatctccatgtgtcttaggatccttcttgtccttacactggtgtcttcaaacgacatgtcctataagtaaatgtgggtaagttgaatgacctgagcatccattcctcagctattcaaaaagtaggggtagtgccacctatcttggcagtgtgttgagggtgcccagcacgtaccttgccatccctcgttctgtaggctctcacttccagttcctcagatgaggtacagggcagggaggagcttctcccgttactgtcatctcagtctaaccacattcaggacacttgtttattttaaataaacaggtgaattaagaaaaagttttttaagtctttacctaatcagtctccaggctctctttttggcctgttcctcccttcctcctggccgcctccctcccatgcctctcatgtgcctcctgcagggctgggcccccacttctcttgggacctgtgctttggggcactccccgtcttcacctccttcctttagctccattgatgactttcccccttgctgcttctcccatggctcatctcttgccccctggttcgccactctgccctcactttgtactctttgtagaatcttgagatgactcctcctgtgtccccagccctgctctgcagctgctcctgctttgtgctggctcatcaggctcaggcatccgaatggcagctccttggcttgccctgtctctggtttctacggatggtcacaggggtcttcggggttaccccgccctctttccttcttccctcatacccctcagtccttccttttcagcccctcctttccatccctgtcttcctgcccccaagctgtgggaccctaagctcctgctgtgaactgtcgactgtgctcttgaagtctaggtgatgatgtgtcattgcattggtagaaagcggcctgcttactgctgcttagctgcttcccgaagagggaacagactgctcgctggtgtttaggtctccatgcccggcccagctctctcctcctctgcccacccaacaacctctgtggcccggatggatgttatcaggaaggagggtgtccagagcggggaattgtgttatagggaaggtggagcatttgagagaaggggcatccgaggccaccagactcggaggtaagcttgccatggattcacatgggggccagtcgggcagccccatccatcagctgtccatcagctcatagctgtgtctccgccacaggttcccattaaggatgtcgaggcggggaatggtgaggaagagtcgggcatgggtgctggagaagaaggagcggcacaggcgccagggcagggaagtcagacctgacacccagtacaccggccgcaagcgcaagccccgcttctaagtcaccacgcggttctggaaaggcacttgcctctgcacttttctatattgttcagctgacaaagtagtattttagaaaagttctaaagttataaaaatgttttctgcagtaaaaaaaaagttctctgggccgggcgtggtggctcacacctgtaatcccagcaccttgggaggctgaggtgggaggatcatttgaggccaggagtttgagacctgcctgggcaacataatgaaacttcctttccagggagaaaaaaaaaaaaaaaaaaaaaaaa

SEQ ID NO: 963 - DNA, 1970 bp, Homo sapiens; identical to SEQ ID NO: 386

SEQ ID NO: 964 - DNA, 1285 bp, Homo sapiens
ccacgcgtccgcgccccggggccggccggtctgctcgggagcgcgccccgtggcccagccctgtctccttttagcataggggcttcggcgccagcggccagcgctagtcggtctggtaaggatttacaaaaggtgcaggtatgagcaggtctgaagactaacattttgtgaagttgtaaaacagaaaacctgttagaaatgtggtggtttcagcaaggcctcagtttccttccttcagcccttgtaatttggacatctgctgctttcatattttcatacattactgcagtaacactccaccatatagacccggctttaccttatatcagtgacactggtacagtagctccagaaaaatgcttatttggggcaatgctaaatattgcggcagttttatgcattgctaccatttatgttcgttataagcaagttcatgctctgagtcctgaagagaacgttatcatcaaattaaacaaggctggccttgtacttggaatactgagttgtttaggactttctattgtggcaaacttccagaaaacaaccctttttgctgcacatgtaagtggagctgtgcttacctttggtatgggctcattatatatgtttgttcagaccatcctttcctaccaaatgcagcccaaaatccatggcaaacaagtcttctggatcagactgttgttggttatctggtgtggagtaagtgcacttagcatgctgacttgctcatcagttttgcacagtggcaattttgggactgatttagaacagaaactccattggaaccccgaggacaaaggttatgtgcttcacatgatcactactgcagcagaatggtctatgtcattttccttctttggttttttcctgacttacattcgtgattttcagaaaatttctttacgggtggaagccaatttacatggattaaccctctatgacactgcaccttgccctattaacaatgaacgaacacggctactttccagagatatttgatgaaaggataaaatatttctgtaatgattatgattctcagggattggggaaaggttcacagaagttgcttattcttctctgaaattttcaaccacttaatcaaggctgacagtaacactgatgaatgctgataatcaggaaacatgaaagaagccatttgatagattattctaaaggatatcatcaagaagactattaaaaacacctatgcctatacttttttatctcagaaaataaagtcaaaagactatgaaaaaaaaaaaaaaaaaaaaaaagggcggccgct

SEQ ID NO: 965 - DNA, 1443 bp, Homo sapiens
atgaagctgggccgggccgtgctgggcctgctgctgctggcgccgtccgtggtgcaggcggtggagcccatcagcctgggactggccctggccggcgtcctcaccggctacatctacccgcgtctctactgcctcttcgccgagtgctgcgggcagaagcggagccttagccgggaggcactgcagaaggatctggacgacaacctctttggacagcatcttgcaaagaaaatcatcttaaatgctgtgtttggtttcataaacaacccaaagcccaagaaacctctcacgctctccctgcacgggtggacaggcaccggcaaaaatttcgtcagcaagatcatcgcagagaatatttacgagggtggtctgaacagtgactatgtccacctgtttgtggccacattgcactttccacatgcttcaaacatcaccttgtacaaggatcagttacagttgtggattcgaggcaacgtgagtgcctgtgcgaggtccatcttcatatttgatgaaatggataagatgcatgcaggcctcatagatgccatcaagcctttcctcgactattatgacctggtggatggggtctcctaccagaaagccatgttcatatttctcagcaatgctggagcagaaaggatcacagatgtggctttggatttctggaggagtggaaagcagagggaagacatcaagctcaaagacattgaacacgcgttgtctgtgtcggttttcaataacaagaacagtggctctggcacagcagcttaattgaccggaacctcattgattattttgttcccttcctccccctggaatacaaacacctaaaaatgtgtatccgagtggaaatgcagtcccgaggctataaattgatgaagacattgtaagcagagtggctgaggagatgacatttttccccaaagaggagagagttttctcagataaaggctgcaaaacggtgttcaccaagttagattattactacgatgattgacagtcatgattggcagccggagtcactgcctggagttggaaagaacaacactcagtccttccacacttccacccccagctcctttccctggaagaggaatccagtgaatgttcctgtttgatgtgacaggaattctccctggcattgtttccaccccctggtgcctgcaggccacccagggaccacggtcgaggacgtgaagcctcccgaacacgcacagaaggaaggagccagctcccagcccactcatcgcagggctcatgattttttacaaattatgttttaattccaagtgtttctgtttcaaggaaggatgaataagttttattgaaaatgtggtaactttatttaaaatgatttttaacattatgagagactgctcagattctaaaaaaaaaaaaaaaaaaaaaaaaaaaaaaaaaaaaaaaaaaaaaaaaaaaaaaaaa

SEQ ID NO: 966 - DNA, 1983 bp, Homo sapiens
ggcacgagagagcagcggcccgagccggggccatggcgaagctgctgagctgcgtcctaggcccccggctctacaaaatctaccgggagagggactctgaaagggccccggccagcgtccctgagacgccaacggcagtcactgccccccattccagctcctgggatacgtactatcagccccgtgccctggagaaacatgctgacagcatcctggcactggcttcagtattctggtccatctcttattactcctctcccttcgccttcttctacttgtacaggaaaggttacttgagtttgtccaaagtggtgccgttttctcactatgctgggacattgctgctacttctggcaggtgtggcctgcctccgaggcattggccgctggaccaacccccagtaccggcagttcatcaccatcttggaagcaacacatcggaaccagtcttcagaaaacaagaggcagcttgccaactacaactttgacttccggagctggccagtcgacttccactgggaagaacccagcagccggaaggagtctcgagggggcccttcccgccggggtgtggccctgcttcgcccagagcccctgcaccgggggacagcagacaccctcctcaaccgggttaagaagctgccttgtcagatcaccagctacctggtggcgcacaccctagggcgccggatgctgtatccaggctctgtgtacctgctgcagaaggccctcatgcctgtgctgctgcagggccaggcccgactggtggaagagtgtaatgggcgccgggcaaagctgctggcctgtgatggcaatgagattgacaccatgtttgtggaccggcgggggacagctgagccccagggacagaagctggtgatctgctgtgaggggaatgctgggttttatgaggtgggctgcgtctccacgcccctggaagctggatattcagtcctgggctggaatcatccaggctttgctggaagcacgggggtgccattcccgcagaatgaggctaatgccatggatgtggtggtccagtttgccatccaccgcctgggcttccagccccaggacatcatcatctacgcctggtccatcggcggcttcactgccacgtgggcagccatgtcctacccagatgttagtgccatgatcctggatgcctcctttgatgacctggtgcccttggccttgaaggtcatgccagacagctggaggggcctggtgaccaggaccgtgaggcagcatctcaatctaaacaacgcggagcagctgtgcagataccagggtcctgtactgctgatccggagaaccaaggatgagatcatcaccaccacggttcctgaggacatcatgtccaaccgaggcaatgacctcctgctgaagctcctgcagcatcggtatccccgggtgatggcagaggagggtcttcgagtggtgaggcagtggttggaggcctcctcacagctggaggaagcctcaatttatagccgatgggaggtggaagaggactggtgtctgtctgtcctccgctcctaccaggcagaacacgggcccgacttcccctggagcgtgggggaggacatgagtgcagatggacggcggcagctggctttgtttctggctcggaagcatctgcacaactttgaggccactcactgcaccccactcccagcccagaacttccagatgccctggcacctctagggaccaactgggactcattatggaagaatggggtgagaggagacatgaggaaagaccctcttatttgtgattctctgtgttcatgttgctgtttatagtttgtggaaagtgggggaccatcccccttctcaccactgttcctcttgcacgtttcccctcattcatgtggctgtacttaaccttctccaacatacatcctgcattacatgaatggattattcctaataattaataaaaaggtattttttctactatcaaaaaaaaaaaaaaaaaa

SEQ ID NO: 967 - DNA, 2224 bp, Homo sapiens
ggcacgaggggctgtgatctcaggaatctggctggataggtccaaaacctacaaagagacaaccctggtagtctatatcatgacactggtgggcatggtggtgtacacgtttaccttgaacctgggacacctgtgggtagtgttcatcactgctggcacaatgggcttctttatgactggctatctcccactgggatttgagtttgctgtggagctcacgtacccagaatcagaaggcatctcctccggcctcctcaacatatctgcacaggtatttgggatcatctttaccatctcccagggccagattattgacaactatggaaccaagcctgggaacatcttcctgtgtgtgttccttactcttggagcagccctcactgcattcattaaggcagatctccggagacagaaagcaaacaaagaaactcttgagaacaaactccaagaggaggaggaggagagcaacaccagcaaagtgcccactgctgtgtcagaggatcatctctgagaggaaggtggtgacaactcagggaacacgaacaccccaccttttccttcagcacagctctcaccgccagcacaaagggcttcgctagagatgtttttggagggaatcagtgggactatttgtggcatggatggcctattcctcctagaacccacgtaagagcttggatgatttagttggagaaaattgcacctatcaccaaatgcaaatttgattcccacctccacccccttttaggttatgggagttggtgttgggacagggtggcagagaatattggagtcaatcctagcttggtctcttgccttccctcttttcctccatccatcgtggacaatgcctgcaaaattttcacaggaagaaagcctattcaggatattaacttgaaatttccagtgtcctaagagcctctcatgaagcccagttctaataagtggcaagctgctctgccggggtcatctcctgggtcatcggactgattgctcaagttctgcaggagaggaagcaccattagaacaactccatcagaacagctccaccgggacttgtgggcctaaattttcctggcctaacgggtctgtctccaaaccctctttcctaagagctgagcaaaccaaccataataaacttgacaaaagactttgttgtggccatgacagagataccgactcaggagggctacctacctaggtgtgatcatgctgggggctaccttctgagtatatttgtgaaagcacatatttgggaactctggtagcttgagttgggaatgggaaggttcttttttacagaagtacttccccagggacttctgtgtgtcacagtcacctctgatgcctttatcttgatgttgcattgggaatctcagccatcagcccaagtgcttgttttattccaaggcagggtaatccccgtcaacttactctaacctttgctgaaaactaatcttgattcattctactctgaaaatccaaaggtgcttctgagagataagagggaaggggtagaaggaaaggtgccccttgaaatgggaattgagcctgttagaattaaaagcttatctcacctctgctggggacagtatttgcaccaccaacccctctcctcacctgctttgagcgataatctttatcagatattctaaacttaaagggattccctttaaaccaactcaagctgatctttcctatctagcctgctgtttggctgtactcatgggctttggtaatatctcctaaaaatgaggttttggtaatttttcctatgcattgggcaactgtgatcgtgaccactgtgctgtcttgctccagccactgccctggcctcagcatatcagggcagcctgtgctggctgcaatactgtggtgcttgggccactgcctgagaggagccaggtttgtgtgtgtctgcatgtgtgtgtgtgtgtgtttgtacagattcaagcaatggatgcaaggaacatgctgtatgtaatagaagaaagaagtccacgttttcggcagaagtagtgagtcagtgtggaagagaggtgagggtgtgctttactttttgataaagagaaagatgtttactcataaacccttcaaaaggtattaacaaaatgtttaccaaacctattgctttattttaaaaacataatttgtgttttctatttgtaagatctgacatttcgaggcaataaaaacttctcagaaaaaaaaaaaaaaaaaaaaa

SEQ ID NO: 968 - DNA, 1098 bp, Homo sapiens
gaattcccgggtcgacccacgcgtccgcatggcccgggggccgctggccgcccgcggactgcggctgctgctgccgctcctgccgctcctgccgctgccgcaggtgggtcgggcggcgttctctctcggttcggcaaccgcggggcgggtccctgctcggaccacgcccctcccgggctcacccttgtccccacaggtggcgctgggcttcgcggacggcagctgcgacccctcggaccagtgcccgccccaggcccgctggagcagcctgtggcacgtggggctcatcctgctggcggtcctcctgcttctgctgtgtggtgtcacagctggttgtgtccggttctgctgcctccggaagcaggcacaggcccagccacatctgccaccagcacggcagccctgcgacgtggcagtcatccctatggacagtgacagccctgtacacagcactgtgacctcctacagctccgtgcagtacccactgggcatgcggttgcccctgccctttggggagctggacctggactccacggctcctcctgcctacagcctgtacaccccggagcctccaccctcctacgatgaagctgtcaagatggccaagcccagagaggaaggaccagcactctcccagaaacccagccctctccttggggcctcgggcctagagaccactccagtgccccaggagtcgggccccaatactcaactaccaccttgtagccctggtgccccttgaaggaggtaggagaacggaccagagcttggagaactaatgcttggagccaagggccccagcccaccccaccgtcccacacattgctgtggccccaacctcggtgccatgttacaccggcccctggcgtcacccactaggcaggctgctgctttcagcctcagcccctggcccagccccagcaggccctcagcctggaagaggccccttgggtctaagcctcggctgggagctcagggccacctgtgacgtctgcatcttcttggagagagaataaagtttgtatttaagtggaaaaaaaactgcactcctccttaccacaaaatgggcggccgctctagaggatccctcgaggggcc

SEQ ID NO: 969 - DNA, 1120 bp, Homo sapiens; identical to SEQ ID NO: 787

SEQ ID NO: 970 - DNA, 773 bp, Homo sapiens
ggcacgagttctggcctctcatttccttacactctgacatgaatgaattattattatttttctttttcttttttttttttacattttgtatagaaacaaattcatttaaacaaacttattattattattttttacaaaatatatatatggagatgctccctccccctgtgaaccccccagtgcccccgtggggctgagtctgtgggcccattcggccaagctggattctgtgtacctagtacacaggcatgactgggatcccgtgtaccgagtacacgacccaggtatgtaccaagtaggcacccttgggcgcacccactggggccaggggtcgggggatgttgggagcctcctccccaccccacctccctcacttcactgcattccagattggacatgttccatagccttgctggggaagggcccactgccaactccctctgccccagccccacccttggccatctccctttgggaactagggggctgctggtgggaaatgggagccagggcagatgtatgcattcctttatgtccctgtaaatgtgggactacaagaagaggagctgcctgagtggtactttctcttcctggtaatcctctggcccagccttatggcagaatagaggtatttttaggctatttttgtaatatggcttctggtcaaaatccctgtgtagctgaattcccaagccctgcattgtacagccccccactcccctcaccacctaataaaggaatagttaacactcaaaaaaaaaaaaaaaaaaaaa

SEQ ID NO: 971 - DNA, 1060 bp, Homo sapiens
gctgaatgcaatgttgtcttggaaaacagctttccaagcatttcactcctgagcacttgccagtttcctcacttgttcttcacatatccaggcaaagacatcctgtttgctatatgaagcattgtatcccgtataaaaggaaggaaagagagaaatatatttttacactcatcactcctcaggggctgtacaatcatgtagaaattgtttaatgtgcttgtcaaatagccaaagagtgttaaaccctgagttcccacccatgtgtgtggtatggttaggattcatccagatacacagagagaggcacaacaggaggagaaaggataggggtgtggggacagcgggcccccaatatggtgtaatcgtggcaggtctctgcctgaagtgctatgtggggtttttcttgttttaattttgactttaacccctgatttgtaagtttttcataaaataaacagaatcataactcatgtagatggctataagtgccgtagtgttctgtgggtctctggtgtctgccagtgataagtgtggcaccccaggaaggctgtggaccccatcaaggtgctatgtgagggccatgcttggggtggtggtgggcccagtagaccctgcagccatccatccagcctgcccactcacactgcccttgtgtactcctgctttgctacgttatcattgatcaatgtccctggttacctatgtgtttgaattatcttcgtgttacaggtgtttaatgattttgctccttctagcttatttgtatttcacctgtttttctttaaatcaacatggttacactctgtttcagcaactgtataaattaaacacaaattattactactgctattgagttgtcatgatgaattcttttttatttctgaaattatagcatttcttgaatttaagagaacaaaaacttgaaaggcctatgtctccattttattaactattactaaatacatatttgatgctcataataataatacacatttattcattatttcctaaaaaaaaaaaaaaaaaaactcgagggggggcccggtacccaattcgccct

SEQ ID NO: 972 - DNA, 1179 bp, Homo sapiens
  misc_feature (1140)..(1140): n equals a,t,g, or c
  misc_feature (1163)..(1164): n equals a,t,g, or c
  misc_feature (1175)..(1175): n equals a,t,g, or c
ttaacttttttttttttttttctataagtgctttatttttatattctctatgaaaacatcaataattaagcccctttgttctaagccagaaacactgtaaaactaccattaaacaaggcagtatgccttacaagaaagacataaaatgtccaagggatatttagaacattttagttcttaaagtttcaacatgagaaatgttgaccacacactgtgaaatcatttcaataaataacaactgacattcatctaaacagttacaaaacagatgtgcacatacattcccctgccttcacaatgatctcattggccatttgcttggatccgccagcctctatcacagtggctggcatgttgcaggctcctcagaaatattaacataatgactggagaacatttgaaaacattctaccttcaaattaaatatgaatccagattgaactaacttggggttgacatttcaaaaagaatgaatataataggacagtgtgcaggtagagttaatcatacccttaattattttacacctaaaatattaacatagaatcttcaaaactaatgaataaataaataaatagaagacttctcctaagcgatgctcaaacacattaggcacaatccaggtggcctctgcagctgtgtctctctttcctcttctgttcctataagggcagggcctccttcaggaacagccaccagtgagcttcctcctcccttctggtcagttggatttgtcactgttcagcatcttttcgatgattttcttaactatgggggatgcaggattgaggcaagctttccgcccattcttgagtgtggctatgacttcggtttgggcgcagtggggtccgggggacttcacgttcacactttggatgttcttggggtgaattccctgcagggtctgcaagcactggcagcgcagttcagtggccacggacgctcctgctgcgcgccggccagcggctaccaggagcaggagcagcagtgccactcgcaggagccggggattgctgggggcggcggagagagcagcgcgggccatggggctcagcaggcgggtctggcggctgtgagaggagcggaagagctggcgaggaggtgcctgcggcccgggctctgtccccttctgtcgtccgnacgcaagggtcgacccgggaatnncggcccgcagncgtc

SEQ ID NO: 973 - DNA, 327 bp, Homo sapiens; identical to SEQ ID NO: 440

SEQ ID NO: 974 - DNA, 1612 bp, Homo sapiens
gtgcgccgctgctactgtggctgttgccgcgtttactcagcattagcgcgccggatatgaaggtcaacgatcgtgtcgcggctgaacgccaacatgtgctggcgtttgccctcgcgggcggcgtgctgctgttgatggctgtggtggtggcgctgtcgtttggtcgtgatgcgcacggctggacgtgggcgagcggggcgttgctcgaggatttaatgccctggcgctggccgcgaattatggcggcgctgtttgcgggcgtcatgctggcggtggcgggctgtattattcagcgactgaccggaaacccgatggcaagcccggaagtgctggggattagctccggcgcggcgtttggcgtggtgttgatgctgtttctggtgccgggtaatgcctttggctggctgttacctgcaggcagtctcggcgcggcggtgacgctgttgatcattatgatcgccgccggccgcggtggattttccccacaccgtatgttactggcggggatggcgttaagcaccgcgttcaccatgcttttgatgatgttgcaggcaagtggtgacccgcgaatggcgcaagtgctgacctggatttccggttcgacctacaacgcgaccgatgcgcaggtctggcgcaccggaattgtgatggtgattttgctggcgattaccccgctgtgccgccgctggctgaccattttaccgctgggtggtgataccgcccgagccgtaggaatggcgctgacgccgacgcgaattgcgctgctgctgttagcggcttgcctgacggcgaccgcgacgatgactattggaccgttgagttttgttggtttaatggcaccgcatattgcgcggatgatgggctttcgacggacgatgccacacatcgtaatttcggcgctggtgggtggtttactgctggtgttcgctgactggtgtgggcggatggtgctgtttccattccagatcccggcggggctgctgtcaacctttatcggcgcgccatattttatctatttgttgagaaagcagagccgttaatttttccatataacggccctgtacgcctggacggataaagcgtttacgcgacaacggatgcccgatgcgacgctggcgcgtgttatcgggcctacaaacggccccgaattgtaggtcggataaggcgttcacgccgcatccgacaaaccatgctggatcacaacttcgcaaacacccgacgtgcagcatcgatggtgttattgatatcttccatgctgtgcgccacggacataaagcccgcttcaaacgctgacggtgccaggtaaacaccttcgtccagcatcatatggaagaaacgcttaaagcgttccacgtcacaggccatcacatcctgatagcacgtcacggactcggcgtcggtaaagaaaataccgaacatgccgccaacgtggttaacgaccagcggaattccggcttcttctgccgcttccagcagaccttttgccagacgtgttgtcagctcatccagcgtttcgtgaacgcccggctgcgcgacttcattcagacaggcgaaacccgctgccatcgcaatcgggttaccggaaagcgtacccgcctgatagaccggaccc

SEQ ID NO: 975 - DNA, 1761 bp, Homo sapiens
tcgacccacgcgtccggtccgagtggagctgcgggacagcccgaacctccaggtcagccccgcggccctccatggcgctggtgcgcgcactcgtctgctgcctgctgactgcctggcactgccgctccggcctcgggctgcccgtggcgcccgcaggcggcaggaatcctcctccggcgataggacagttttggcatgtgactgacttacacttagaccctacttaccacatcacagatgaccacacaaaagtgtgtgcttcatctaaaggtgcaaatgcctccaaccctggcccttttggagatgttctgtgtgattctccatatcaacttattttgtcagcatttgattttattaaaaattctggacaagaagcatctttcatgatatggacagggggatagcccacctcatgttcctgtacctgaactctcaacagacactgttataaatgtgatcactaatatgacaaccaccatccagagtctctttccaaatctccaggttttccctgcgctgggtaatcatgactattggccacaggatcaactgcctgtagtcaccagtaaagtgtacaatgcagtagcaaacctctggaaaccatggctagatgaagaagctattagtactttaaggaaaggtggtttttattcacagaaagttacaactaatccaaaccttaggatcatcagtctaaacacaaacttgtactacggcccaaatataatgacactgaacaagactgacccagccaaccagtttgaatggctagaaagtacattgaacaactctcagcagaataaggagaaggtgtatatcatagcacatgttccagtggggtatctgccatcttcacagaacatcacagcaatgagagaatactataatgagaaattgatagatatttttcaaaaatacagtgatgtcattgcaggacaattttatggacacactcacagagacagcattatggttctttcagataaaaaaggaagtccagtaaattctttgtttgtggctcctgctgttacaccagtgaagagtgttttagaaaaacagaccaacaatcctggtatcagactgtttcagtatgatcctcgtgattataaattattggatatgttgcagtattacttgaatctgacagaggcgaatctaaagggagagtccatctggaagctggagtatatcctgacccagacctacaacattgaagatttgcagccggaaagtttatatggattagctaaacaatttacaatcctagacagtaagcagtttataaaatactacaattacttctttgtgagttatgacagcagtgtaacatgtgataagacatgtaaggcctttcagatttgtgcaattatgaatcttgataatatttcctatgcagattgcctcaaacagctttatataaagcacaattactagtatttcacagtttttgctaatagaaaatgctgattctgattctgagatcaatttgtgggaattttacataaatctttgttaattactgagtgggcaagtagacttcctgtctttgctttcttttttttttctttttgatgccttaatgtagatatctttatcattctgaattgtattatatatttaaagtgctcattaatagaatgatggatgtaaattggatgtaaatattcagtttatataattatatctaatttgtacccttgttgaaattgtcatttatacaataaagcgaattctttatctctaaaaaaaaaaaaaaaaaaa

SEQ ID NO: 976 - DNA, 1508 bp, Homo sapiens
gatattgtggcccgtgtactggcgataatggggatggtcagtgtcggctttttgctgttcattctctttacctctaacccgttctctcgcacgttgccgaacttcccgattgaaggtcgcgatcttaacccgctattgcaggatccggggctgatcttccatccgcctctgctttatatggggtacgtgggtttctcggtggcgtttgcttttgccattgcttctttgctgagcgggcgtctggacagcacttatgcgcgttttactcgtccgtggacgctggcagcgtggatcttcctgacgctcggcatcgtgctcggttccgcatgggcctattacgaactcggctggggtggctggtggttctgggatccggtagaaaacgcctcgtttatgccgtggctggtggggactgcgctgatgcactcactggcggtcactgaacaacgcgccagcttcaaagcgtggacattactgctggcaatcagtgccttctcgttgtgtctgttggggactttcctcgtgcgttccggcgtgctggtatcggtacacgcgtttgcgtctgatccggcgcgcggtatgtttatcctcgcctttatggtgctggtgattggcggttcgctgctgctgtttgccgcgcgtggacacaaagttcgctcacgcgtaaacaatgcgctgtggtcgcgggaatctttgctgttagcgaacaatgttttgctggtcgctgcgatgctggtggtgttgctggggacgctgctgccgttggtgcataagcaactgggactgggcagtatttcgattggcgaaccgttcttcaacaccatgtttacctggctgatggtgccgtttgcgctactgcttggtgtcggtcctctggtgcgctgggggcgggatcgcccgcgtaagatccgcaatttattgattatcgccttcatctctacgctggtgctgtcgctgctgttgccgtggctgttcgaaagcaaagttgtggcgatgacggtgctcggcctggcaatggcctgctggattgcggtgctggcaattgcggaagctgcgctacgtatttcacgcggcacgaaaaccaccttcagttattgggggatggtggcggctcaccttgggctggcagtgacaattgttggcattgcctttagccagaactatagcgttgagcgtgatgtgcgcatgaagtccggcgatagcgtcgatattcatgaatatcgcttcaccttccgtgatgtcaaagaggtgactggcccgaactggcgtggcggtgtggcgactatcggcgtaacgcgcgatggcaagccggaaacggtgctgtatgcggaaaaacgttattacaacactgccgggtcgatgatgaccgaagcggcaattgacggcggcatcacgcgtgacctgtacgcggccctcggtgaagagctggaaaacggcgcgtgggccgtgcgtctttactacaaaccatttgttcgctggatttgggcgggcgggctgatgatggcgtt

SEQ ID NO: 977 - DNA, 912 bp, Homo sapiens
tgggtatcggttatgccttgattgcatatcaatccaccctgaaagcgtgagcaaacttcctgacgctattgccgtctgggcgccattaatgcgttcaacatggttgatggcattgatggcttgctgggcgggttgtcctgcgtctcgtttgcagcaatcggtatgattttgtggttcgacgggcaaaccagcctcgcaatctggtgctttgcgatgatcgccgccatcctgccatacatcatgcttaaccttggtatcctgggtcgccgctacaaagtctttatgggtgatgcgggcagtacgctgattggttttaccgttatctggatcctgctcgaaacgacccagggcaaaacccatcccatcagcccggttaccgctttgtggataatcgccattccgctaatggatatggtggcgattatgtaccgtcgcctgcgtaaaggcatgagcccattctctcctgaccgtcagcatattcaccatttgatcatgcgtgccgggtttacttcccgtcaggcgtttgtgctgattacccttgccgcagcactgctcgcttccattggcgtgctggcagaatattctcattttgtcccggagtgggtcatgctggtgctctttttgctagcattcttcctctatggatattgcattaagcgtgcctggaaagttgctcgctttattaagcgcgtaaaacgcagactgcgtagaaatcgtggtggcagccccaatttaaccaaataaatgaggatgtgatgacacaaccaatgcctgggaaaccggccgaagacgctgaaaatgaactggatattcgtgggttgtttcgtaccttgtgggctgggaagctatggattattggcatggggctggcgtttgcgttaatcgcgctggcgtatacgttttttgctcgtc

SEQ ID NO: 978 - DNA, 2187 bp, Homo sapiens
gaatttaataagatgcctggcctggatgtttattttgccgctgatgtttgttacgccgagaaagttgcgcaagaaaaaggttttttatatcgtttaacatcacgatatcgccattatgccgcatttgagcgagcgactttcgagcagggtaaatcgacgaaacttatgatgctgaccgataagcaaatcgccgatttccagaagcattatcaaactgaacctgaacgttttcaaattcttcctcccggtatttatccggacagaaaatacagtggagcaaatcccaaacagccgtgaaatttatcgccagaaaaatggcataaaagagcaacaaaacttattactgcaggttggatcagattttggccgtaaaggtgtagatcgctcaattgaagctttggcatcgttaccggaatcattacgtcacaatacgcttttatttgttgttggtcaggataagccgcgaaaatttgaacgctggcagaaaaactcggcgtgcggagcaatgtgcatttcttctccggtcgcaatgatgtgtcagaattaatggcagccgctgatttattactgcatcccgcttatcagaagccgcgggtatcgttcttctagaagcgatcactgctgggttacctgttttaacaacagcggtatgtgggtacgcgcattatattgcggatgccaattgtggaacggtcatcgctgaacctttctctcaggaacaattaaatgaagttttacgtaaagcgttaactcagtcgccattgcgaatggcctgggcggagaatgctcgccattatgccgatactcaggatttgtatagcttgccagaaaaagccgcggatatcattacaggtggtttagatggttgaattaaaagagccgcttgccacactttggcgtggtaaagatgcttttgcagaggtcaaaaaactgaacggcgaggtctttcgtgaactggagactcggcggacattacgctttgaactgccgggaaaagctattttcttaaatggcacaaggggacgacattaaaagagattataaaaaatctactctcattgcggatgcccgtttgggcgcagacagagagtggcacgctattcatcgcctgagtgatgttggcgttgatacaatgaagggcattgggtttggcgaaaaagggttaaatccattaactcgcgcatcatttattattaccgaagatctcactcccacaattagccttgaagattattgtgccgattgggcagtcaacccgcctgatatacgtgttaagcgtatgctgatcgcacgtgtagcaactatggtgcgtaaaatgcatactgcagggataaatcaccgcgactgttacatttgccactttttgcttcatttgccatttactggccgggaagatgaattaaaaatttcagttatcgatctgcatcgggcacagatacgtgcaaaagtaccgcgccgctggcgcgataaagacctgattggtttatatttctcatcaatgaatattggcctgacgcaaagagatatctggcgatttatgaaggtttattttgggatgcctttacgcaaaatattgtctcttgaacagaatttattgaacatggcaagcgttaaggccgagcgtattaaagagcgaacacaacgcaaaggattataaaaatatttattagtatgtactggaactaactttattatgactatttattttataaattgggttgcagattatgaattaaaaatgattcagtacctgaaaaaaaagtacaagataaaaaatataacaacaccaaaaaaatataactggattaataaaaaatatcaaaaatagggatggataatgcatggctggggcgattattcatcaagcattacctcaatgatattaaaaaagatgacataattatcattaatgacagtgttgttaataaaggtatcaataaacaaatattaaaaaatattaactgtcataaagttttgcttctaagaaatactgttggcgaagattttattcttgataacgcgaattatttcgatattatatatgattttgagcatagatttatagggaatgaaaagatcaaggcaatagaacaattttttcctataggaatggatgaaattagaaattatagtttatctgacaaaaataacagccagccaatatgttttttccttggtcgtgataaa

SEQ ID NO: 979 - DNA, 1103 bp, Homo sapiens
  misc_feature (11)..(11): n equals a,t,g, or c
  misc_feature (1089)..(1089): n equals a,t,g, or c
  misc_feature (1097)..(1097): n equals a,t,g, or c
  misc_feature (1099)..(1099): n equals a,t,g, or c
taaaacggccnccccttttttttttttttggkggtggacggactgtaattgatagattgattatggaattaaattgggtacagcttcaaatcccgtcttctctgtggcactgggggttagctcgtgccgaattcggcacgagctcgtgccgaattcgatatcaagcttatcgataccgtcgacatcgcaacagcccaattatatataattttatatattactatataaatatgaatcttgcaccggagaaattgtaagcattattatgccgactcttttttatcttattttaaaatggaatmccggacatgttaattaatcgcaatattgtggcgttatttgcgttgccttttatggcaagcgcaactgcttctgaattatccattggtgctggtgcggcttataatgaatcgccttatcgcggttataatgaaaatacgaaggcaattccgctgattagttatgaaggtgatactttttatgttcgtcagaccacgttaggttttattctgtcgcaaagtgaaaaaaatgaacttagcctgaccgcatcctggatgccgctggaatttgaccctaccgataatgacgattatgccatgcaacagcttgataagcgtgatagtacggctatggcgggggttgcctggtatcaccacgagcgttggggaaccgtgaaagcctctgcagctgcggacgttctggataacagcaacggctgggtgggggagctatcggtattccacaaaatgcagataggtcgtctgtcgctgacacctgcgctgggcgttctctattatgacgagaatttcagtgactattactatggcatttcagagagtgagtcccgtcgtagcggtctggcaarttattccgcgcargatgcctgggtgccctatgtcagcctgacggcaaaatacccgataggagagcacgtcgtattgatggcgagcgcaggatacagcgagctgccggaagagattaccgmcagcccgatgattgatcgtaatgagagttwaacctttgtcaccggggtgagctggcgtttttaattcaccggtggatgtcggtrcggcccggaggccaattcgnactggagnanaagg

SEQ ID NO: 980 - DNA, 1378 bp, Homo sapiens
gacgcttcggccgtaacgatgatcggagacatcctgctgttcgggacgttgctgatgaatgccggggcggtgctgaactttaagctgaaaaagaaggacacgcagggctttggggaggagtccagggatcccagcacaggtgacaacatccgggaattcttgctgagcctcagatactttcgaatcttcatcgccctgtggaacatcttcatgatgttctgcatgattgtgctgttcggctcttgaatcccagcgatgaaaccaggaactcactttcccgggatgccgagtctccattcctccattcctgatgacttcaagaatgtttttgaccagaaaaccgacaaccttcccagaaagtccaagctcgtggtgggtggaaaagtgttcgccgaggtgtgcatggtttcccatccacgtccctgttttcaaagatagtttcactttggtctctgaattgaaatgctgtctactgaaagggtttcaggagcgtttatgtaaggggctgtgatgaaattgcattccccatagataaaagaaaaatcatttctatccagagatctgagcagaaggattggcttgttagtttaacacagccgtatttttggacattcagtgttacttgctgagtctgacagcctctgggcccggccaggggccctgttaacaaactgctttcacatcccaacagggtctgcttggccactcagtgcagctgcgattaaccctaaaggctttaaggaacgggccacctgtaacagagacaccagccttcctgtatagacactaaattgttagcaagagtgttgagctagttcctggtgaagtgtttccacagaagacatgtggagcagttgtggggatattaagggaaactttcctctgccttgacccctttgttaaataaaatgactttgggagccattcattgtacagttgcaggaatgagagtgattttatgatgtggtacattgggaccatgttctaaaaaccttgggtttctggagtctggctttttggagtaggtgattttggaggttgaaaaaccaggggccttcatctaggaaatacagcattttccagaagcttctttgaaagggaatcctggttttgttgccaaaatgaaacgcccggggttggcgctgaatcccacaactgtgtgatttgcttgttgagtttttttgttgtctggtttttttgtttgtttgtttataccaataagaatgagcctgaatgttggtggtttttgaaatcctgacttggaggtaaacctggaggaaggaaaaaaagtaaatatgcaggcttttaggactgagtagccttgaaaataaacctcatttctaaaaaggaaaaaaaaaaaaaaaaaaaaaaaaaaaaa

SEQ ID NO: 981 - DNA, 2559 bp, Homo sapiens; identical to SEQ ID NO: 205

SEQ ID NO: 982 - DNA, 2559 bp, Homo sapiens; identical to SEQ ID NO: 205

SEQ ID NO: 983 - DNA, 1409 bp, Homo sapiens
ggcacgagtggaagccaaaaattacctgaagtcttctgcttatctttattccacacttgaaattcagtggaagaaaaatgccaatatgttaattgtaaaatctagattggagaggaacacatgaatagtttgtactaaaaaggaaacgttcctctgagcataaacgttttcagtaggattagagggttgggagcagtggagaaccaaaaccaaatctctcctgtgaatattgcttcattatttcacgtcctaagtaaacatagatgagttgactttaagtactaaaaataatttgaactagggaggtggaaagtatggcataggtgtgatgatcaggggatatttttacttttggtcttttgtacctaaccgaaggtcataaaaaaagctataaaaagtacattttcctgagtagacgtattgtctcagctgtgtgtgttttccttgtgccataaataatcactaaaccctttggcagttttgtgtacctgttaaacctgagaagatcgaaaggaaggatttttgggtgcaaccgaaaaacagttctcagttactactgagaataatttggccctagataaaactgttgtaactaaaaataaggttaggctgtaactaatatttttcaaatgaaatactatgaactaaagtttagatagaaaaatgtttctgcaatgaatatatttcagaagtattttaattttggtttaacttaactgtttacttgcagttcgtttagtaatagatgaaatgggatttatgaaaactccagatgaggatgaaacaagtaatcttatatggtgtgattctgctgttcagcaggagaaaatttcagagctgcaaaattatcaggtaggaaattaatcatgaccagttagtggtatgaggaaagttatatggattccacataacttttttagataggttcttaatatgttgccttattacatttcagctcttactcacctgaatagcctgttttgttgctatccagttgtattggctctttgcatgaagcctgcatcttttgcagacttaagttttaacctctttctatctttagggaagaatcaatagaaaaaacctcttctggttgggcgtggtggctgacacctgtaatcccagcattttgggaggccaaggcgggtggatcacgaggtcaagagattgagaccttccctggccaacatagtgaaaccccatctctactaaaaatacaaaaattagctgggtatggtggcacacgcctgtagtcccagctactcaggaggctgaggcaggagaattgcttaaacccgggaggtggaggctacagtgagctgagattgggccactgcactacagcttggtgacagcgagactccatctcaaaaaaacaaacaacaaccaccaaaaaaaaaaaaaaaaaa

SEQ ID NO: 984 - DNA, 509 bp, Homo sapiens
atgaaatttaccactctcctcttcttggcagctgtagcaggggccctggtctatgctgaagatgcctcctctgactcgacgggtgctgatcctgcccaggaagctgggacctctaagcctaatgaagagatctcaggtccagcagaaccagcttcacccccagagacaaccacaacagcccaggagacttcggcggcagcagttcaggggacagccaaggtcacctcaagcaggcaggaactaaaccccctgaaatccatagtggagaaaagtatcttactaacagaacaagcccttgcaaaagcaggaaaaggaatgcacggaggcgtgccaggtggaaaacaattcatcgaaaatggaagtgaatttgcacaaaaattactgaagaaattcagtctattaaaaccatgggcatgagaagctgaaaagaatgggatcattggacttaaagccttaaatacccttgtagcccagagctattaaaacgaaagcatccaaaaaaaaaaaaa

SEQ ID NO: 985 - DNA, 536 bp, Homo sapiens
gggagtgctttggaggagaggactatggcagccagggacgccacttcaggcagcctgtcagaggagagcagtgctttggacctgccatcagcgtgtgacataagagattacgtcctgcagggacccagccaagaagccaacagcgaggctttcagttctttggaattccattcttttccttattcttctgatgtggatccagcagatctctgagaatgcttcattgtcttaggcagaaaaacatcttacctaagcaaagctttcaggaggaacttcaaaggacagcttacctggcacagcaatgacaaggagctgtttcctggatgtctttttgttattgttgctgttaatctcaggtctctttctaatctccctcaaaatgaattcagaagcaggggaatatttggttcaacaaagagagagtggaatttttttttgttttgttcttttaaaacttcagaaaatagcaatgtgggcctgttatgtgtgatgagtaataaaaatagagactttagcattcaaaaaaaaaaaaaagg

SEQ ID NO: 986 - DNA, 1624 bp, Homo sapiens
  misc_feature (540)..(540): n equals a,t,g, or c
  misc_feature (644)..(644): n equals a,t,g, or c
  misc_feature (1517)..(1517): n equals a,t,g, or c
  misc_feature (1537)..(1537): n equals a,t,g, or c
  misc_feature (1568)..(1568): n equals a,t,g, or c
  misc_feature (1624)..(1624): n equals a,t,g, or c
ataatgtgagagtggaaccaacggattcaagcttcatggaagctattgagtttgcccaaaagggagcttttgatgcctatgttgctgtcggtggtggctctaccatggacacctgtaaggcctgctaatctgtatgcatccagccctcattctgatttcctagattatgtcagtgcccccattggcaagggaaagcctgtgtctgtgcctcttaagcctctgattgcagtgccaactacctcaggaaccgggagtgaaactactggggttgccatttttgactatgaacacttgaaagtaaaaattggcatcacttcgagagccatcaaacccacactgggactgattgatcctctgcacaccctccacatgcctgcccgagtggtcgccaacagtggctttgatgtgctttgccatgccctggagtcatacaccaccctgccctaccacctgcggacccctgcccttcaaatcccatcacacggcctgcgtaccagggcagcaacccaatcagtgacatttgggctatccacgcgctgngatcgtggctaagtatctgaagagggccgtcaacagcactgacaaatgaagaagaagaatgagtctcagggcaccttcctggagtggccctcgccatccagggnaccagcgcgttgcctcccccggcgcttttacatcacatgagcagctgacagcgtatttattatgcctttgctgaaacagttgatgagaaatatgtttyccttcagttttcatttagaagacaaggcgtcgtttgaataacttgcctgatttttcttcctaccgagtagcatttctttttttttcaccatatctttccctaaggcagctccttattctgtaggaattgccaatgttgatgtgttattgttaggtatttatatcattcacagggctgtcagaaatcccgatgatcttgaagcaaggtctcatatgcacttggcaagtgcttttgctggcatcggctttggaaatgctggtgttcatctgtgccatggaatgtcttacccaatttcaggtttagtgaagatgtataaagcaaaggattacaatgtggatcacccactggtgccccatggcctttctgtggtgctcacgtccccagcggtgttcactttcacggcccagatgtttccagagcgacacctggagatggcagaaatactgggagccgacacccgcactgccaggatccaagatgcagggctggtgttggcagacacgctccggaaattcttattcgatctggatgttgatgatggcctagcagctgttggttactccaaagctgatatccccgcactagtgaaaggaacgctgccccaggaaagggtcaccaagcttgcaccctgtccccagtcagaagaggatctggctgctctgtttgaagcttcaatgaaactgtattaattgtcattttaactgaaagaattaccgctggccattgtagtgctgagagcaagagctgatctagcytagggctttgtctttttcanctttggcgcataacttaccngtttaccagttattaggtggggatatacatnatcttgcaggaaatttcccaaaagctcagagtccagtttccttcccttaaaacagn

SEQ ID NO: 987 - DNA, 1032 bp, Homo sapiens
  misc_feature (353)..(353): n equals a,t,g, or c
  misc_feature (395)..(395): n equals a,t,g, or c
  misc_feature (437)..(437): n equals a,t,g, or c
  misc_feature (996)..(996): n equals a,t,g, or c
  misc_feature (1000)..(1000): n equals a,t,g, or c
  misc_feature (1029)..(1029): n equals a,t,g, or c
ggcacgaggacaagcccttgcgcctgcctctccaggatgtctacaaaattggtggtattggtactgttcctgttggccgagtggagactggtgttctcaaacccggtatggtggtcacctttgctccagtcaacgttacaacggaagtaaaatctgtcgaaatgcaccatgaagctttgagtgaagctcttccctggggacaatgtgggcttcaatgttcaagaatgtgyctgtcaaggatgttcgtcgtggcaacgttgctggtgacagcaaaaatgacccaccaatggaaagcagctggcttcactgctcaggtgattatcctgaaccatccaggccaaataagcgccggntatgcccctgtattggattgccacacggtcacattgcatgcnagtttgctgagctgaaggaaaagattgatcgccgttctggtnaaaagctggaagatggccctaaattcttgaagtctggtgatgctgccattgttgatatggttcctggcaagcccatgtatgttgagagcttctcacactatccacctttgggtcgctttgctgttcgtgatatgagacagacagttgcggtgggtgtcatcaaagcagtggacaaraaggctgctggagctggcaaggtcaccaagtctgcccagaaagctcagaaggctaaatgaatattatccctaatacctgccaccccactcttaatcagtggtggaagaacggtctcagaactgtttgtttcaattggccatttaagtttagtagtaaaagactggttaatgataacaatgcatcgtaaaaccttcagaaggaaaggagaatgttttgtggaccactttggttttcttttttgcgtgtggcagttttaagttattagtttttaaaatcagtactttttaatggaaacaacttgaccaaaaatttgtcacagaattttgagacccattaaaaaagttaaatgagaaaaaaaaaaaaaaaaaaaaaaaaaaaaggncccnggtccccattsgccccaaaggggggcggnatt

SEQ ID NO: 988 - DNA, 1632 bp, Homo sapiens
cgcccgggcaggtgctttagttgcagtggaaaggaaatgtgtcatctgtggtttggttttaaaagtggaaaactagctgcacatatccttttttactgcagatttactttaaggctcatattctccaagtctattctgctttaaaaagaagacaagaaaagaagtggtttatcaaaatcacgttataatcagattttgaccaagcattttgtaagattgccaagyatgcccacggacatggaacacacaggacattacctacatcttgcctttctgatgacaacagttttttctttgtctcctggaacaaaagcaaactatacccgtctgtgggctaacagtacttcttcctgggattcagttattcaaaacaagacaggcagaaaccaaaatgaaaacattaacacaaaccctataactcctgaagtagattataaaggtaattctacaaacatgcctgaaacatctcacatcgtagctttaacttctaaatctgaacaggagctttatataccttctgtcgtcagcaacagtccttcaacagtacagagcattgaaaacacaagcaaaagtcatggtgaaattttcaaaaaggatgtctgtgcggaaaacaacaacaacatggctatgctaatttgcttaattataattgcagtgctttttcttatctgtacctttctatttctatcaactgtggttttggcaaacaaagtctcttctctcagacgatcaaaacaagtaggcaagcgtcagcctagaagcaatggcgattttctggcaagcggtctatggcccgctgaatcagacacttggaaaagaacaaaacagctcacaggacccaacctagtgatgcaatctactggagtgctcacagctacaagggaaagaaaagatgaagaaggaactgaaaaacttactaacaaacagataggttagtgaagaaaaatgcaaagtagcaatgagaaggcttatggagtaaaaatgaagtcagttggtatttaatcccaaagtgttgttctgattatctaaaatttgacatggtagaccttgcaatttagaatcaagcaggtgagacagggagaagtatgcctgcttaattatttaaactgtgtacttttgttttgacactgaatattttaaaaagcaaataataaaataactaagcatttgaggaaaattttaaggataaattgaggaaactgattaatagagatagcaagggataattaaataaatattccctatgtagcaacagtggttagatgatctttgtctgaatgtaattaaactttgaatagttttagtgtgtccttaaagccaagtatatgctttaacatcaaatggaagtcaaattcctaatgcatagatagagagagctaaactgtgtaatttaatggtatcttcyttgctggatgtggcagaatccacaccagcttatcaaccaacacagctaattttagaatagatcctttatctttccatatggcacacgtaagaaagtgtttttctactattaatattaaattaaaacctttacttttgtataataaattaaaactcagaataaacctgtgaccacgtaaaaaaaaaaaaaaaaaattttatttttaatttaaatatattttatttact

SEQ ID NO: 989 - DNA, 913 bp, Homo sapiens
acctcctccgactgtcagcactgctccacctctgattccaccaccgggtattccaataactgtaccacctccaggttttcctcctccaccaggcgctccacctccatctcttataccaacaatagaaagtggacattcctctggttatgatagtcgttctgcacgtgcatttccatatggcaatgttgcctttccccatcttcctggttctgctccttcgtggcctagtcttgtggacaccagcaagcagtgggactattatgccagaagagagaaagaccgagatagagagagagacagagacagagagcgagaccgtgatcgggacagagaaagagaacgcaccagagagagagagagggagcgtgatcacagtcctacaccaagtgttttcaacagcgatgaagaacgatacagatacagggaatatgcagaaagaggttatgagcgtcacagagcaagtcgagaaaaagaagaacgacatagagaaagacgacacagggagaaagaggaaaccagacataagtcttctcgaagtaatagtagacgtcgccatgaaagtgaagaaggagatagtcacaggagacacaaacacaaaaaatctaaaagaagcaaagaaggaaaagaagcgggcagtgagcctgcccctgaacaggagagcaccgaagctacacctgcagaataggcatggttttggccttttgtgtatattagtaccagaagtagatactataaatcttgttatttttctggataatgtttaagaaatttaccttaaatcttgttctgtttgttagtatgaaaagttaactttttttccaaaataaaagagtgaatttttcatgttaagttaaaaaaaaaaaaaaaaaaaaaaaaaaaaaaaaaaaaaaaaaaaaaaaaaaaaaaaaaaaaa

SEQ ID NO: 990 - DNA, 984 bp, Homo sapiens
ggcacgagtgagatttgcctttataatgtaaattgtgatttttgttttacatgtgggtttctatagttttaattttttcagcttttaagatacgagttttgtgtaatttggtatttttaatcatttatgttattttaaaagctcagaatatcacattgaaattactataaatacatttaaaattatctattttagatctaaggaaatactacagagatattttcatgggttcagtaacttttcattttataacattgggcacggtacagagtgattgtcacataaggtacttgaagatttattagtttaattctatttttacagtaaccttgaattcttctgagttttgcatgtattaaattcaattaatgctgaacatgaagagtaaagtatttatctgaaagaagtttctgggttaggagaagtaatgaatgtatccatttgtacatggtttacatgttgtggatgctttgtaaacattttcctgtatgtttaaattgtgtttcagcaggatgtaattgcccttgtgtgtagttaaaatgagtcatcatctggtcctttgtgaaatggaattcatggtattttctgtaacgttttcctgaagctgtttctggagagccacacatttaaatacagacagctttcctgatcatttgatttattgtgcacctgatttttggtctaaaaggaattattgccacaatatattttatttattctttagattttagccttgtaagttaaagtgctttacatgatgatgtgaaaagctgtttgtccctttactgggtttggggggttgttaaaagatagggaatgaagaatgcaaaatggtttatcgttcaaactgtccactctgatccaaccctgtactgatagtacttcccagtatgatattgtgatgtttcatacaatgcagtgaacataaccaacttgttacctaaataaagaattgataaaaacagtgtgacatattaaaaaaaa

SEQ ID NO: 991 - DNA, 1313 bp, Homo sapiens
ggcagaggttttcttatattttaagtaaatttaaagtggctatcagaatatttattcttgtttgagactaccaacataactacgtgttgaaggtgcttcacagagaatatattgcctttaatgtgaaataattttcaccaatgttgctaactttaataaagtataaaatttgtagaatattcagttaagtagttggtaacccttttctattttagtaaaacttaatgcatgtttacttttttttgaaagatgcagacaatctctttgaacatgaattgggggctctcaatatggctgcattactacgaaaagaagaaagagcaagtcttcttagtaatcttggcccatgttgtaaggcgttgtgcttcagacgggattctgcaattcgaaagcagcttgttaaaaatgagaagggcaccataaaacaagcttacacgagtgctccaatggtagacaatgaattacttcgattgagtcttcggttatttaagcggaagactacttgccatgctccaggacatgaaaagactgaagataataaactttcacagtccagtatccaacaggaactgtgtgtgtcttaagaccgaagttacaatatggtatttttggtactgtcttccttcagcagtgcatattcttttgcaaagttctttggtttgacaagcattagtgacaaaggcagaaaagatttatcagccatgctaaaagagtgaagaattttgatctttagagacactagttttggccaacttaagattttacgttaatttttacatagtatttgacactcatgcaaaataatgtgaaaacatctagatttagtagtttattctgcgccttttgttaaaactgaagattttggaaaatggttgtcactgctcttccagcctatgaatatttttgtgaaatggaaccatggatttatgtctggatcatccatacagaaccaacaattttattcaaaaacaatgtgttcatcaaagtaattgctcacattgtgcagtactatgttgtacagaccacgtgaaagggaatgctggtctagctggcgtggtatgtttataggcgaatttcagcagaaggaagccaaaatagttttttccttttgaaagttttttaaaaattatttcatgggtcttttttttaattaatatgtgtgcattgttacaatgtatgttgggatgtcttttgaccctaaatgctttttttgttatcagagattgtgtactatttttatttttaataaatgtatcttcccttttmaaaaaaaaaaaaaaaaaaaaaaaaaaaaaaaaaaaaaaaaaaaaaaa

SEQ ID NO: 992 - DNA, 638 bp, Homo sapiens
ggcacgaggttctgagccgatggaagagttcactcatgtttgcacccgcggtgatgcgtgcttttcgcaagaacaagactctcggctatggagtccccatgttgttgctgattgttggaggttcttttggtcttcgtgagttttctcaaatccgatatgatgctgtgaagagtaaaatggatcctgagcttgaaaaaaaactgaaagagaataaaatatctttagagtcggaatatgagaaaatcaaagactccaagtttgatgactggaagaatattcgaggacccaggccttgggaagatcctgacctcctccaaggaagaaatccagaaagccttaagactaagacaacttgactctgctgattcttttttccttttttttttttttaaataaaaatactattaactggacttcctaatatatacttctatcaagtggaaaggaaattccaggcccatggaaacttggatatgggtaatttgatgacaaataatcttcactaaaggtcatgtacaggtttttatacttcccagctattccatctgtggatgaaagtaacaatgttggccacgtatattttacacctcgaaataaaaaatgtgaatactgctccaaaaaaaaaaaaaaaaaaaaaa

SEQ ID NO: 993 - DNA, 2179 bp, Homo sapiens
  misc_feature (2165)..(2165): n equals a,t,g, or c
gtgtcgctcgcgctggaagaagcggaagaagatggcgctcaccagctttttacctgcacctactcagctatctcaggaccagcttgaggctgaagaaaaggcaagatcccagagatcacggcagacctcactggtctcctcccgaagagaacctcccccgtacggataccggaaaggctggatacctcggttattagaggattttggagatggaggtgcttttccagagatccatgtggcccagtatccactggatatgggacgaaagaaaaaaatgtcgaatgcgctggccattcaggtggattctgaaggaaaaattaaatatgatgcaattgctcgacaaggacagtcaaaagacaaggtcatttatagcaaatacactgacctggttccaaaggaggttatgaatgcagatgatccagacctgcaaaggcccgatgaagaagctattaaagagataacagaaaagacaagagtagccttagaaaaatctgtatcacagaaggtcgccgcagccatgccagttcgagcagctgacaaattggctcctgctcagtatatccgatacacaccatctcagcaaggagtggcattcaactctggagctaaacagagggttattcggatggtagaaatgcagaaagatccaatggagcctccaaggttcaagattaataagaaaattccccggggaccaccttctcctcctgcgcctgtcatgcattctcctagccgaaagatgactgtaaaggaacaacaagagtggaagattcctccttgtatttctaactggaaaaatgcaaagggttatacaattccattagacaaacgtctggctgctgatggaagaggactacagacagtacacataaatgaaaatttcgccaaattggcagaagccctctacattgctgatcggaaggctcgtgaagctgtggaaatgcgtgcccaagtagagagaaaaatggctcagaaagaaaaggaaaaacatgaagagaaacttagagaaatggcccagaaagccagggaragaagagctgggatcaaaactcatgtggaaaaagaggatggggaggcacgtgagagggatgaaatccggcatgacaggcgaaaagagagacagcatgaccggaatctttccagggcagctcctgataagaggtcgaaacttcagagaaatgaaaatcgggatatcagtgaagttattgctctcggtgttcctaatcctcggacttccaatgaagttcagtatgaccaaaggctcttcaaccaatccaagggtatggacagtggatttgcaggtggagaagatgaaatttataatgtttatgatcaagcctggagaggtggtaaagatatggcccagagtatttataggcccagtaaaaatctggacaaggacatgtatggtgatgacctagaagccagaataaagaccaacagatttgttcccgacaaggagttttctggttcagaccgtagacagagaggccgagaaggaccagttcagtttgaggaagatccttttggtttggacaagtttttggaagaagccaaacagcatggtggctctaaaagaccctcagatagcagccgccccaaggaacacgagcatgaaggcaagaagaggaggaaggaataggcacaggtctctccaaagtgaatgaactcttacccataaccctaatgatgcaagtcatatgggggaacactttgtaaatggtcaggataaaaaccaaatctgggtgccagatcccagcactactttttattactggagaaatgggggggatagaaaattctactttgaattatttagttttttttaaagagtgggttgtgtttgtgcttctcccacctttcagcatttatagaacatgctgccccacatacaaagtcaagaccacttacttttatgtgacactagtagtttggggttaatgttttgtgtaagaacagctgcatatgagtaaagttaccccaaccacagtgaggaggaagatgttcacatactggaactgtcctgccaaataaattttgcccctattgtgctctgttttaatttggagtgggcaaagtaacctcttgcttggtgcaactatttgtttcaaataaaaacatttagacaaaaaaaaaaaaagggaaaactcgagggggggcccggnaacccaattcgccg

SEQ ID NO: 994 - DNA, 1556 bp, Homo sapiens
  misc_feature (1)..(2): n equals a,t,g, or c
  misc_feature (6)..(6): n equals a,t,g, or c
  misc_feature (24)..(24): n equals a,t,g, or c
nnttanatgatcgccgctcgaatnaacctactaaagggaacaaaagctggagctccaccgcggtggcggccgctctagaactagtggatcccccgggctgcaggaattcggcacgaggttccctatcctgggccagttctctcgcaggtcccagatgtccagttccagatgcctggacccagagtgtgggggaaatatctctggagaagccctcactccaaaggctgtccaggcgcaatgtggtggctgcttctctggggagtcctccaggcttgcccaacccggggctccgtcctcttggcccaagagctaccccagcagctgacatcccccgggtacccagagccgtatggcaaaggccaagagagcagcacggacatcaaggctccagagggctttgctgtgaggctcgtcttccaggacttcgacctggagccgtcccaggactgtgcaggggactctgtcacagtgagctggggatggggggggtcccgccaggactgtggccagggagattcccggggttgtgggaagtggcggtgccctgaatcccccatctggaggagggatgaattttccatgtaggggcagtcgggcttggcttaccggggagcagtggtggaccccaggacacagcctcccaccagcgcctccggggctgccatctgggccccacagagcaaagagggcagcaagcaggccctgcgtttggaaggcttatgaatggacacacaaatcttgcaaatctatggagccaggggcagggacgcacatattggttgttaaaaatatgtcatcatgtatttgttgagtgcctgctctatcaggtgaggaagctggacacaaataataacaaaagattaagtcaccgttcacacttaccttggaagagctattacaaaacttctaacgccaaagccttattcagaataaggacattttaaaaacagtacttgatggagtgatgcaagcttgcagtcccagcagtatagtcaggagactgaggctgraggatcagagggctggagcccagggttcaaggccagcctaagcaacatagcaagaccccatctcaaaaataagtaaataataaataaaaataaaaagagcacattatcttttgatttaaattttatttatatcaaaatgacataaatttttgaactttattttttaattttaaaatttttaattattatggatacataatagttgtaagactttttgttttttaattaaagttttctaaggctgggcgcagtagctcatgtctgtagtcccagcactttgggaggctgaggcgaaagaagcacttgagcccaggaatttgagaccagcctgggcaacatagcaagaccccatctctacaaaaaaatttaaaaattagccaagtgtggtggcacgcacctgtggtcccagctacaagggacgctgaagtgagaggatcacttgagcctggaaggtagaggctgcagtgagctctgatcatgacaccgtactccagcctgggtgacagagtgagaccctgtctccaaaaaaaaaaaaaaaaaactcga

SEQ ID NO: 995 - DNA, 1072 bp, Homo sapiens
ggcacgagccgcgatacagttaggatggctgtagtacctctgctgttgttggggggtttgtggagcgctgtgggagcgtccagcctgggtgtcgttacttgcggctccgtggtgaagctactcaatacgcgccacaacgtccgactgcactcacacgacgtgcgctatgggtcaggtagtgggcagcagtcagtgacaggtgtaacctctgtggatgacagcaacagttactggaggatacgggggaagagtgccacagtgtgtgagaggggaacccccatcaagtgtggccagcccatccggctgacacatgtcaacactggccgaaacctccatagtcaccacttcacttcacctctttctggaaaccaggaagtgagtgcttttggtgaggaaggtgaaggtgattatctggatgactggacagtgctctgtaatggaccctactgggtgagagatggtgaggtgcggttcaaacactcttccactgaggtactgctgtctgtcacaggagaacaatatggtcgacctatcagtgggcaaaaagaggtgcatggcatggcccagccaagtcagaacaactactggaaagccatggaaggcatcttcatgaagcccagtgagttgttgaaggcagaagcccaccatgcagagctgtgaatctagaggctctgagccactgttaacgcacaatgttcacagacatctgttgctgcctcaccttgggatccctgccacaagttccttgggcagtggccatgtcaccattgagatgaagatatacaacagaaaatagtggctgtgtttggaagcttcagccctgcacatttgaactagtcactctcccagacttgcgtgggtcagttctttctgagtagaggacttgctggtaaaggggcagatgctttttattagtactgataaaacaaactgagggaaacatccctcttagctgggaaacttttactcttcaggagcttggcatcatggactgttaatgtatgtgattttccccctattttctctctccaaaatgataaaaacaataattttaaaaaaaaaaaaaaaaaaa

SEQ ID NO: 996 - DNA, 2157 bp, Homo sapiens
ggcacgagaaagtcagctaggaacaggccgaggcagggagaactctccactcggaggaggagctggggtcctcttccatcccgtcttcatcctgcctggctgcgtgacctcgggaggcaccatgcaggagctgcatctgctctggtgggcgcttctcctgggcctggctcaggcctgccctgagccctgcgactgtggggaaaagtatggcttccagatcgccgactgtgcctaccgcgacctagaatccgtgccgcctggcttcccggccaatgtgactacactgagcctgtcagccaaccggctgccaggcttgccggagggtgccttcagggaggtgcccctgctgcagtcgctgtggctggcacacaatgagatccgcacggtggccgccggagccctggcctctctgagccatctcaagagcctggacctcagccacaatctcatctctgactttgcctggagcgacctgcacaacctcagtgccctccaattgctcaagatggacagcaacgagctgaccttcatcccccgcgacgccttccgcagcctccgtgctctgcgctcgctgcaactcaaccacaaccgcttgcacacattgggcgagggcaccttcaccccgctcaccgcgctgtcccacctgcagatcaacgagaaccccttcgactgcacctgcggcatcgtgtggctcaagacatgggccctgaccacggcgtgtccatcccggagcaggacaacatcgctgcacctcaccccatgtgctcaagggtacaccgctgagccgcctgccgccactgccatgctcggcgccctcagtgcagctcagctaccaacccagccaggatggtgccgagctgcggcctggttttgtgctggcactgcactgtgatgtggacgggcagccggcccctcagcttcactggcacatccagatacccagtggcattgtggagatcaccagccccaacgtgggcactgatgggcgtgccctgcctggcacccctgtggccagctcccagccgcgcttccaggcctttgccaatggcagcctgcttatccccgactttggcaagctggaggaaggcacctacagctgcctggccaccaatgagctgggcagtgctgagagctcagtggacgtggcactggccacgcccggtgagggtggtgaggacacactggggcgcaggttccatggcaaagcggttgagggaaagggctgctatacggttgacaacgaggtgcagccatcagggccggaggacaatgtggtcatcatctacctcagccgtgctgggaaccctgaggctgcagtcgcagaaggggtccctgggcagctgcccccaggcctgctcctgctgggccaaagcctcctcctcttcttcttcctcacctccttctagccccacccagggcttccctaactcctccccttgcccctaccaatgcccctttaagtgctgcaggggtctggggttggcaactcctgaggcctgcatgggtgacttcacattttcctacctctccttctaatctcttctagagcacctgctatccccaacttctagacctgctccaaactagtgactaggatagaatttgatcccctaactcactgtctgcggtgctcattgctgctaacagcattgcctgtgctctcctctcaggggcagcatgctaacggggcgacgtcctaatccaactgggagaagcctcagtggtggaattccaggcactgtgactgtcaagctggcaagggccaggattgggggaatggagctggggcttagctgggaggtggtctgaagcagacagggaatgggagaggaggatgggaagtagacagtggctggtatggctctgaggctccctggggcctgctcaagctcctcctgctccttgctgttttctgatgatttgggggcttgggagtccctttgtcctcatctgagactgaaatgtggggatccaggatggccttccttcctcttacccttcctccctcagcctgcaacctctatcctggaacctgtcctccctttctccccaactatgcatctgttgtctgctcctctgcaaaggccagccagcttgggagcagcagagaaataaacagcatttctgatgaaaaaaaaaaaaaaaaaaaaaaaaaaa

SEQ ID NO: 997 - DNA, 884 bp, Homo sapiens
ggcacgagtagacagccccctcccctactcaccatggtatttctccttgaattcctctttcttgttttctttcctggttgtgtgaaccagttgctgctgtcatacccctggcagggccaggggacctctctttggtcatctctgtcctttcactggctgctgccccaggaagactcctctaggctctccatctttcccttgagagctggctccccaccccaacctgctcaggcaccacagaggatctaggtctctggctccccatacctggacccacatgggtgggtgcctgttgcatgtttaagagagaggggctgtgaggtgacagggcactagggccttcactcctttctccccttccatcctttctttaccagtgccacccatgtccctagctcccgggtattggggctgaggctctggggcctgtctccctgccagcgtgagggcaagaccccagagccttagctgagcaagcccagaggggcagcgtggcccctccctccccttttcctgccccgtcccatgcctcagcttgctgcttgtgccagttgcctgtttcgcttcagtgtttgattctagcacttacatgtgtcctccccaccaagccctctatctccttctaatccttcaacccctggccccctccccgtaacagtgacttttccagggaggaagaggcagcaggagctgttggccttggtttgcacagagcgggtagggctgtagggaaagcgggtgagctgttgtgctgctgggcctccctttggccctcgcttcccaccctacgatgtatgaaatgtatgtacagaccagagatgtttatacagccgataaagatggagtttccgtatttatcagtaaaaaaaaaaaaaaaaaaaaaa

SEQ ID NO: 998 - DNA, 1296 bp, Homo sapiens
cggcacgagctcctgggggatgaggtcctggttttaaagccccgtcatttcaagcgggtcgatcttccacattcactggagagactctccccacctctgtctgggtggggcgcggacccctcactgtgcgcctgtgcagggggtgctggtgcacgtggcagtgtggatttccagtggtcacggtcttactgtttcaaggtttttaaataagaaaaccaaccctgccttcgcccatgcccgcccctgcccgcagttgccaaagagccgccttgtcgctgtgggcgtcagggcttggctggctcagtgcacaacccacagtggccttcagaggctcctcctgggactgggaaccgccgcagggccaggcggacggcgtgaggtttgtgttggggctggttctgcccatgctagggggtgggggagctcccaggacagaccagccttgtttctcatgtaatgcagtgacgctgtcattaaacacgtggattcatgtgtggccgggactggctggctctaggtccccggctcgggtggggtcacacggtcctgccctaaagtccccatctggccctggagctgcagaagcagcttctgaggggcttcccaggcctgcatttcacagatggggagctcagccctcgaaggccgcaaagacgcctcccaggcccgtctgccagggcgccggccacaatcctgcagggccaaggactggactccaggcaagtccctgcgctccagctggacggccctgttccagggaggaggtgctcggttgacaccatcagggagggagggtgggcactgctgggctgagttcacccccagggctggccagatggggccaggagggacagagcaaggggggtgaaggccgtggcaggagaatcgcttgaacctcggaggcagaggttgcagtgagccgagatcgcgccactggacttcagcccagagcgaaactccatctcaaaaaaaaaaaaaaaaaatccaggcgcagtgctcacgcctgtaatccccacattttgggaggccgaggcgggtggatcacggggtcaggagatcgagaccagcctggccggggtggtggagccccgtctgtactaaaggtacagagattggctggttgtggtggcgggcgctgcggtcccagctgctcgggaggctggggcaggagaatcgcttgggcctgggaggcggaggttgcagtgagccgagatcaggccactgcactccagcctgggtgacagagcaagactctgtctcaaaaaaaaaaaaaaaaaaaaactcgagggggggccc

SEQ ID NO: 999 - DNA, 2064 bp, Homo sapiens
gtttgtattcaatttcttcatatttctgggcggggcctgcctgctggccatcggcatctgggtcatggtggaccccaccggcttccgggagatcgtggctgccaatcctctgctcctcacgggcgcctacatcctcctggccatggggggcctgctctttctgctcggcttcctgggctgctgcggggccgtccgtgagaacaagtgtctgctgctatttttcttcctgttcatcctgatcatcttcctggcagagctctcagcagccatcctggccttcatcttcagggaaaatctcacccgagaattcttcaccaaggagctcaccaagcactaccagggcaataacgacacagacgtcttctctgccacctggaactcggtcatgatcacatttggttgctgcggggtcaacgggcctgaagactttaagtttgcatctgtgtttcgactcctgaccctggatagtgaagaggtgccggagcctgctgccggagggaaccccaaagtcgggacggggtcctgctgagccgggaggagtgcctcctgggaaggagcctattcctaaacaagcagggctgttacacggtgatcctcaacaccttcgagacctacgtctacttggccggagcccttgccatcggggtactggccatcgagcttttcgccatgatgctttgccatgtgcctcttccggggcatccagtagagggtatggcctgaagcctgaagactcgccccacccaccactgcccagcacccaatgtcctcccgtgcccctccccgctgtcctcttggccccaggggagaagatgaggccatcagagatggccaggagaagggccaggggaatagagctatttttttaacaaaacaaaatgaagacaaaaatatggactgatgtatcctcgcctggactcagggcaggtgccgtgggttctccagagaccccagcacctggcccaggatgcaggctgctctagagaccaaaggaacaccaggcccagcgccctctttggtccagccagaccctgggccctctctcctcactgcaccaggacctgatgccaagaaagtgaggatttaggcaacaaggaggcaaaagcaaatctcagagaagtcatcaaagcccaggggctgcacggagattcagctgccatgtctttgaggactcggaacccacagcgcaatccctggtccactggaggatggactgttccccccttcaggccggggccaagagtgagctgctaacacggcatccaagaatggcccagctggtaggatccttgctttccccatctgttggaccaaataatctcaaaggcccagagaggacagtgaccatccacagacacacagcacaggcgtgacagttctgaaaagaagctgagttgtctccaggctgctgtcactgcatccaggactctgtcagctctgctgcccacatgcacccctggcctcagcatcccggttcccccagacaagagagggcaagtcagccaggaactgcctcctccctgctctacagctaagaaaacaccattccatgacttcccaccgcgccctcgctcctacctccccacacctctctctgagtccccaggaacacacagaggtgcacatcacattcccttgtccacactgcccgcctctcccacatgccacccccttccctgtccttccccaactccccagctccaagagtggaagaaatccccaagatcatctgggtctccctctccacacccagaactgaggcttggatatcttcttcaacatccttgccaagacttctccaccctcttgcatacctccagggacagagagcttactacctcccaaggcagcctcctgcctttggactgctctgactttagcatcagcttaatacacagaagaggtttctgtttttctgtggctctgtccatggcatcccacttgcccactctccttcctggagtgttgaggtcacacattgactcccctgagccctcttctctccaggctaaagaatcccgaaggcatcgaggccatttctgctgcaaaaaaaaaaaaaaaaaa

SEQ ID NO: 1000 - DNA, 2027 bp, Homo sapiens
cgctcgcgccagcccttcccgctcttctgttctcgctctatttgccccgctgactgctggcctcgccagctttgccagtcttacgtctctgcggcccaccccgccccgccccatcttcttgcgcgactcgcgcccgctggtccccccctcctcctcccgcgtcctgcctgccccctcctcctgctctcgcaggctccttggcacccaggccgggaggcgacgcgcccagccgtctaaacgggaacagccctggctgagggagctgcagcgcacagagtatctgacggcgccaggttgcgtaggtgcggcacgaggagttttcccggcagcgaggaggtcctgagcagcatggcccggaggagcgccttccctgccgccgcgctctggctctggagcatcctcctgtgcctgctggcactgcgggcggaggccgggccgccgcaggaggagagcctgtacctatggatcgatgctcaccaggcaagagtactcataggatttgaagaagatatcctgattgtttcagaggggaaaatggcaccttttacacatgatttcagaaaagcgcaacagagaatgccagctattcctgtcaatatccattccatgaattttacctggcaagctgcagggcaggcagaatacttctatgaattcctgtccttgcgctccctggataaaggcatcatggcagatccaaccgtcaatgtccctctgctgggaacagtgcctcacaaggcatcagttgttcaagttggtttcccatgtcttggaaaacaggatggggtggcagcatttgaagtggatgtgattgttatgaattctgaaggcaacaccattctccaaacacctcaaaatgctatcttctttaaaacatgtcaacaagctgagtgcccaggcgggtgccgaaatggaggcttttgtaatgaaagacgcatctgcgagtgtcctgatgggttccacggacctcactgtgagaaagccctttgtaccccacgatgtatgaatggtggactttgtgtgactcctggtttctgcatctgcccacctggattctatggagtgaactgtgacaaagcaaactgctcaaccacctgctttaatggagggacctgtttctaccctggaaaatgtatttgccctccaggactagagggagagcagtgtgaaatcagcaaatgcccacaaccctgtcgaaatggaggtaaatgcattggtaaaagcaaatgtaagtgtttccaaaggttaccagggagacctctgttcaaagcctgtctgcgagcctggctgtggtgcacatggaacctgccatgaacccaacaaatgccaatgtcaagaaggttggcatggaagacactgcaataaaaggtacgaagccagcctcatacatgccctgaggccagcaggcgcccagctcaggcagcacacgccttcacttaaaaaggccgaggagcggcgggatccacctgaatccaattacatctggtgaactccgacatctgaaacgttttaagttacaccaagttcatagcctttgttaacctttcatgtgttgaatgttcaaataatgttcattacacttaagaatactggcctgaattttattagcttcattataaatcactgagctgatatttactcttccttttaagttttctaagtacgtctgtagcatgatggtatagattttcttgtttcagtgctttgggacagattttatattatgtcaattgatcaggttaaaattttcagtgtgtagttggcagatattttcaaaattacaatgcatttatggtgtctgggggcaggggaacatcagaaaggttaaattgggcaaaaatgcgtaagtcacaagaatttggatggtgcagttaatgttgaagttacagcatttcagattttattgtcagatatttagatgtttgttacatttttaaaaattgctcttaatttttaaactctcaatacaatatattttgaccttaccattattccagagattcagtattaaaaaaaaaaaaaaaaaa

SEQ ID NO: 1001 - DNA, 1545 bp, Homo sapiens
  misc_feature (20)..(20): n equals a,t,g, or c
  misc_feature (33)..(33): n equals a,t,g, or c
  misc_feature (81)..(81): n equals a,t,g, or c
  misc_feature (704)..(704): n equals a,t,g, or c
ccttaggttcatggacccanttccagcccagancttgtcggaagtcaatgtagagggggcgcacacagcagttctcctccnagttgcggaagcagtaattggtgtccaaagcccgcttcttcctctgacccccctggcccgggttgtcgagccggtgtgggggaatcatcatgaggattagatgagggttgtggtgatccttctgcttcwtgaggcgcmccagatctccacggccatggtcatcctcattgtccacgcctttgaatttgatttccatcacctcgtgaatgttttccaggatatctccattgggctgaaaggtgtgacatggacagtgaatgctgatttctagacctaagttggactctcttctcaacagccactcacgcacagtgtcagtgacatcaaaggacagccactcggcagtgccccgtgtgggcagattcttgccaccgatatagcgctgtttggcaatgtgctcatctggccgaaggatctggaagagctcgatcctctgctcattccgcttagagctggggttgggcacccgcaagacccgraattctgctcggaataggttggttctatttttctccactgaggacacattgaagcggaaaaccttggaggtaattcctttagggcagacagccagttcgttgtctccgcagcccctggatcatgtcgaatttatggatttcttnggcatagtattccgactcggtgttttcctgggtgcagccttcctccctctccccatgcatctcctccagcagctcccgggtgctgttgtaaagggccaggacctgataggggacgtgggtcatcaccgttggctcaggggggctggtgagcctgagcttgctcaagatctgtcccctaatggcttccaccctcttcttcttgatgtggccgaagtccaaggtggtgcaagtggacagagagaggctgaccgtggcaaagttcagcagggccaggaccaccagagccctttgcaagtgcatcttcatgtgtgagctgggaagagaggccagggggacggcaaggcctggagaggaagagaccccagcagacgtgcagaaggagggaggaaaaccaggcggcctccccagatcccaaagactgaggcttggcaagaaggtgcatgaactcactgcactgcgagagcttcaggacttccaggaagcgctggcaaccctgaggacgaagaagcggactgtgtgccttgtagcgctgggattcttgtccatgtgtctaaacaggttttgctgggctctgactcccagcaggccaggtggagggcaagcagagggctgggaggggtggcaaggcagctgggagtgggaagggagctggagtttttccttaggtaaaaataaatagagtggatatctgatattgccaaacccgcttggcgatggggagaaagtgggtattttaaagaagaagcagaaggaccatggctgggtcccaaaatcaaaatccttgccttgccttgaaagaaaataagaaaagagaatggaaaagaaaagggaaaaaaaagta

SEQ ID NO: 1002 - DNA, 1230 bp, Homo sapiens
  misc_feature (1140)..(1140): n equals a,t,g, or c
  misc_feature (1146)..(1146): n equals a,t,g, or c
  misc_feature (1213)..(1213): n equals a,t,g, or c
  misc_feature (1219)..(1219): n equals a,t,g, or c
caggagggcgcggtaaggctggggtgtcctggtgagaactggagaggatctacccgggtccctgcctggccagtggggaaacaccggtcccccaggcaccttcacctaaccagagcggggatttccaccgcccctcatgccgccctttggaggaaagtgaaagtgaaaggaggaagaggaggctwmatggctgaggaggtcgcagcgccatgaagtccctgtctctgctcctcgctgtggctttgggcctggcgaccgccgtctcagcaggacccgcggtgatcgagtgttggttcgtggaggatgcgagcggaaagggcctggccaagagacccggtgcactgctgttgcgccagggaccgggggaaccgccgccccggccggacctcgaccctgagctctatctcagtgtacacgaccccgcgggcgccctccaggctgccttcaggcggtatccccggggcgcccccgcaccacactgcgagatgagccgcttcgtgcctctccccgcctctgcgaaatgggccagcggcctgacccccgcgcagaactgcccgcgggccctggatggggcttggctgatggtcagcatatccagcccagtcctcagcctctccagcctcttgcgaccacagccagagcctcagcaggagcctgttctcatcaccatggcaacaggtagctggggaggggaggtggagaagggtgggtagattctaagggtccagatcagccggtggtctcgctttatggacttgagcaagacatttcgccaatcggggttcagtttcctttttttgttaagagaggtggtttggctagaatgaatcaatctctaccgctccttctagccctcacccagttaaaaaaaaaaaacaaaaaaaaaactgcagcttggcagggggtagggggaaagcagggccgggcaggggggttactttgtggtgtttcgaagggccgggtttcgaagaggtggggtttcccgacaccagaccttgagagacttgtcaggtgatgcgaggtgggaggggttcagaagcaggagcgttttttctctgctcttcccagatctgtgtcttgctctgcaccctcagctttgcgggtcactctttcaaaacccagcactctatccccacctgngcccanacccggcgcttgcggcaatccgcaaaagcaaaggtctttgaactctagcgcgttgaccttgcctganagcccntgtaaggatgt

SEQ ID NO: 1003 - DNA, 944 bp, Homo sapiens
ggcacgagcgcccaatgaagcaaacctgattgatttcacgaatgaggcagtggagcaggtggaagaggaggagtctggtgaggcccagctctctttcctcactggtggtccggcggctgccgccagctcgctcgagagagagaccgagaggttcagggagctgttgctgtatggccgtaagaaggatgctttggagcctgcacttggcttcctggagccctccgggcctggcctcccacctggtgtgccacctctgcaggaaaggagacacttgctccaggaagccaggagcccagacccagggatagtgccgcaggaggcgcctgttggaaactcactttccgagctaagcgaagaaaattttgatggaaaatttgctaatctgaccccctcgaggacggtgccagactcggaggcccccccagggtgggatcgtgccgactcgggtcccacgcagccactctgtctctctcacccgctcccgaaacaaagagacccggacaggcagccaagaaagaaacgaaggaacctaagaagggtgaatcctggttctttcgttggctacctggaaagaaaaagacagaagcttatttgccagatgacaagaacaaatcgattgtttgggatgaaaagaaaaaccagtgggtgaatttaaatgagccagaagaggagaagaaagccccgcccccacctccaacctcgatgcccaagactgtgcaagctgccccgcctgccctcccagggcctcctggacccccgtgaacatgtactctagaagagcagcaggaaccagagctcgctacgttgacgtcctgaacccaagcgggacccagcggagcgagcccggtctcgtctgcggactttgtcgctccactccagtcctgggtgacaagagcaaaactccatctcaaaaaaaaaaaaaaaaaaaaaaaaaaaaaaaaaaa

SEQ ID NO: 1004 - DNA, 840 bp, Homo sapiens
ggcacgagggaatcaaaggcctgagttggccacgagcttcttccaaaaaaagccaaagatttgggagtgacttgggtccttattttcaagagccatgtctctgggaagactctcctggtccagcccaccctccatggtccctcggtcccctgctctcctctcccccactggcccccagatggaggtgtggaggcttcatggagtccgtggcagggctgtggggcctcataacactatgtctccagctggtggttcccaagctgttcatccccaaggcccccagttatcatctcctccaacagacttcacactttagaaggctgtctatgaagttaagagcacttcaataatgactttctttcatcatttttactaatcagaggcgcatctaattgctaatcacagcttctgagctgcagaaggttacacactaaatgatggcaaagaaagaccatttcgtcattaaattagtctgtggggccttaacacaggcaaagtatagggtttctttcaagctttttgaagtattggaaagaacataagggccgggcacagtggctcacacctgtaatcccagcactttgggaggctgaggcgggcagatcatgaggtcaggggtttgagaccagcctggccaacatggtgaaaccccgtctctactaaaaatacaaaaattagccgggcgtggtggcatacgcctgtaatcccagctactcgggaggctgaggcaggagaatcgcttcaacccgggaggcggaggttgcagtgagccgagatcacgccactgcactccagcctgggtgacagagcgagactccatttaaaaaaaaaaaaaaaaaa

SEQ ID NO: 1005 - DNA, 2433 bp, Homo sapiens
ggcacgagctctcgggcaagacctcctacttccacctgctcacctggtcactcccctttgtcctcactgtggcaatccttgctgtggcgcaggtggatggggactctgtgagtggcatttgttttgtgggctacaagaactaccgataccgtgcgggcttcgtgctggccccaatcggcctggtgctcatcgtgggaggctacttcctcatccgaggagtcatgactctgttctccatcaagagcaaccaccccgggctgctgagtgagaaggctgccagcaagatcaacgagaccatgctgcgcctgggcatttttggcttcctggcctttggctttgtgctcattaccttcagctgccacttctacgacttcttcaaccaggctgagtgggagcgcacttccgggactatgtgctatgtcaggccaatgtgaccatcgggctgcccaccaagcagcccatccctgactgtgagatcaagaatcgcccgagccttctggtggagaagatcaacctgtttgccatgtttggaactggcatcgccatgagcacctgggtctggaccaaggccacgctgctcatctggaggcgtacctggtgcaggttgactgggcagagtgacgatgagccaaagcggatcaagaagagcaagatgattgccaaggccttctctaagcggcacgagctcctccagaacccaggccaggagctgtccttcagcatgcacactgtgtcccacgacgggcccgtggcgggcttggcctttgacctcaatgagccctcagcttgatgtctcctctgcctgggcccagcatgtcaccaagatggtggctcggagaggagccatactgccccaggatatttctgtcacccctgtggcaactccagtgcccccagaggaacaagccaacctgtggctggttgaggcagagatctccccagagctgcagaagcgcctgggccggaagaagaagaggaggaagaggaagaaggaggtgtgcccgctggcgccgccccctgagcttcacccccctgcccctgcccccagtaccattcctcgactgcctcagctgccccggcagaaatgcctggtggctgcaggtgcctggggagctggggactcttgccgacagggagcgtggaccctggtctccaacccattctgcccagagcccagtccccctcaggatccatttctgcccagtgcaccggcccccgtggcatgggctcatggccgccgacagggcctggggcctattcactcccgcaccaacctgatggacacagaactcatggatgcagactcggacttctgagcctgcagagcaggacctgggacaggaaagagaggaaccaataccttcaaggctcttcttcctcaccgagcatgctttccctaggatcccgtcttccagagaacctgtgggctgactgccctccgaagagagttctggatgtctggctcaaagcagcaggactgtgggaaagagcctaacatctccatggggaggcctcaccccagggacagggccctggagctcagggtccttgtttctgccctgccagctgcagcctggttggcagcatctgctccatcggggcagggggtatgcagagcttgtggtggggcaggaacggtggaggcagaggtgacaagttcccagaagtgggctttggtggccagggaggcaagcctagcctatgtctggcagatgaagggctggcttgccgttttctgggctgatgggtgccctttccttggcaagtctcagtccaaaaagtgttgactgtgtcatttagtcctttgtctaagtagggccagggcaccgtatttcctctcccaggtgtttgtggggctggaaggacctgctcccacaggggccatgtcctctcttaataggtggcactaccccaaacccatcttttgttctcctatatcctccttctcctgttccatttcagttcagtttcagcggtgccaacctctttgcgtttcctttttgttgatgaggacccagagctgctgcacacactcacctctaaccccctcccctcgctgctgggccccatctccacaggagagactggttcggctctagggcctcagtctggagtgggataggagcagtgagtgacaaagcctctgaaagatgcatcgtctcttcctcacacccatttagtgggggatgggtcctctagacttgaggggctaccctgggaagctgccgtagcttcagccaggcaagaaagcttccttcaacctgcatagccggtgggtgaggagattcccaccttccatagcctccaaacatgttcccaaggccccactttcaagaatcagacagcaggaagccatagatgctggctgggttccaggttatggggagaagaaatacagtcaataaaaggtttttgtataaaaaaaaaaaaaaa

SEQ ID NO: 1006 - DNA, 2015 bp, Homo sapiens
  misc_feature (6)..(6): n equals a,t,g, or c
  misc_feature (40)..(40): n equals a,t,g, or c
  misc_feature (47)..(47): n equals a,t,g, or c
  misc_feature (54)..(54): n equals a,t,g, or c
  misc_feature (66)..(66): n equals a,t,g, or c
  misc_feature (1761)..(1761): n equals a,t,g, or c
  misc_feature (1782)..(1782): n equals a,t,g, or c
  misc_feature (1792)..(1792): n equals a,t,g, or c
  misc_feature (2004)..(2004): n equals a,t,g, or c
cgcttnccaaagggagaaagggggccaggtttccggtaancggcaangtcggancaggagagcgcncgaggaagcttccagggggaacgcctggtatctttatagtcctgtcgggtttcgccacctctgacttgagcgtcgatttttgtgatgctcgtcaggggggcggagcctatggaaaaacgccagcaacgcggcctttttacggttcctggccttttgctggccttttgctcacatgttctttcctgcgttatcccctgattctgtggataaccgtattaccgcctttgagtgagctgataccgctcgccgcagccgaacgaccgagcgcagcgagtcagtgagcgaggaagcggaagagcgcccaatacgcaaaccgcctctccccgcgcgttgrccgattcattaatgcagctggcacgacaggtttcccgactggaaagcgggcagtgagcgcaacgcaattaatgtgagttagctcactcattaggcaccccaggctttacactttatgcttccggctcgtatgttgtgtggaattgtgagcggataacaatttcacacaggaawcagctatgaccatgattacgccaagctcgaaattaaccctcactaaagggaacaaaagctggagctccaccgcggtggcggccgctctagaactagtggatcccccgggctgcaggaattcggcacgagcttttttaatggctgaataatatcctatcgtgcgtatatacctcattttctttgatttttctttctttcttttcaaatagagatgaggtctcactatattgcccaggctggtcttgaactttagggctcaagcaatcttcctgccttggcctcccaaagtgctgggattccaggctaaaccattgtgctcctttatgcatttttctttttttaagacagaatctagctccgttgcccagaatggagtgcagtggcacgatcttggctcactgcagcctccacctcctgggttgaaatgattctcgtgcctcagcctcccgagtagctgggattacaggcacccaccaccacgcccagctaattttggatttttagtagagatggggtttcaccatgttggccaggctggtctcaaactcctgacctcaggtgtttcacctgcctcggcctcccaaagtgctgggattacaggcatgagccaccgcgcccagcccctttgtgcacttttaaaaacatatcttagaatttgtgatatatgttttattttcattttcatttggttcacaatatagtaaaatttctattatgacttactctttgacccatgatttgttttaaaacgtattgtttaattttcaaacatttagggatttcccagatatctttgttgttggtttctaatttgattccattatggttagagaccatacttggtatgatgaattaaaaaaaaaaaaaaaaaactcgagggggggcccggtacccaattcgccctataggagtcgtrttacaattcactggccgtcgttttacaacgtcgtgactgggaaaaccctggcgttacccaacttaatcgccttgcagcacatccccctttcgccagctggcgtaatagcgaagaggcccgcaccgatcgcccttcccaacagttgcgcagcctgaatggcgaatggcaaattgtaagcgttaatattttgttaaaattcgcgttaaatttttgttaaatcagctcattttttaaccaataggccgaaatcggcaaaatcccttataaatcanaagaatagaccgagatagggntgagtgttgntccagtttggaacaagagtccactattaaagaacgtggactccaacgtcaaagggcgaaaaaccgtctatcagggcgatggcccactacgtgaaccatcaccctaatcaaggtttttggggtcgaggtgccgaaagcactaaatcggaaccctaaagggagcccccgatttagagcttgacggggaaagccggcgaacgtggccagaaaggnagggaagaagc

SEQ ID NO: 1007 - DNA, 588 bp, Homo sapiens
  misc_feature (37)..(37): n equals a,t,g, or c
gccaggctcggaattacccctccacttaaggggaacnaagctggagctccacgcggtkgcggccgctctagaactagtggatcccccgggctgcaggaattcggcacgagcctccctatacttttaaaaatttattcatgttaaaccaaaaaaaaagaagaagaagaagaagaagaaaaaaaacagctgctgtagcctctgcaacttgctgagagcttgtttaggaatagagagcttatttttcccttccctctatctcagctcaagcctaacagccgggtggtgctttcatgtgtacctctcttgcatcctagaaagtacaaagtacatctgacttggaaatgctctgtggataagaatgtgagccgcatcaacgtagataaaatatttacggggaaattatgtggagggagttgtgttttgttttyttttttttttaatggagtctcactctgtcacctatgctggagtacagtgacaggatcatggctcatgacagtgagccgagatggctacactccagtctgggcaacaagcacgaaactccatctcaaaaaaaaaaaaaaaaaaaaaaaaaaaaaactcgta

SEQ ID NO: 1008 - DNA, 1291 bp, Homo sapiens
ggcacgagagccaccacacctggcctggaaggaacctcttaaaatcagtttacgtcttgtattttgttctgtgatggaggacactggagagagttgctattccagtcaatcatgtcgagtcactggactctgaaaatcctattggttcctttattttatttgagtttagagttcccttctgggtttgtattatgtctggcaaatgacctgggttatcacttttcctccagggttagatcatagatcttggaaactccttagagagcattttgctcctaccaaggatcagatactggagccccacataatagatttcatttcactctagcctacatagagctttctgttgctgtctcttgccatgcacttgtgcggtgattacacacttgacagtaccaggagacaaatgacttacagatcccccgacatgcctcttccccttggcaagctcagttgccctgatagtagcacgtttctgtttctgatgtaccttttttctcttcttctttgcatcagccaattcccagaatttccccaggcaatttgtagaggacctttttggggtcctatatgagccatgtcctcaaagcttttaaacctccttgctctcctacaatattcagtacatgaccactgtcatcctagaaggcttctgaaaagaggggcaagagccactctgcgccacaaaggttgggtccatcttctctccgaggttgtgaaagttttcaaattgtactaataggctggggccctgacttggctgtgggctttgggaggggtaagctgctttctagatctctcccagtgaggcatggaggtgtttctgaattttgtctacctcacagggatgttgtgaggcttgaaaaggtcaaaaaatgatggccccttgagctctttgtaagaaaggtagatgaaatatcggatgtaatctgaaaaaaagataaaatgtgacttcccctgctctgtgcagcagtcgggctggatgctctgtggcctttcttgggtcctcatgccaccccacagctccaggaaccttgaagccaatctgggggactttcagatgtttgacaaagaggtaccaggcaaacttcctgctacacatgccctgaatgaattgctaaatttcaaaggaaatggaccctgcttttaaggatgtacaaaagtatgtctgcatcgatgtctgtactgtaaatttctaatttatcactgtacaaagaaaaccccttgctatttaattttgtattaaaggaaaataaagttttgtttgttaaaaaaaaaaaaaaaaaaaaaa

SEQ ID NO: 1009 - DNA, 926 bp, Homo sapiens
gaattcggcacgagatgaaataaggcatgggccaaaagaactgcagtgatgggcagagatactggggtgcccagtgccccagtggagcatcttgttttctgggaatgctcgccgcctgggcatggcttaggtaaggggtgggaagaagggttgcatcatgtggccagggaaaagagccacagacatcctttctctataaacctggtccttgcccgctccctactccatggctgggtgttctgggttgccaccttcaagcatgcttttttttttttgaaggtctcactctgtcacccagactgcagtgcagtggcacgatctcggctcactctcgtgccgaattcggcacgagattaaatattcctgttgtaaagataccagccaaatcttaccaagaccgaaaaaccttagatgacttgtcgctgttctgagacctgaaatttcttgagaaaaactttccttttcgagatgttagagatagcttcgtctcgttctgtattcctgtcttccttggactcccctcttccctgccttattcccagctcctcccgctcctttcttttcctttttcagcacctagagatttagaggatggggagtggagtaggtagcctctcaaagtctcttgggtctttcattttctaatcgatgtatgactaarcatcctaccagctgagtcttgtagatttcaaatactgtttcttaatcacatgagaagaaagctcattgctttcatactctgatcacaatctctttgtttcacagtagatttcgctcagataccaggatgccttcccctgtggctgtctcggaacacaggtcctggattttctaaggtctatttcactgaacaagctcaccaacattcaattttttttttattctctgaaaaaatttttaattaaaaaaaaaaaaaaaaaactcga

SEQ ID NO: 1010 - DNA, 632 bp, Homo sapiens
ggcacgagcttctcttccccacctccccttgtaccatgagtggcttgtctgctgtgggagggggcagcacttggaccaaaggcctgccccatggtctggacggggcaggctgggatgtgtgttccttggccactttggggctcaaagtagcatctgtgctgttagatctgatcttggctttagttttttttggccttcagctccctggtcaagcacttgtggccagtgacagactgtaaaacacactggaaatgtagtctgtttactgggcctgcaaaaccagtcgcaattggtgacactggtgtccttgatgacaattagaatcattgccgttgtctttctttttagacttttgcagtcaccaagagggcggtggggtgacacatctgtgtcacttccctgcccagagaatgcactggctgatcatttgatattaagacaggttaggccacccaccacggtgagcatgcgtgcccatcattaaaatgcaggttaggccaggcgcggtggctcacgcctgtaatcccagcactttgggaggccgaggcgggcagatcacgaggtcaggagatcgagaccatcctggctaacatggtgaaaccccgtctctacttaaaaaaaaaaaaaaaaaa

SEQ ID NO: 1011 - DNA, 224 bp, Homo sapiens
atgggtcactgttgcctccttgtactcctccttatcatcattctcacattcactgagccctcattatgtgaatgggccactctaggaccttatattcctactgaaaatcaggaagaaatcaagggagcatgtacagtatgtgtacttttgaatgttctagtcgactttgcagtaatatcgaaaaggtgccctaattaagtcctcagaaaaaaaaaaaaaaaaaa

SEQ ID NO: 1012 - DNA, 2796 bp, Homo sapiens
gggcattttctcctggacaaggagagagtgcggctgctgagagccgagcccagcaatcccgatcctctgagtcgtgaagaagggaggcagcgagggggttggggttggggcctgaggcaagcccccaggctccgctcttgccagagggacaggagccatggctcagaaaatggactgtggtgcgggcctcctcggcttccaggctgaggcctccgtagaagacagcgccttgcttatgcagaccttgatggaggccatccagatctcagaggctccacctactaaccaggccaccgcagctgctagtccccagagttcacagcccccaactgccaatgagatggctgacattcaggtttcagcagctgccgctaggcctaagtcagcctttaaagtccagaatgccaccacaaaaggcccaaatggtgtctatgatttctctcaggctcataatgccaaggatgtgcccaacacgcagcccaaggcagcctttaagtcccaaaatgctaccccaaagggtccaaatgctgcctatgatttttcccaggcagcaaccactggtgagttagctgctaacaagtctgagatggccttcaaggcccagaatgccactactaaagtgggcccaaatgccacctacaatttctctcagtctctcaatgccaatgacctggccaacagcaggcctaagacccctttcaaggcttggaatgataccactaaggccccaacagctgatacccagacccagaatgtaaatcaggccaaaatggccacttcccaggctgacatagagaccgacccaggtatctctgaacctgacggtgcaactgcacagacatcagcagatggttcccaggctcagaatctggagtcccggacaataattcggggcaagaggacccgcaagattaataacttgaatgttgaagagaacagcagtggggatcagaggcgggccccactggctgcagggacctggaggtctgcaccagttccagtgaccactcagaacccacctggcgcaccccccaatgtgctctggcagacgccattggcttggcagaacccctcaggctggcaaaaccagacagccaggcagaccccaccagcacgtcagagccctccagctaggcagaccccaccagcctggcagaacccagtcgcttggcagaacccagtgatttggccaaacccagtaatctggcagaacccagtgatctggccaaaccccattgtctggcccggccctgttgtctggccgaatccactggcctggcagaatccacctggatggcagactccacctggatggcagaccccaccgggctggcagggtcctccagactggcaaggtcctcctgactggccgctaccacccgactggccactgccacctgattggccacttcccactgactggccactaccacctgactggatccccgctgattggccaattccacctgactggcagaacctgcgcccctcgcctaacctgcgcccttctcccaactcgcgtgcctcacagaacccaggtgctgcacagccccgagatgtggcccttcttcaggaaagagcaaataagttggtcaagtacttgatgcttaaggactacacaaaggtgcccatcaagcgctcagaaatgctgagagatatcatccgtgaatacactgatgtttatccagaaatcattgaacgtgcatgctttgtcctagagaagaaatttgggattcaactgaaagaaattgacaaagaagaacacctgtatattctcatcagtacccccgagtccctggctggcatactgggaacgaccaaagacacacccaagctcggtctcctcttggtgattctgggtgtcatcttcatgaatggcaaccgtgccagtgaggctgtcctctgggaggcactacgcaagatgggactgcgtcctggggtgagacatcccctccttggagatctaaggaaacttctcacctatgagtttgtaaagcagaaatacctggactacagacgagtgcccaacagcaaccccccggagtatgagttcctctggggcctccgttcctaccatgagactagcaagatgaaagtgctgagattcattgcagaggttcagaaaagagaccctcgtgactggactgcacagttcatggaggctgcagatgaggccttggatgctctggatgctgctgcagctgaggccgaagcccgggctgaagcaagaacccgcatgggaattggagatgaggctgtgtctgggccctggagctgggatgacattgagtttgagctgctgacctgggatgaggaaggagattttggagatccctggtccagaattccatttaccttctgggccagataccaccagaatgcccgctccagattccctcagacctttgccggtcccattattggtcctggtggtacagccagtgccaacttcgctgccaactttggtgccattggtttcttctgggttgagtgagatgttggatattgctatcaatcgcagtagtctttcccctgtgtgaggctgaagcctcagattccttctaaacacagctatctagagagccacatcctgttgactgaaagtggcatgcaagataaatttatttgctgttccttgtctactgctttttttccccttgtgtgctgtcaagttttggtatcagaaataaacattgaaattgcaaagtgaaaaaaaaaaaaaaaaaaaaaaaaaaaaaaaaaaaaaaaaaaaaaaaaaaaaaactcgtagggggggcccgtacccaatagccctgt

SEQ ID NO: 1013 - DNA, 1197 bp, Homo sapiens
aacctgcacagccatgcccgggcaagaactcaggacgctgaatggctctcagatgctcctggtgttgctggtgctctcgtggctgccgcatgggggcgccctgtctctggccgaggcgagccgcgcaagtttcccgggaccctcagagttgcactccgaagactccagattccgagagttgcggaaacgctacgaggacctgctaaccaggctgcgggccaaccagagctgggaagattcgaacaccgacctcgtcccggcccctgcagtccggatactcacgccagaagtgcggctgggatccggcggccacctgcacctgcgtatctctcgggccgcccttcccgaggggctccccgaggcctcccgccttcaccgggctctgttccggctgtccccgacggcgtcaaggtcgtgggacgtgacacgaccgctgcggcgtcagctcagccttgcaagaccccaggcgcccgcgctgcacctgcgactgtcgccgccgccgtcgcagtcggaccaactgctggcagaatcttcgtccgcacggccccagctggagttgcacttgcggccgcaagccgccagggggcgccgcagagcgcgtgcgcgcaacggggaccactgtccgctcgggcccgggcgttgctgccgtctgcacacggtccgcgcgtcgctggaagacctgggctgggccgattgggtgctgtcgccacgggaggtgcaagtgaccatgtgcatcggcgcgtgcccgagccagttccgggcggcaaacatgcacgcgcagatcaagacgagcctgcaccgcctgaagcccgacacggtgccagcgccctgctgcgtgcccgccagctacaatcccatggtgctcattcaaaagaccgacaccggggtgtcgctccagacctatgatgacttgttagccaaagactgccactgcatatgagcagtcctggtccttccactgtgcacctgcgcgggggaggcgacctcagttgtcctgccctgtggaatgggctcaaggttcctgagacacccgattcctgcccaaacagctgtatttatataagtctgttatttattattaatttattggggtgaccttcttggggactcgggggctggtctgatggaactgtgtatttatttaaaactctggtgataaaaataaagctgtctgaactgttaaaaaaaaaaaaaaaa

SEQ ID NO: 1014 - DNA, 501 bp, Homo sapiens
  misc_feature (459)..(459): n equals a,t,g, or c
  misc_feature (499)..(499): n equals a,t,g, or c
  misc_feature (501)..(501): n equals a,t,g, or c
agggsacgcggccgaggagggtcgctgtccacccgggggcgtgggagtgaggtaccagattcagcccatttggccccgacgcctctgttctcggaatccgggtgctgcggattgaggtcccggttcctaacggactgcaagatggaggaaggcgggaacctaggaggcctgattaagatggtccatctactggtcttgtcaggtgcctggggcatgcaaatgtgggtgaccttcgtctcaggcttcctgcttttccgaagccttccccgacataccttcggactagtgcagagcaaactcttccccttctacttccacatctccatgggctgtgccttcatcaacctctgcatcttggcttcacagcatgcttgggctcagctcacattctgggaggccagccagctwwacctgctgttcctgagccttacgctggccactgtcarcgcccgctggctngawccccrttggcacttccgttaaagttccccttaaagancn

SEQ ID NO: 1015 - DNA, 340 bp, Homo sapiens
ccacgcgtccgcccatattgttaaaaggacaattaaagaaatgaaagagaggtcacctgggtgaataggcaacttagatgggcctccctgtgttcctgtcatgcctccaattctgcgtccaggtgtccggaacacatttttttctgcctttgaaaccttccagtacctctggcagagatataccataccctccttgttacctgcgtgcggaatcttaactcatcgttgtgctatatctgcaccttctgcctttgtgccttgttttgtgttttccctcctccggggagaatataataaacttagctgagtccgttctaaaaaaaaaaaaaaaaaaaaaaaa

SEQ ID NO: 1016 - DNA, 450 bp, Homo sapiens
accaagcgttggattgttcacccactaatagggaacgtgagctgggtttagaccgtcgtgagacaggttagttttaccctactgatgatgtgttgttgccatggtaatcctgctcagtacgagaggaaccgcaggttcagacatttggtgtatgtgcttggctgaggagccaatggggcgaagctaccatctgtgggattatgactgaacgcctctaagtcagaatcccgcccaggcggaacgatacggcagcgccgcggagcctcggttggcctcgggtagccggtcccccgcctgtccccgccggcgggccgccccccccctccacgcgccccgcgcgcgcgggagggcgcgtgccccgccgcgcgccgggaccggggtccggtgcggagtgcccttcgtcctgggaaacggggcgcggccggaaaggcggccgctctagaggatccc

SEQ ID NO: 1017 - DNA, 4699 bp, Homo sapiens
  misc_feature (4086)..(4086): n equals a,t,g, or c
  misc_feature (4579)..(4579): n equals a,t,g, or c
  misc_feature (4597)..(4597): n equals a,t,g, or c
  misc_feature (4605)..(4605): n equals a,t,g, or c
  misc_feature (4646)..(4646): n equals a,t,g, or c
  misc_feature (4678)..(4678): n equals a,t,g, or c
  misc_feature (4691)..(4691): n equals a,t,g, or c
gcgaggtatgcagacaacgagtcagagtttccccttgaaagctcaaaagtgtccacgtcctcaaaaagaatggaaccaatttaagaagccagccccgtggccacgtcccttcccccattcgctccctccttgcgcccccgcaggctcctcccagctgtggctgcccggcccccagccccagccctcccattggtggaggcccttttggaggcaccctagggccagggaaacttttgccgtataaatagggcagatccgggctttattattttagcaccacggcagcaggaggtttcggctaagttggaggtactggccacgactgcatgcccgcgcccgccaggtgatacctccgccggtgacccaggggctctgcgacacaaggagtctgcatgtctaagtgctagacatgctcagctttgtggatacgcggactttgttgctgcttgcagtaaccttatgcctagcaacatgccaatctttacaagaggaaactgtaagaaagggcccagccggagatagaggaccacgtggagaaaggggtccaccaggccccccaggcagagatggtgaagatggtcccacaggccctcctggtccacctggtcctcctggcccccctggtctcggtgggaactttgctgctcagtatgatggaaaaggagttggacttggccctggaccaatgggcttaatgggacctagaggcccacctggtgcagctggagccccaggccctcaaggtttccaaggacctgctggtgagcctggtgaacctggtcaaactggtcctgcaggtgctcgtggtccagctggccctcctggcaaggctggtgaagatggtcaccctggaaaacccggacgacctggtgagagaggagttgttggaccacagggtgctcgtggtttccctggaactcctggacttcctggcttcaaaggcattaggggacacaatggtctggatggattgaagggacagcccggtgctcctggtgtgaagggtgaacctggtgcccctggtgaaaatggaactccaggtcaaacaggagcccgtgggcttcctggtgagagaggacgtgttggtgcccctggcccagctggtgcccgtggcagtgatggaagtgtgggtcccgtgggtcctgctggtcccattgggtctgctggccctccaggcttcccaggtgcccctggccccaagggtgaaattggagctgttggtaacgctggtcctgctggtcccgccggtccccgtggtgaagtgggtcttccaggcctctccggccccgttggacctcctggtaatcctggagcaaacggccttactggtgccaagggtgctgctggccttcccggcgttgctggggctcccggcctccctggaccccgcggtattcctggccctgttggtgctgccggtgctactggtgccagaggacttgttggtgagcctggtccagctggctccaaaggagagagcggtaacaagggtgagcccggctctgctgggccccaaggtcctcctggtcccagtggtgaagaaggaaagagaggccctaatggggaagctggatctgccggccctccaggacctcctgggctgagaggtagtcctggttctcgtggtcttcctggagctgatggcagagctggcgtcatgggccctcctggtagtcgtggtgcaagtggccctgctggagtccgaggacctaatggagatgctggtcgccctggggagcctggtctcatgggacccagaggtcttcctggttcccctggaaatatcggccccgctggaaaagaaggtcctgtcggcctccctggcatcgacggcaggcctggcccaattggcccmgctggagcaagaggagagcctggcaacattggattccctggacccaaaggccccactggtgatcctggcaaaaacggtgataaaggtcatgctggtcttgctggtgctcggggtgctccaggtcctgatggaaacaatggtgctcagggacctcctggaccacagggtgttcaaggtggaaaaggtgaacagggtcccgctggtcctccaggcttccagggtctgcctggcccctcaggtcccgctggtgaagttggcaaaccaggagaaaggggtctccatggtgagtttggtctccctggtcctgctggtccaagaggggaacgcggtcccccaggtgagagtggtgctgccggtcctactggtcctattggaagccgaggtccttctggacccccagggcctgatggaaacaagggtgaacctggtgtggttggtgctgtgggcactgctggtccatctggtcctagtggactcccaggagagaggggtgctgctggcatacctggaggcaagggagaaaagggtgaacctggtctcagaggtgaaattggtaaccctggcagagatggtgctcgtggtgctcctggtgctgtaggtgcccctggtcctgctggagccacaggtgaccggggcgaagctggggctgctggtcctgctggtcctgctggtcctcggggaagccctggtgaacgtggtgaggtcggtcctgctggccccaatggatttgctggtcctgctggtgctgctggtcaacctggtgctaaaggagaaagaggagccaaagggcctaagggtgaaaacggtgttgttggtcccacaggccccgttggagctgctggcccagctggtccaaatggtccccccggtcctgctggaagtcgtggtgatggaggcccccctggtatgactggtttccctggtgctgctggacggactggtcccccaggaccctctggtatttctggccctcctggtccccctggtcctgctgggaaagaagggcttcgtggtcctcgtggtgaccaaggtccagttggccgaactggagaagtaggtgcagttggtccccctggcttcgctggtgagaagggtccctctggagaggctggtactgctggacctcctggcactccaggtcctcagggtcttcttggtgctcctggtattctgggtctccctggctcgagaggtgaacgtggtctaccaggtgttgctggtgctgtgggtgaacctggtcctcttggcattgccggccctcctggggcccgtggtcctcctggtgctgtgggtagtcctggagtcaacggtgctcctggtgaagctggtcgtgatggcaaccctgggaacgatggtcccccaggtcgcgatggtcaacccggacacaagggagagcgcggttaccctggcaatattggtcccgttggtgctgcaggtgcacctggtcctcatggccccgtgggtcctgctggcaaacatggaaaccgtggtgaaactggtccttctggtcctgttggtcctgctggtgctgttggcccaagaggtcctagtggcccacaaggcattcgtggcgataagggagagcccggtgaaaaggggcccagaggtcttcctggcttaaagggacacaatggattgcaaggtctgcctggtatcgctggtcaccatggtgatcaaggtgctcctggctccgtgggtcctgctggtcctaggggccctgctggtccttctggccctgctggaaaagatggtcgcactggacatcctggtacagttggacctgctggcattcgaggccctcagggtcaccaaggccctgctggcccccctggtccccctggccctcctggacctccaggtgtaagcggtggtggttatgactttggttacgatggagacttctacagggctgaccagcctcgctcagcaccttctctcagacccaaggactatgaagttgatgctactctgaagtctctcaacaaccagattgagacccttcttactcctgaaggctctagaaagaacccagctcgcacatgccgtgacttgagactcagccacccagagtggagcagtggttactactggattgaccctaaccaaggatgcactatggatgctatcaaagtatactgkgatttctctactggcgaaacctgtatccgggcccaacctgaaaacattccaccaagaactggtataggagctccaaggacaagaaacacgtntggctaggagaaactatcaatgctggcagccagtttgaatataatgtagaaggagtgacttycaaggaaatggctacccaacttgscttcatgcgcctgstggccaactatgcctctcagaacatcacctaccactgcaagaacagcattgcatacatggatgaggagactggcaacctgaaaaaggctgtcattctacagggctctaatgatgttgaacttgttgctgagggcaacagcaggttcacttacactgttcttgtagatggctgctctaaaaagacaaatgaatggggaaagacaatcattgaatacaaaacaaataagccatcacgcctgccttccttgatattgcacctttggacatcggtggtgctgaccaggaattctttgtggacattggcccagctggttcaaataaatgaactcaatctaaattaaaaaggaaaggaaatttgaaaaactttctcttgccattcttcttcttcttttnactgaaagctgaatcttncattcttntgacattacttgttaaatgggggccaaaaaaaaaagaaggntggtcaaacattggccaaacagttattaaccnttccccgttcccnaaattgaa

SEQ ID NO: 1018 - DNA, 599 bp, Homo sapiens
  misc_feature (13)..(13): n equals a,t,g, or c
agggcgaattggntaccgggccccccttcgagtgacgacctaaagcaggtttgatttgaaaagaaacaacacatctatatcccagctccacccttcagtcttaagagacagtgaaaccagccctaagaacactatctcttccaagagcaaggccagggtccgcacgaatcaagtggccaccaactgacgggcaactttgctcactacctcaatctgtcaaactcgtcggattatcaccgggaaatcaaacgtcatgccggcaaagtacgggcgctccactgagggctctgggggcataacaggttaaggctaactcacaggtccaagagacacttctagccactgtctcagtgagcggcggttcggaagaataaaggcacgcctcccagggtaccctcccagtacaccgagcagtgagagcgcggcaagtagaaaagcagcgcacgaccccatggcatcgccgggcggcaggcccaggtgcactcaggaaaagaccctgggcactggctgctttcaccgcgcggaatcgccaactgcagcccagcgacagggtgaggggtcgagaggggctgcgggaccagagacgatccctccggaga

SEQ ID NO: 1019 - DNA, 1424 bp, Homo sapiens
ggcacgaggtggtagtaacgatagactctaatgcctttttaaattcactgcaagtcattactgtacattaacaagaaagacaagatatgaggatgtattatataaaatagcagtaccattaggcactgctttttatgagccctgacgtctcccagttctactgttaatttctcatggtagcttcattcattgtctacttttccattataactatcttatactttaatatcactaattcatcactttatgatacagttaaccaacattttaaattgaaattcttcttttcacaggactctaattatgggagataagaaagctgggttttctgttttctgggctgatgatggcttggatacaggacccatccttcttcagagatcatgtgatgttgaacccaatgatacagtggatgcactttataatcggtttctttttcctgaaggaatcaaggccatggtagaagctgtccaactcatagctgatggaaaagctcctcgtataccccagccagaagaaggggcaacatatgaaggtatccagaaaaaggaaaatgctgaggtatttatatatcaactcaataacacgtctcagagttcatggccctctacccttcagtagttccccacatactatgatcttgccaaaaggtaagccagcttgccctagccctacctgttagagtagacaggtagccagacatacgcaggagaggggagtcccctaaagaaaataaagtctgggaagactcgtgtctggaagaccactcaaaatttgcatattaatagtatctctaatgctggagtgggtgggcacttagtcaaatgtgcatagaaaggagaggagatactatgcaaacaaacaaacaaacaagcaaataaaaaatgcccagaaacgcctcttcagtctgcccaacaatccttcgctctgcagttaaaatgtcaaaatatcactagctacatgctaatgaaaagggcaaaggggatattccttaaaaaatctggcatgctaggtgcgctgggcacagtggctcatgcctgtaatcccagcactttgggaggctgagggaggaggatcacttgagaccaggcattcgagaccagcctggccaacacagtgagacccctgtctcaaaaaacaaaaaacaaaaacctggagccataagttcagcttagggcagagaaggaaattccaaaaaaacacacagatgcagtaggtatagatttggccactatacaacctccctgcagtgacaatagtaaacaacacaggcatcaggtaatattcatatccaacaccaatccacacatacacaccaactaacaatatggagggtcccataaacctgagacaaaatctaggtgcagacaaagcagagagctaagacagacacaaacaaactagacaaaaaaaaaaaaaaaaaa

SEQ ID NO: 1020 - DNA, 1542 bp, Homo sapiens
cccacgcgtccggggaattcactctgttttgcagaaaagattctgtggattaatacagaagcaccagcaacaccagaggggtggagactcctttctctcccgattctacagtctggctctaagcccagtaaaacagctcccgagcactgcttcagctgggtccagtcttgacaaaggcaggaagccagctagggtgggggcgatagggtcagcgggtatgtcccactgttggaggtcactggtattctgtttgtttttgttttgtttcgttttgttttttgagacagggtctcgttctgtcgcttagctggagtgcggtggcgtgatcatggcactgctattcttgaagcactccacccacctgggctactttttctttagtgcagaggtgcactgtcttcttttaggtgggatcgcgtaagcatgagctggtagagcacggagaggcaggcagccaggttacgaagactaagccaattattcactgaagtcatcctcctctcccccaccattcgatttgatctacctctaagccaggctgtgaagaaaaggaaggcactttagaagacctcagcagtgtggttctgtgtctacttccatgacctgtacctgagtatcttagccagccagccttaggaacaccaccaaggttactttgaaatctatgtatatagctagttacagacgggagctatgtgtttcttcattattttgcagctcctcgttgttcctgtgattcctgaacacctttttggaaatatgggtctctgtgagttttgagcacactactatcactttggatagtcactccatttatatttttataaacttccattagagaatcattaaggctgtttaatatctgctctggatattacgcattggctttttgttgcctagtgctacaaaccttcctgtgggactcagtgtcttcaggcaatgattgtgtatcctgttacagatggttgtgatacaagaagaaccactcttctttgaaaataaactcttggaagcttttgccagctatctggggggtaggaggaatattagcaactgtattggttgtctacagatacagaattgcctgttgtgagggaactgattgttttgttgggaaaagaaatttaccaggagaaagagttttgtgctgtattgtgagagatctcgcctctcagttaaatgagccctgggttaaagtcagtgtgaagggcagctgtgtgcgggcacgagccagagtgtctgcctcagactagatttgacttgagttctttatgacccaggactctggataatgtgaatttgctttcctatttaactagaagatacatgtactatagatcattgtctcattttagtgattgttccttaaactagtgaaactagtggatttctcttcttcctctttattttttgcatgttaaatgtgaaccttagtgtatttgtattttgtagaaaataatgaaaaattttaatggagaatgatttaaaaacatttacaatacattatttttgcatctgtaaaaaaaaaaaaaaaaaaaaaaa

SEQ ID NO: 1021 - DNA, 2794 bp, Homo sapiens
caaaaactggagacacagaagagggctctaggaaaaagttttggatgggattatgtggaaactaccctgcgattctctgctgccagagcaggctcggcgcttccaccccagtgcagccttcccctggcggtggtgaaagagactcgggagtcgctgcttccaaagtgcccgccgtgagtgagctctcaccccagtcagccaaatgagcctcttcgggcttctcctgctgacatctgccctggccggccagagacaggggactcaggcggaatccaacctgagtagtaaattccattttccagcaacaaggaacagaacggtaggaactatatccaagcatctggactggcatagaaaagaggagaaagaacatttaaaaggagtacaagatcctcagcatgagagaattattactgtgtctactaatggaagtattcacagcccaaggtttcctcatacttatccaagaaatacggtcttggtatggagattagtagcagtagaggaaaatgtatggatacaacttacgtttgatgaaagatttgggcttgaagacccagaagatgacatatgcaagtatgattttgtagaagttgaggaacccagtgatggaactatattagggcgctggtgtggttctggtactgtaccaggaaaacagatttctaaaggaaatcaaattaggataagatttgtatctgatgaatattttccttctgaaccagggttctgcatccactacaacattgtcatgccacaattcacagaagctgtgagtccttcagtgctacccccttcagctttgccactggacctgcttaataatgctataactgcctttagtaccttggaagaccttattcgatatcttgaaccagagagatggcagttggacttagaagatctatataggccaacttggcaacttcttggcaaggcttttgtttttggaagaaaatccagagtggtggatctgaaccttctaacagaggaggtaagattatacagctgcacacctcgtaacttctcagttgccataagggaaagaactaaagagaaccgataccattttctggccaggttgtctcctggttaaacgctgtggtgggaactgtgcctgttgtctccacaattgcaatgaatgtcaatgtgtcccaagcaaagttactaaaaaataccacgaggtccttcagttgagaccaaagaccggtgtcaggggattgcacaaatcactcaccgacgtggccctggagcaccatgaggagtgtgactgtgtgtgcagagggagcacagggggatagccgcatcaccaccagcagctcttgcccagagctgtgcagtgcagtggctgattctattagagaacgtatgcgttatctccatccttaatctcagttgtttgcttcaaggacctttcatcttcaggatttacagtgcattctgaaagaggagacatcaaacagaattaggagttgtgcaacagctcttttgagaggaggcctaaaggacaggagaaaaggtcttcaatcgtggaaagaaaattaaatggtggattaaatagatcacccctagtttcagagttaccatgtacgtattccactagctgggttctgtatttcagttctttcgatacggcttagggtaatgtcagtacaggaaaaaaactgtgcaagtgagcacctgattccgttgccttgcttaactctaaagctccatgtcctgggcctaaaatcgtataaaatctggatttttttttttttttttgctcatattcacatatgtaaaccagaacattctatgtactacaaacctggtttttaaaaaggaactatgttgctatgaattaaacttgtgtcatgctgataggacagactggatttttcatatttcttattaaaatttctgccatttagaagaagagaactacattcatggtttggaagagataaacctgaaaagaagagtggccttatcttcactttatcgataagtcagtttatttgtttcattgtgtacatttttatattctccttttgacattataactgttggcttttctaatcttgttaaatatatctatttttaccaaaggtatttaatattcttttttatgacaacttagatcaactatttttagcttggtaaatttttctaaacacaattgttatagccagaggaacaaagatgatataaaatattgttgctctgacaaaaatacatgtatttcattctcgtatggtgctagagttagattaatctgcattttaaaaaactgaattggaatagaattggtaagttgcaaagactttttgaaaataattaaattatcatatcttccattcctgttattggagatgaaaataaaaagcaacttatgaaagtagacattcagatccagccattactaacctattccttttttggggaaatctgagcctagctcagaaaaacataaagcaccttgaaaaagacttggcagcttcctgataaagcgtgctgtgctgtgcagtaggaacacatcctatttattgtgatgttgtggttttattatcttaaactctgttccatacacttgtataaatacatggatatttttatgtacagaagtatgtctcttaaccagttcacttattgtactctggcaatttaaaagaaaatcagtaaaatattttgcttgtaaaatgcttaatatcgtgcctaggttatgtggtgactatttgaatcaaaaatgtattgaatcatcaaataaaagaatgtggctattttggggagaaaattaaaaaaaaaaaaaaaa

SEQ ID NO: 1022 - DNA, 1950 bp, Homo sapiens
  misc_feature (1946)..(1946): n equals a,t,g, or c
  misc_feature (1950)..(1950): n equals a,t,g, or c
cgcacgagcttcgcccgcccgctagcacgcagtcccttggtctcttcggtctcctgccgcccccgggaakcgcgctgcgctgccgaggcgagctaagcgcccgctcgccatggggagccccgcacatcggcccgcgctgctgctgctgctgccgcctctgctgctgctgctgctgctgcgcgtcccgcccagccgcagcttcccaggatcgggagactcaccactagaagacgatgaagtcgggtattcacaccctagatataaagataccccgtggtgctcccccatcaaggtgaagtatggggatgtgtactgcagggcccctcaaggaggatactacaaaacagccctgggaaccaggtgcgacattcgctgccagaagggctacgagctgcatggctcttccctactgatctgccagtcaaacaaacgatggtctgacaaggtcatctgcaaacaaaagcgatgtcctacccttgccatgccagcaaatggagggtttaagtgtgtagatggtgcctactttaactcccggtgtgagtattattgttcaccaggatacacgttgaaaggggagcggaccgtcacatgtatggacaacaaggcctggagcggccggccagcctcctgtgtggatatggaacctcctagaatcaagtgcccaagtgtgaaggaacgcattgcagaacccaacaaactgacagtccgggtgtcctgggagacacccgaaggaagagacacagcagatggaattcttactgatgtcattctaaaaggcctccccccaggctccaactttccagaaggagaccacaagatccagtacacagtctatgacagagctgagaataagggcacttgcaaatttcgagttaaagtaagagtcaaacgctgtggcaaactcaatgccccagagaatggttacatgaagtgctccagcgacggtgataattatggagccacctgtgagttctcctgcatcggcggctatgagctccagggtagccctgcccgagtatgtcaatccaacctggcttggtctggcacggagcccacctgtgcagccatgaacgtcaatgtgggtgtcagaacggcagctgcacttctggatcagttttatgagaaaaggagactcctcattgtgtccacacccacagcccgaaacctcctttaccggctccagctaggaatgctgcagcaagcacagtgtggccttgatcttcgacacatcaccgtggtggagctggtgggtgtgttcccgactctcattggcaggataggagcaaagattatgcctccagccctagcgctgcagctcaggctgttgctgcgaatcccactctactccttcagtatggtgctagtggataagcatggcatggacaaagagcgctatgtctccctggtgatgcctgtggccctgttcaacctgattgacacttttcccttgagaaaagaagagatggtcctacaagccgaaatgagccagacctgtaacacctgacatgatggttcctctcttggcaattcctcttcattgtctacatagtgacatgcacacgggaaagccttaaaaatatccttgatgtacagattttatttgtaattttaaaagtctattttattatgagctttctttgcacttaaaaattagcatgctgctttttgtacttggaagtgtttcaaaaaattatatgaccatatttactctttctaactttctttactccatcatggctggttgattttgtagagaaattagaacccataaccatacacaggctatcaacatgttattcaatgtgacacctaactcttttctattttgttttttaagtaagacttttattaataaaacaaaatgttttggarmaaaaaaaaaaaaaaaaaaaaaaaaaaaaaaaaaaaaaaaaaaaaaaaaaaaaaaaaaaaaaaaaaaaaaaaanaaan

SEQ ID NO: 1023 - DNA, 461 bp, Homo sapiens
  misc_feature (453)..(453): n equals a,t,g, or c
  misc_feature (456)..(456): n equals a,t,g, or c
gggccaccatcctccagacgcagaatggtagatccactgacagcttgcactgtgggcctggataagctgcagtcactcaacaccagccagtaaaagcagctttaaaaaacctcccacacctccccctgaacctgaaacataaaatgaatgcaattgttgttgttaacttgtttattgcagcttataatggttacaaataaagcaatagcatcacaaatttcacaaataaagcatttttttcactgcattctagttgtggtttgtccaaactcatcaatgtatcttatcatgtctggatcgatcctgcattaatgaatcggccmacgcgcggggagaggcggtttgcgtattggctgcgtaatagcgaagaggcccgcaccgatcgccttcccaacagttgcgcagcctgaatggcgaatgggacgcgccctgtagcggcgcattaagcgcggnggntgtgg

SEQ ID NO: 1024 - DNA, 2042 bp, Homo sapiens
ggccgctctagaactagtggatcccccgggctgcaggaattcggcacgaagaggctgggaagccatcacttaccttgcactgagaaagaagacaaaggccagtatgcacagctttcctccactgctgctgctgctgttctggggtgtggtgtctcacagcttcccagcgactctagaaacacaagagcaagatgtggacttagtccagaaatacctggaaaaatactacaacctgaagaatgatgggaggcaagttgaaaagcggagaaatagtggcccagtggttgaaaaattgaagcaaatgcaggaattctttgggctgaaagtgactgggaaaccagatgctgaaaccctgaaggtgatgaagcagcccagatgtggagtgcctgatgtggctcagtttgtcctcactgaggggaaccctcgctgggagcaaacacatctgacctacaggattgaaaattacacgccagatttgccaagagcagatgtggaccatgccattgagaaagccttccaactctggagtaatgtcacacctctgacattcaccaaggtctctgagggtcaagcagacatcatgatatcttttgtcaggggagatcatcgggacaactctccttttgatggacctggaggaaatcttgctcatgcttttcaaccaggcccaggtattggaggggatgctcattttgatgaagatgaaaggtggaccaacaatttcagagagtacaacttacatcgtgttgcggctcatgaactcggccattctcttggactctcccattctactgatatcggggctttgatgtaccctagctacaccttcagtggtgatgttcagctagctcaggatgacattgatggcatccaagccatatatggacgttcccaaaatcctgtccagcccatcggcccacaaaccccaaaagcgtgtgacagtaagctaacctttgatgctataactacgattcggggagaagtgatgttctttaaagacagattctacatgcgcacaaatcccttctacccggaagttgagctcaatttcatttctgttttctggccacaactgccaaatgggcttgaagctgcttacgaatttgccgacagagatgaagtccggtttttcaaagggaataagtactgggctgttcagggacagaatgtgctacacggataccccaaggacatctacagctcctttggcttccctagaactgtgaagcatatcgatgctgctctttctgaggaaaacactggaaaaacctacttctttgttgctaacaaatactggaggtatgatgaatataaacgatctatggatccaggttatcccaaaatgatagcacatgactttcctggaattggccacaaagttgatgcagttttcatgaaagatggatttttctatttctttcatggaacaagacaatacaaatttgatcctaaaacgaagagaattttgactctccagaaagctaatagctggttcaactgcaggaaaaattgaacattactaatttgaatggaaaacacatggtgtgagtccaaagraggtgttttcctgaagaactgtctattttctcagtcatttttaacctctagagtcactgatacacagaatataatcttatttatacctcagtttgcatatttttttactatttagaatgtagccctttttgtactgatataatttagttccacaaatggtgggtacaaaaagtcaagtttgtggcttatggattcatataggccagagttgcaaagatcttttcyagagtatgcaactctgacgttgatcccagagagcagcttcagtgacaaacatatcctttcaagacagaaagagacaggagacatgagtctttgccggaggaaaagcagctcaagaacacatgtgcagtcactggtgtcaccctggataggcaagggataactcttctaacacaaaataagtgttttatgtttggaataaagtcaaccttgtttctactgttttaaaaaaaaaaaaaaaaaaaaaaaaaaaaaaaaaaaaa

SEQ ID NO: 1025 - DNA, 1213 bp, Homo sapiens
  misc_feature (1201)..(1201): n equals a,t,g, or c
  misc_feature (1209)..(1209): n equals a,t,g, or c
gccggccgytccgggctttccagtctcaaccatgcataaaaagggttcgccgatcttggggagccacacagcccgggtcgcaggcacctccccgccagctctcccgcttctcgcacagcttcccgacgcgtctgctgagccccatggcccacgccacgctctccgccgcccccagcaatccccggctcctgcgggtggcgctgctgctcctgctcctggtggccgccagccggcgcgcagcaggagcgtccgtggycactgaactgcgctgccagtgcttgcagacmctgcagggaattcacctcaagaacatccaaagtgtgaatgtaaggtcccccggaccccactgcgcccaaaccgaagtcatagccacactcaagaatgggaagaaagcttgtctcaaccccgcatcccccatggttcagaaaatcatcgaaaagatactgaacaaggggagcaccaactgacaggagagaagtaagaagcttatcagcgtatcattgacacttcctgcagggtggtccctgcccttaccagagctgaaaatgaaaaagagaacagcagctttctagggacagctggaaaggacttaatgtgtttgactatttcttacgagggttctacttatttatgtatttatttttgaaagcttgtattttaatattttacatgctgttatttaaagatgtgagtgtgtttcatcaaacatagctcagtcctgattatttaattggaatatgatgggttttaaatgtgtcattaaactaatatttagtgggagaccataatgtgtcagccaccttgataaatgacagggtggggaactggagggtggggggattgaaatgcaagcaattagtggatcactgttagggtaagggaatgtatgtacacatctattttttatactttttttttaaaaaaagaatgtcagttgttatttattcaaattatctcacattatgtgttcaacatttttatgctgaagtttcccttagacattttatgtcttgcttgtagggcataatgccttgtttaatgtccattctgcagcgtttctctttcccttggaaaagagaatttatcattactgttacatttgtacaaatgacatgataataaaagttttatgaaaaaaaaaaaaaaaaaaaaaaaaaaaaaaaaaaaaaaaaaaaaaaaaaaaaaaaaaaaaaaaaaaaanaaaaaaanaaaa

SEQ ID NO: 1026 - DNA, 2410 bp, Homo sapiens
  misc_feature (2264)..(2264): n equals a,t,g, or c
  misc_feature (2325)..(2325): n equals a,t,g, or c
  misc_feature (2345)..(2345): n equals a,t,g, or c
  misc_feature (2365)..(2365): n equals a,t,g, or c
  misc_feature (2391)..(2391): n equals a,t,g, or c
  misc_feature (2402)..(2402): n equals a,t,g, or c
aagggaacaaaagctggagctccaccgcggtggcggccgctctagaactagtggatcccccgggctgcaggaattcggcacgagcccccgagcagcgcccgcgccctccgcgccttctccgccgggacctcgagcgaaagacgcccgcccgccgcccagccctcgcctccctgcccaccgggcmcaccgcgccgccaccccgaccccgctgcgcacggcctgtccgctgcacaccagcttgttggcgtcttcgtcgccgcgctcgccccgggctactcctgcgcgccacaatgagctcccgcatcgccagggcgctcgccttagtcgtcacccttctccacttgaccaggctggcgctctccacctgccccgctgcctgccactgccccctggaggcgcccaagtgcgcgccgggagtcgggctggtccgggacggctgcggctgctgtaaggtctgcgccaagcagctcaacgaggactgcagcaaaacgcagccctgcgaccacaccaaggggctggaatgcaacttcggcgccagctccaccgctctgaaggggatctgcagagctcagtcagagggcagaccctgtgaatataactccagaatctaccaaaacggggaaagtttccagcccaactgtaaacatcagtgcacatgtattgatggcgccgtgggctgcattcctctgtgtccccaagaactatctctccccaacttgggctgtcccaaccctcggctggtcaaagttaccgggcagtgctgcgaggagtgggtctgtgacgaggatagtatcaaggaccccatggaggaccaggacggcctccttggcaaggagctgggattcgatgcctccgaggtggagttgacgagaaacaatgaattgattgcagttggaaaaggcagctcactgaagcggctccctgtttttggaatggagcctcgcatcctatacaaccctttacaaggccagaaatgtattgttcaaacaacttcatggtcccagtgctcaaagacctgtggaactggtatctccacacgagttaccaatgacaaccctgagtgccgccttgtgaaagaaacccggatttgtgaggtgcggccttgtggacagccagtgtacagcagcctgaaaaagggcaagaaatgcagcaagaccaagaaatcccccgaaccagtcaggtttacttacgctggatgtttgagtgtgaagaaataccggcccaagtactgcggttcctgcgtggacggccgatgctgcacgccccagctgaccaggactgtgaagatgcggttccgctgcgaagatggggagacattttccaagaacgtcatgatgatccagtcctgcaaatgcaactacaactgcccgcatgccaatgaagcagcgtttcccttctacaggctgttcaatgacattcacaaatttagggactaaatgctacctgggtttccagggcacacctagacaaacaagggagaagagtgtcagaatcagaatcatggagaaaatgggcgggggtggtgtgggtgatgggactcattgtagaaaggaagccttgctcattcttgaggagcattaaggtatttcgaaactgccaagggtgctggtgcggatggacactaatgcagccacgattggagaatactttgcttcatagtattggagcacatgttactgcttcattttggagcttgtggagttgatgactttctgttttctgtttgtaaattatttgctaagcatattttctctaggcttttttccttttggggttctacagtcgtaaaagagataataagattagttggacagtttaaagcttttattcgtcctttgacaaaagtaaatgggagggcattccatcccttcctgaagggggacactccatgagtgtctgtgagaggcagctatctgcactctaaactgcaaacagaaatcaggtgttttaagactgaatgttttatttatcaaaatgtagcttttggggagggaggggaaatgtaatactggaataatttgtaaatgattttaattttatattcagtgaaaagattttatttatggaattaaccatttaataaagaaatatttacctaaaaaaaaaaaaaaaaaaactcgagggggggcccggtacccaattcgccctatagtgagycgtattacaattcactggccgycgttttacaacgtcgtgactgggaaaaccctggcgttacccaacttaatcgccttgcagcacatccccctttcgccagctggcgnaatagcgaaaaggccccggaccgatcgccctttccaacagtgcgcaacctgaatggcgaanggcaaattgaagcgtaatantttggtaaaatccggtaaantttggtaaacactcatttttaccatngcccaaacggnaaaatccc

SEQ ID NO: 1027 - DNA, 1272 bp, Homo sapiens
cccacgcgtccgcccacgcgtccggcccgagtttctgcgaagccgcgacctcggcgtccggacgcggggaacaccgggctgagggagtctgcagtcggctccgggaagccgcgcggcgacgggggaggccttcactaaaggggaaaaggaagagggggtcggccagtatccccgaaagagggctagggcgcatgaagaccagcgcagagctccacgagcaggaaaagcccccaagcagccccagggcgactggaccgggccgcttaggccacgcccggggaagagggcctgacgcgctgcggggcggggccgcggggccgggtcgcgcgagcagcggagcaccaagggaacggaaaatggcgcctcacggcccgggtagtcttacgaccctggtgccctgggctgccgccctgctcctcgctctgggcgtggaaagggctctggcgctacccgagatatgcacccaatgtccagggagcgtgcaaaatttgtcaaaagtggccttttattgtaaaacgacacgagagctaatgctgcatgcccgttgctgcctgaatcagaagggcaccatcttggggctggatctccagaactgttctctggaggaccctggtccaaactttcatcaggcacataccactgtcatcatagacctgcaagcaaaccccctcaaaggtgacttggccaacaccttccgtggctttactcagctccagactctgatactgccacaacatgtcaactgtcctggaggaattaatgcctggaatactatcacctcttatatagacaaccaaatctgtcaagggcaaaagaacctttgcaataacactggggacccagaaatgtgtcctgagaatggatcttgtgtacctgatggtccaggtcttttgcagtgtgtttgtgctgatggtttccatggatacaagtgtatgcgccagggctcgttctcactgcttatgttcttcgggattctgggagccaccactctatccgtctccattctgctttgggcgacccagcgccgaaaagccaagacttcatgaactacataggtcttaccattgacctaagatcaatctgaactatcttagcccagtcagggagctctgcttcctagaaaggcatctttcgccagtggattcgcctcaaggttgaggccgccattggaagatgaaaaattgcactcccttggtgtagacaaataccagttcccattggtgttgttgcctataataaacacttttttctttttaaaaaaaaaaaaaaaaa

SEQ ID NO: 1028 - DNA, 3174 bp, Homo sapiens
gcgcgcggcggcgcagtgaacagtctccttccacaaaaccatggcgtcgctcaaatgtagcaccgtcgtctgcgtgatctgcttggagaagcccaaataccgctgtccagcctgccgcgtgccctactgctcggtagtctgcttccggaagcacaaagaacagtgcaaccctgaaactcgtcctgttgagaaaaaaataagatcagctcttcctaccaaaaccgtaaagcctgtggaaaacaaagatgatgatgactctatagctgattttctcaatagtgatgaggaagaagacagagtttctttgcagaatttaaagaatttaggggaatctgcaacattaagaagcttattgctcaatccacacctcaggcagttgatggtcaacctcgatcagggagaagacaaagcaaagctcatgagagcttacatgcaagagcctttgtttgtggagtttgcagactgctgtttaggaattgtggagccatcccagaatgaggagtcttaagatggattattgtgctgcttgctcaagcgtgtgcttgactcctggaacctgcctgctccctctcccagaccagctagtttggggctggggagctcaggcaaaagaggtttccaggatgcagattaggtcatgcaggcctttaccggcattgatgtggctcatgtttcaggcagacttggggtccttaaggtggcaagtcctttatggagagaaaacttgacattcagatgattgtttttaaatgttttacttttggtacagttgatagacatcataaacgatatcaagcttacacttcatatggagttaaacttggtcagtgttaataaaatcaaaacgtgattctactgtacattgcattattcataatttaattgtttgaaattacattaaataaatcaactaattaaatactaaagttttgttcctttttaaaggaaataaccacaagatttttcccagcccaaattccagcgccaattttaggccaactttggctgttttcttccaaaagtgcttatgtggaattgggatccccagtgtagtgacagacagtcatgactgctgctgagtttgatctgtgaaggtagtgaaatgtggccctgatgtttcttaaccctgatttggtaactaccagccctgacaccatcagtgcttgatgtagcctggaaccccaggcccactgacgcactgggcacggggctctgggtcgaaggctggagccgtcactgttgttcatgtgcatttggagcactgtgggaatagtctggcagctgtgtgctgattaaatgtctttggcaaggcagggggcaggaaaaggccttgtggaaacaaaggcaccaaggatcaccccagcccagtgaaggcagaagaggtcacgtggatcagcctgtgtctttccagcagaatctgattaaagcctgtaatgctgtagggtgaaggttcagggcagatgtcagcataccgcagtggagactttctgcagtgaaactttatcgatccctgaggcagcgctcggatggacgtgacaccagcctggtcttgtgctgtctggacagtgtagctactggggctgcccctggggagctggaggcaagcccagaccactaatttcctctgaaagctgcctacacccatagccgtattggccaggaccagtcccaggggccagargcggattattgcctccaggagcctggtctgcagcggcgaggtgctcagggaacagggagcttgagagaagtgtttttcttccacaccatccagctctttagcagcaaggcaggccattctgattctccacttctgccatgcacgcttgatgactgtggcagctgcatgcagcctctggatgtgtttccgagttaaccaggaacgaatggctgcctggatgagcatgacggcccgccactgccgctcctgctctcggtgccggtgtcgcctccagccaccctggatgcagcgggcacactgctccagcacccgggcacgcccacattccagaagctccagcatagagtcagtcatgaacaccttggtcctgccacagtgcatgggggctggcatggcctcagccgagtcaccagttatggctgctgcctgagttaggaccggcagagtgtggagaatgtcctggatgagaggttcaagcgtggcttcctcgctgtgtggacaccattcagggagccctttggcaggatatgggctgtcggggccagaggatgtgcaaggatgaagccttcttagtaacttgtatcgttctacaaagtttcggtgagagacccggatggggaagccagcagcactgatatggatggtctccacgaggccacaggcctccagctggctcaggacctcctcttggagaaaggtctgcgcctggccctggctgttgggcttgatgcagcgaatgtagtggggcgtggtgctgtgtaggacctgcagaagctgctccagtgaggccttgaacttggacaccacggtcaacacaggggccctgctctggccagggggttcctcctgggtcttctctttggggttagtaggaaacagccccatgagcagggggtcctgggattgctgcaggagcctggtcagctcaggtgggatagggtccttgttcttctccaccaggcctgctgtgtggtaccgcacaggccccgcataatgcaccacaatgaagctgggctcccggctgagcttattgtggcccaggcaggggctgcctgccagggcagtctcaatgcgtgtctggagctgggctgcgctgctgggtcgattgaggcggcattcctcatttatgagggagcagatgctgatggggcttccctcaatgagatccaaacagggctggttgtcctggtagttgatgaatgaccactccaggccctcaactgcgtattcctcctgctgggcccttaggtagtgagccacaaaatgctgctgcagcttctcattggcgtagttgatgcacaactgttccagactgttgtcaggaaatgattcaaatccatacacatccagcaggcctatgaaagtggtccacgagtcggtgtctgcacagatgctgctgttgatcactgataccagccagtcaaacaaccgcgcatagatcagtttggccaggcagtctctacgggtgtcacactcggctcgggcgcagggcc

SEQ ID NO: 1029 - DNA, 1179 bp, Homo sapiens; identical to SEQ ID NO: 972
  misc_feature (1140)..(1140): n equals a,t,g, or c
  misc_feature (1163)..(1164): n equals a,t,g, or c
  misc_feature (1175)..(1175): n equals a,t,g, or c

SEQ ID NO: 1030 - DNA, 1446 bp, Homo sapiens
ccacgcgtccgagcaaccgcagcttctagtatccagactccagcgccgccccgggcgcggaccccaaccccgacccagagcttctccagcggcggcgcacgagcagggctccccgccttaacttcctccgcggggcccagccaccttcgggagtccgggttgcccacctgcaaactctccgccttctgcacctgccacccctgagccagcgcgggcgcccgagcgagtcatggccaacgcggggctgcagctgttgggcttcattctcgccttcctgggatggatcggcgccatcgtcagcactgccctgccccagtggaggatttactcctatgccggcgacaacatcgtgacgcccaggccatgtacgaggggctgtggatgtcctgcgtgtcgcagagcaccgggcagatccagtgcaaagtctttgactccttgctgaatctgagcagcacattgcaagcaacccgtgccttgatggtggttggcatcctcctgggagtgatagcaatctttgtggccaccgttggcatgaagtgtatgaagtgcttggaagacgatgaggtgcagaagatgaggatggctgtcattgggggcgcgatatttcttcttgcaggtctggctattttagttgccacagcatggtatggcaatagaatcgttcaagaattctatgaccctatgaccccagtcaatgccaggtacgaatttggtcaggctctcttcactggctgggctgctgcttctctctgccttctgggaggtgccctactttgctgttcctgtccccgaaaaacaacctcttacccaacaccaaggccctatccaaaacctgcaccttccagcgggaaagactacgtgtgacacagaggcaaaaggagaaaatcatgttgaaacaaaccgaaaatggacattgagatactatcattaacattaggaccttagaattttgggtattgtaatctgagtatggtatacaaacaacaaacaaacaaaaaacccatgtgttaaaatactcagtgctaaacatggcttaatcttattttatcttctttcctcaatataggagggaagatttttccatttgtattactgcttcccattgagtaatcatactcaaatgggggaaggggtgctccttaaatatatatagatatgtatatatacatgtttttctattaaaaatagacagtaaaatactattctcattatgttgatactagcatacttaaaatatctctaaaatagttaaatgtatttaattccatattgatgaagatgtttattggtatattttctttttcgtccttatatacatatgtaacagtcaaatatcatttactcttcttcattagctttgggtgcctttgccacaagacctagcctaatttaccaaggatgaattctttcaattcttcatgcgtgcccagcaaaaaaaaaaaaaaa

SEQ ID NO: 1031 - DNA, 884 bp, Homo sapiens
  misc_feature (40)..(40): n equals a,t,g, or c
  misc_feature (61)..(61): n equals a,t,g, or c
  misc_feature (136)..(136): n equals a,t,g, or c
  misc_feature (156)..(156): n equals a,t,g, or c
  misc_feature (838)..(838): n equals a,t,g, or c
  misc_feature (851)..(851): n equals a,t,g, or c
  misc_feature (880)..(880): n equals a,t,g, or c
gtaaaaagccaaggtttctcctccctcttttccccctctngacccttcctccaaaattaantctggattgcaaccgtaaaaccttttgcgggtttaaataattggtgcaaacttccaaaatttccctcgctctccnacccagccccctcccccacnaaattcaggggaactcccgttaccgcagtgccaccagcattactcattcatccccattcaggctttcctcagcatttattaaggactctctgctccagcctctcactctcactctcctccgctcaaactcagctcacttgagagtctcctcccgccagctgtggaaagaactttgcgtctctccagcaatgcatctccttgcgattctgttttgtgctctctggtctgcagtgttggccgagaactcggatgattatgatctcatgtatgtgaatttggacaacgaaatagacaatggactccatcccactgaggaccccacgccgtgcgmctgcggtcaggagcactcggaatgggacaagctcttcatcatgctggagaactcgcagatgagagagcgcatgctgctgcaagccacggacgacgtcctgcggggcgagctgcagaggctgcgggaggagctgggccggctcgcggaaagcctggcgaggccgtgcgcgccgggggctcccgcagaggccaggctgaccagtgctctggacgagctgctgcaggcgacccgcgacgcgggccgcaggctggcgcgtatggagggcgcggaggcgcagcgcccagaggaggcggggcgcgccctggccgcggtgctagaagarcttgcggcaagacgccaagccgaacttgnacgccggtgcaanggcttgggcttgccccggaactggcttgnccgg

SEQ ID NO: 1032 - DNA, 1020 bp, Homo sapiens
tcgacccacgcgtccggtccaacatggcggcgcccagcggagggtggaacggcgtcggcgcgagcttgtgggccgcgctgctcctaggggccgtggcgctgaggccggcggaggcggtgtccgagcccacgacggtggcgtttgacgtgcggcccggcggcgtcgtgcattccttctcccataacgtgggcccgggggacaaatatacgtgtatgttcacttacgcctctcaaggagggaccaatgagcaatggcagatgagtctggggaccagcgaagaccaccagcacttcacctgcaccatctggaggccccaggggaagtcctatctgtacttcacacagttcaaggcagaggtgcggggcgctgagattgagtacgccatggcctactctaaagccgcatttgaaagggaaagtgatgtccctctgaaaactgaggaatttgaagtgaccaaaacagcagtggctcacaggcccggggcattcaaagctgagctgtccaagctggtgattgtggccaaggcatcgcgcactgagctgtgaccagcagccctgttgcgggtggcaccttctcatctccggtgaagctgaaggggcctgtgtccctgaaagggccagcacatcactggttttctaggagggactcttaagttttctacctgggctgacgttgccttgtccggaggggcttgcagggtggctgaagccctggggcagagaacacagggtccagggccctcctggctcccaacagcttctcagttcccacttcctgctgagctcttctggactcaggatcgcagatccggggcacaaagagggtggggaacatgggggctatgctggggaaagcagccatgctccccccgacctccagccgagcatccttcatgagcctgcagaactgctttcctatgtttacccaggggacctcctttcagatgaactgggaagagatgaaatgttttttcatatttaaataaataagagcattaaaaagcaaaaaaaaaaaaaaaaa

SEQ ID NO: 1033 - DNA, 1965 bp, Homo sapiens
ccacgcgtccggcccttgccaactctgcctcttcccccgctgactggggtatcagtttatggtgccctgcaggaagaccctcttgttcctgtgggtgggaagcctctgcagagatgtgggcagctggtcaggatggccattcgggctcagcacagcaacgcagcccagactcagactggggaagcaaacaggggctggacaggccaggagagcctgtcggacagtgatcctgagatgtgggagttgctgcagagggagaaggacaggcagtgtcgtggcctggagctcattgcctcagagaacttctgcagccgagctgcgctggaggccctggggtcctgtctgaacaacaagtactcggagggttatcctggcaagagatactatgggggagcagaggtggtggatgaaattgagctgctgtgccagcgccgggccttggaagcctttgacctggatcctgcacagtggggagtcaatgtccagccctactccgggtccccagccaacctggccgtctacacagcccttctgcaacctcacgaccggatcatggggctggacctgcccgatgggggccatctcacccacggctacatgtctgacgtcaagcggatatcagccacgtccatcttcttcgagtctatgccctataagctcaaccccaaaactggcctcattgactacaaccagctggcactgactgctcgacttttccggccacggctcatcatagctggcaccagcgcctatgctcgcctcattgactacgcccgcatgagagaggtgtgtgatgaagtcaaagcacacctgctggcagacatggcccacatcagtggcctggtggctgccaaggtgattccctcgcctttcaagcacgcggacatcgtcaccaccactactcacaagactcttcgaggggccaggtcagggctcatcttctaccggaaaggggtgaaggctgtggaccccaagactggccgggagatcccttacacatttgaggaccgaatcaactttgccgtgttcccatccctgcaggggggcccccacaatcatgccattgctgcagtagctgtggccctaaagcaggcctgcacccccatgttccgggagtactccctgcaggttctgaagaatgctcgggccatggcagatgccctgctagagcgaggctactcactggtatcaggtggtactgacaaccacctggtgctggtggacctgcggcccaagggcctggatggagctcgggctgagcgggtgctagagcttgtatccatcactgccaacaagaacacctgtcctggagaccgaagtgccatcacaccgggcggcctgcggcttggggccccagccttaacttctcgacagttccgtgaggatgacttccggagagttgtggactttatagatgaaggggtcaacattggcttagaggtgaagagcaagactgccaagctccaggatttcaaatccttcctgcttaaggactcagaaacaagtcagcgtctggccaacctcaggcaacgggtggagcagtttgccagggccttccccatgcctggttttgatgagcattgaaggcacctgggaaatgaggcccacagactcaaagttactctccttccccctacctgggccagtgaaatagaaagcctttctattttttggtgcgggagggaagacctctcacttagggcaagagccaggtatagtctcccttcccagaatttgtaactgagaagatcttttctttttcctttttttggtaacaagacttagaaggagggcccaggcactttctgtttgaacccctgtcatgatcacagtgtcagagacgcgtcctctttcttggggaagttgaggagtgcccttcagagccagtagcaggcaggggtgggtaggcaccctccttcctgtttttatctaataaaatgctaacctgcaaaaaaaaaaaaaaaa

SEQ ID NO: 1034 - DNA, 2809 bp, Homo sapiens
tccatccggaggtctccctaccaccaggctctgtggggcagggaagcccagtggggtgcagggagccaggaagctggggtggggtcagggcagggtccacagggagaccgggcgaggctggcagccttcccagtccgcgcagcgtctctgcagggggagcaagagctgcccttccacccctcccaggggacgggtaggggcactctgggcttttcccaccccctcacgcagggacacaggcctggygggtctatgactgaaattggccagaccgcattctggtggttttattcggaagggaagtttaccctgttcagcagaagctgagatgggaacaggaaacccacagggcccctttattcggcaaaaatgtcagtcagcgccmcggggagcagccgagggtccctgagtgtgtgagtgaggtggggaaacacagatggactttggggggctcccccttctacaggaaacccggagtggactggaacggtgcagggggagaactcgcccctcccatcgggcgcctccttcataccggcccttcccctcggctttgcctggacagctcctgcctcccgcagggcccacctgtgtcccccagcgccgctccacccagcaggcctgagcccctctctgctgccagacaccccctgctgcccactctcctgctgctcgggttctgaggcacagcttgtcacaccgaggcggattctctttctctttctctttctcttctggcccacagccgcagcaatggcgctgagttcctctgctggagttcatcctgctagctgggttcccgagctgccggtctgagcctgaggcatggagcctcctggagactgggggcctcctccctggagatccacccccaaaaccgacgtcttgaggctggtgctgtatctcaccttcctgggagccccctgctacgccccagctctgccgtcctgcaaggaggacgagtacccagtgggctccgagtgctgccccaagtgcagtccaggttatcgtgtgaaggaggcctgcggggagctgacgggcacagtgtgtgaaccctgccctccaggcacctacattgcccacctcaatggcctaagcaagtgtctgcagtgccaaatgtgtgacccagccatgggcctgcgcgcgagccggaactgctccaggacagagaacgccgtgtgtggctgcagcccaggccacttctgcatcgtccaggacggggaccactgcgccgcgtgccgcgcttacgccacctccagcccgggccagagggtgcagaagggaggcaccgagagtcaggacaccctgtgtcagaactgccccccggggaccttctctcccaatgggaccctggaggaatgtcagcaccagaccaattggcctaatcatatgtgtgaaaagaagaaagccaaggggtgagcacacggcggccccatcagggytcatgtccccagccgtcacctcttggagctctgtcaccccaagcctgggaggtggccccagagcttttccaggatccgcggctcctcccagggcagycactgcaggctggggcaggtgatgtagtcaaggtgatcgtctccgtccagcggaaaagacaggaggcagaaggtgaggccacagtcattgaggccctgcaggcccctccggacgtcaccacggtggccgtggaggagacaataccctcattcacggggaggagcccaaaccactgacccacagactctgcaccccgacgccagagatacctggagcgacggctgctgaaagaggctgtccacctggcgraaccaccggagcccggaggcttgggggctccgccctgggctggcttccgtctcctccagtggagggagaggtggggcccctgctggggtagagctggggacgccacgtgccattcccatgggccagtgagggcctggggcctctgttctgctgtggcctgagctccccagagtcctgaggaggagcgccagttgcccctcgctcacagaccacacacccagccctcctgggccagcccagagggcccttcagaccccagctgtctgcgcgtctgactcttgtggcctcagcaggacaggccccgggcactgcctcacagccaaggctggactgggttggctgcagtgtggtgtttagtggataccacatcggaagtgattttctaaattggatttgaattcggaaaaaaaaaaaaaaaaaactcgagggggggcccggtacccaattcgccctatagtgagtcgtattacaattcactggccgtcgttttacaacgtcgtgactgggaaaaccctggcgttacccaacttaatcgccttgcagcacatccccctttcgccagctggcgtaatagcgaagaggcccgcaccgatcgcccttcccaacagttgcgcagcctgaatggcgaatggcaaattgtaagcgttaatattttgttaaaattcgcgttaaatttttgttaaatcagctcattttttaaccaataggccgaaatcggcaaaatcccttataaatcaaaagaatagaccgagatagggttgagtgttgttccagtttggaacaagagtccactattaaagaacgtggactccaacgtcaaagggcgaaaaaccgtctatcagggcgatggcccactacgtgaaccatcaccctaatcaagttttttggggtcgaggtgccgtaaagcactaaatcggaaccctaaagggagcccccgatttagagcttgacggggaaagccggcgaacgtggcgagaaaggaagggaagaaagcgaaaggagcgggcgctagggccgctgg

SEQ ID NO: 1035 - DNA, 860 bp, Homo sapiens
  misc_feature (166)..(166): n equals a,t,g, or c
cccggrctggtctcaaactcctragctcaagtgatccacccaacttaccctcccaaagtgctatgattacaccttttttcctactctttttttatggcttacgattattttattttattgtgtgtgtatgtgtatgtatgtattttgagaacggakcwcaytctgncactccagcctgggtgacagagtgcaaggactccgtcttccaaaacaaaaaaacaatatacaatagggcttaatatgtttttaaaacttaatatgaatggtatcatactgtacattggttttgtagtttgcttttgtcactcaatattatgttgatgagatttattgggctgctatttaaagcagttttcttagcacagaggccctgtttgcttgccaaactgcatgtctgctgggttgcgtctgtctttaaagggtgacttcctctaattaatccactggggtgaggggtaagttgaaccttttttctgttcacaagtgtggatacaagctaaaggtggccctgtgtggttccctcactacaaccatggtatagtagtccattgtagaaatataccacagttctattgatggacctgttgggttattctatatgttttgctgttaaaagtcatacttcactgaacattcttggacttgcatctttgtgcacacctggaatattacataaaagtggagttgccagggtgcatataccaaattgcttaacaggctgggtgtagtggctcacacctgtaatcccagcattttgggaggctgaggcaggcagatcatttgaggtcaggagttggagaccagcctggccaatatggtgaaaccccatctctacttaaaaaaaaaaaaaaaaaactcga

SEQ ID NO: 1036 - DNA, 1782 bp, Homo sapiens
gaattccccgggcccggggaattccccggggtggacctgggacgggtctgggcggctctcggtggttggcacgggttcgcacacccattcaagcggcaggacgcacttgtcttagcagttctcgctgaccgcgctagctgcggcttctacgctccggcactctgagttcatcagcaaacgccctggcgtctgtcctcaccatgcctagcctttgggaccgcttctcgtcgtcgtccacctcctcttcgccctcgtccttgccccgaactcccaccccagatcggccgccgcgctcagcctgggggtcggcgacccgggaggaggggtttgaccgctccacgagcctggagagctcggactgcgagtccctggacagcagcaacagtggcttcgggccggaggaagacacggcttacctggatggggtgtcgttgcccgacttcgagctgctcagtgaccctgaggatgaacacttgtgtgccaacctgatgcagctgctgcaggagagcctggcccaggcgcggctgggctctcgacgccctgcgcgcctgctgatgcctagccagttggtaagccaggtgggcaaagaactactgcgcctggcctacagcgagccgtgcggcctgcggggggcgctgctggacgtctgcgtggagcagggcaagagctgccacagcgtgggccagctggcactcgaccccagcctggtgcccaccttccagctgaccctcgtgctgcgcctggactcacgactctggcccaagatccaggggctgtttagctccgccaactctcccttcctccctggcttcagccagtccctgacgctgagcactggcttccgagtcatcaagaagaagctgtacagctcggaacagctgctcattgaggagtgttgaacttcaacctgagggggccgacagtgccctccaagacagagacgactgaacttttggggtggagactagaggcaggagctgagggactgattcctgtggttggaaaactgaggcagccacctaaggtggaggtgggggaatagtgtttcccaggaagctcattgagttgtgtgcgggtggctgtgcattggggacacatacccctcagtactgtagcatgaaacaaaggcttaggggccaacaaggcttccagctggatgtgtgtgtagcatgtaccttattatttttgttactgacagttaacagtggtgtgacatccagagagcagctgggctgctcccgccccagccyggcccagggtgaaggaagaggcacgtgctcctcagagcagccggagggaggggggaggtcggaggtcgtggaggtggtttgtgtatcttactggtctgaagggaccaagtgtgtttgttgtttgttttgtatcttgtttttctgatcggagcatcactactgacctgttgtaggcagctatcttacagacgcatgaatgtaagagtaggaaggggtgggtgtcagggatcacttgggatctttgacacttgaaaaattacacctggcagctgcgtttaagccttcccccatcgtgtactgcagagttgagctggcaggggaggggctgagagggtgggggctggaacccctccccgggaggagtgccatctgggtcttccatctagaactgtttacatgaagataagatactcactgttcatgaatacacttgatgttcaagtattaagacctatgcaatattttttacttttctaataaacatgtttgttaaaacaaaaaaaaaaaaaaaaaaaaaaaaaaaaaaactcga

SEQ ID NO: 1037 - DNA, 1109 bp, Homo sapiens
ggagagtgtcgtacggccctcagtgtttgtggtggatggacagaccgacatcccattcacgaggctgggacgaagccaccggagacagtcgtgcagtgtggcccgggtgggtctgggtctcttgctgttgctgatgggggccgggctggccgtccaaggctggttcctcctgcagctgcactggcgtctaggagagatggtcacccgcctgcctgacggacctgcaggctcctgggagcagctgatacaagagcgaaggtctcacgaggtcaacccagcagcgcatctcacaggggccaactccagcttgaccggcagcggggggccgctgttatgggagactcagctgggcctggccttcctgaggggcctcagctaccacgatggggcccttgtggtcaccaaagctggctactactacatctactccaaggtgcagctgggcggtgtgggctgcccgctgggcctggccagcaccatcacccacggcctctacaagcgcacaccccgctaccccgaggagctggagctgttggtcagccagcagtcaccctgcggacgggccaccagcagctcccgggtctggtgggacagcagcttcctgggtggtgtggtacacctggaggctggggaggaggtggtcgtccgtgtgctggatgaacgcctggttcgactgcgtgatggtacccggtcttacttcggggctttcatggtgtgaaggaaggagcgtggtgcattggacatgggtctgacacgtggagaactcagagggtgcctcaggggaaagaaaactcacgaagcagaggctgggcgtggtggctctcgcctgtaatcccagcactttgggaggccaaggcaggcggatcacctgaggtcaggagttcgagaccagcctggctaacatggcaaaaccccatctctactaaaaatacaaaaattagccggacgtggtggtgcctgcctgtaatccagctactcaggaggctgaggcaggataattttgcttaaacccgggaggcggaggttgcagtgagccgagatcacaccactgcactccaacctgggaaacgcagtgagactgtgcctcaaaaaaaagaaaaaaaaaaaaa

SEQ ID NO: 1038 - DNA, 1619 bp, Homo sapiens
  misc_feature (881)..(881): n equals a,t,g, or c
  misc_feature (1617)..(1619): n equals a,t,g, or c
tttttttttttttttttggaggcaaacactttattatcctgaagttcagttacaatgtgacagtggaggggacactggtgagtggggggtgaagaggtggagggtgacagtggagcttcctttcacacacaggcctgacatgattcctcctgtctgctccctcccacatccccagtccccgtccagcaaggcaaatgtccaggcacctgcctggccctaaaaagagtcacagtcctgaccctcgtgggggcagggcaggtgtcccgaggccacccagaaaaacaggagacacgtcggtgatgttcgggagtcaaaccatgtcccaaaagtcttaagaagaaaaacgagattccccagcaaattcgtgggaccccagggccatgcctcccagctctggccacctctgcttgtccaggggcctcacagccaaggggatgcaggggccgctgtgcagtcggctgaggccagagtgaggggtgcaaggacccagatggggaacactgctgtttaaatattaaacagggatttcttgtctcccacgtgggagacctgatactctcaagggtcccaggtggggaccctcaggaccaggggctcacagcggctcatcccagtgcccattgcagagccagggctggggagcagtcatagtaataaatacttggtatttacctatctacctcccagtccaggggatgggaggacaggagctttttctcactgctacaggcaggagaatgaaactcagaaatgcagggaaggacacagaggcctggggctccgttctgctcttccctgtctttaaatatgaggcttaaatagacataaatwytaaatagagataaatacatgggatggggagggcttggctcagggctggncaaggtggcgtagaacgcggtacgacacctccaggaagctctgcagatgggaggcaaccaggacccctcctgcccggcgctggaaagcagaggcgaaggccggcatggcaccctgggtgggctgcagggcaggggccattcccagttcttccatctgctgccagatggtggtggcaaagtcggcgacgtccagctgcagtgtgtccaaggtgggacccaactcgggggagatcccttccagggcctgcaggagcccctggtagaggaaaaggccgctatggagttggctcaagcagcctgccagctgcagggcctggctggggcagctgctcaggggagcccaggggatgcccagagagtgtccgagcagcaccagctcctcggggtggcacagcttgtaggtggcacactcactcaccagcttctcctggcagcgctgcgccatcgccctggatcttcctcacttgctctaagcacttgagcaggaagctctggggcagggagctggcagggcccaggggggtggcttcctgcactgtccagagtgcactgtgccacagcagcagctgcagggccatcagcttcatggggctctgggtggcaggtccagccatgggtcctcgtgccgaattcctgcagcccgggggatccactagttctagagcggccgccaccgcggtggagctccagcttttgttccctttagtagggttaatttcgagcgggcgtataaatnnn

SEQ ID NO: 1039 - DNA, 962 bp, Homo sapiens
  misc_feature (710)..(710): n equals a,t,g, or c
  misc_feature (860)..(860): n equals a,t,g, or c
  misc_feature (912)..(912): n equals a,t,g, or c
ccccgggaggatgtgcgtgggggctcggcggctgggccgcgggccgtgtgcggctctgctcctcctgggcctggggctgagcaccgtgacggggctccactgtgtcggggacacctaccccagcaacgaccggtgctgccacgagtgcaggccaggcaacgggatggtgagccgctgcagccgctcccagaacacggtgtgccgtccgtgcgggccgggcttctacaacgacgtggtcagctccaagccgtgcaagccctgcacgtggtgtaacctcagaagtgggagtgagcggaagcagctgtgcacggcacacaggacacagtctgccgctgcgggcgggcacccagcccctggacagctacaagcctggagttgactgtgccccctggccttcaagggcacttctcccaggcgacaaccaggcctgcaagccctggaccaactgcaccttggtgggaagcacaccctgcagccggccagcaatagctttcggacgcaatctgtgaaggacagggaaccccccagccacgcagccccaggaracccagggccccccggccaggcccatcactgtccagcccactgaagcctggcccagaacctcacagggaccctccacccggcccgtggaggtccccgggggccgtgcggttgccgccatcctgggcctgggcctggtgctggggctgctgggccccctggccatnctgctggccctgtacctgctccggagggaccagagsctgcccccgatgcccacaagccccctgggggargcagtttccggamccccattcaagargarcaggccgacgcccacttcamccttggcaagatcttracctgggsccaccaangtggacgctgggccccggcaggcttggagccccggaagggtcttgctgggcnaacaaggcaagttgcaagccggctggcccggcacgcttctggggcaactt

SEQ ID NO: 1040 - DNA, 1370 bp, Homo sapiens; identical to SEQ ID NO: 153

SEQ ID NO: 1041 - DNA, 633 bp, Homo sapiens
  misc_feature (23)..(23): n equals a,t,g, or c
  misc_feature (29)..(29): n equals a,t,g, or c
ttttttttttttttttttttttntttttnttttttttttttttttttttttttttttttttttttttttttttttgttataaatcctctttaatagtcttagaatcttgagtgtgttttacagaatggtgcacacaaagccccctcccctctccccctacaaggcacagcctcacccaccccactccccaggggccagaggaccgcttgccaagaaaggccagcccaccttctcccaggagaagccatcctcctcctccccgcccctggccagctccggaccctggagaatacaggaccagctctgtgccatgcccccaaggactcacctgtccctaagcagctcagggccaagccagatccccttacccaggcagaccccctccagcccagctcccctaggccgtgtccctagggcatggcctaggctaatctgagctgtctagatggacctgcatcaggcctggggaaggggtgccaccccttaatatcaggtaaaacccaccctctcccctctcccactgccttcaatataattgtgaaaaataaagatataaatgtcatagtgggaaataagttgacccacccagtaggcagtctcctgacagcccagagtgccttatctaaccccggg

SEQ ID NO: 1042 - DNA, 773 bp, Homo sapiens
  misc_feature (685)..(685): n equals a,t,g, or c
  misc_feature (735)..(735): n equals a,t,g, or c
  misc_feature (741)..(741): n equals a,t,g, or c
  misc_feature (761)..(761): n equals a,t,g, or c
ggcacgagccatgcccgtcctctaaagacggtttgaaacccactatatttgtaagcaatgaaaattttatgaacatagtaggtgtggagtgcttttcacagagtctcttgggtcttacctacactagggagaaataactttcaaatgtcttcaaagtgagattaaatctcacatgcacctagattggtttgttttacttgggtgtagtctgctcagtttttcatcttgcgttatggttaattgtgtgaagttatgcttcccactaaattatgaaccttgaaagcagtaacatctctttcttttcgtgacaccatctcacactctaccctccctcccttccttcctttcacctccatatctctgcacaggcatagtgcccgaaaatggtaagcattggtggatggtgatgtgaatctgtcatctaattgcggaccttgaagaggaggcacagctcaaaagaaataactgtgtggatgaatttggctattttctttaggaamcaaagagccaggccgggcacggtggctcacgcctgtggtcccagcactttgggargccgagatgggcagatcacgargtcgggagatcgagaccatcctggctaacacggtgaaatcccgtctctactaaaaatmccaaaaaaattggccgggcatggttgcartyacctgtgggtcccsggtantcaggargctgagscaggaggrtarcgttgaacctggaargcggacyttntaaktngggccgaaatcstkcaatgnattccaaccttg

SEQ ID NO: 1043 - DNA, 1574 bp, Homo sapiens
ggcacgagggcatggggcggctggttctgctgtggggagctgccgtctttctgctgggaggctggatggctttggggcaaggaggagcagcagaaggagtacagattcagatcatctacttcaatttagaaaccgtgcaggtgacatggaatgccagcaaatactccaggaccaacctgactttccactacagattcaacggtgatgaggcctatgaccagtgcaccaactaccttctccaggaaggtcacacttcggggtgcctcctagacgcagagcagcgagacgacattctctatttctccatcaggaatgggacgcaccccgttttcaccgcaagtcgctggatggtttattacctgaaacccagttccccgaagcacgtgagattttcgtggcatcaggatgcagtgacggtgacgtgttctgacctgtcctacggggatctcctctatgaggttcagtaccggagccccttcgacaccgagtggcagtccaaacaggaaaatacctgcaacgtcaccatagaaggcttggatgccgagaagtgttactctttctgggtcagggtgaaggctatggaggatgtatatgggccagacacatacccaagcgactggtcagaggtgacatgctggcagagaggcgagattcgggatgcctgtgcagagacaccaacgcctcccaaaccaaagctgtccaaatttattttaatttccagcctggccatccttctgatggtgtctctcctccttctgtctttatggaaattatggagaatgaagaagtttctcattcccagcgtgccagacccgaaatccatcttccccgggctctttgagatacaccaagggaacttccaggagtggatcacagacacccagaacgtggcccacctccacaagatggcaggtgcagagcaagaaagtggccccgaggagcccctggtagtccagttggccaagactgaagccgagtctcccaggatgctggacccacagaccgaggagaaagaggcctctgggggatccctccagcttccccaccagcccctccaaggcggtgatgtggtcacaatcgggggcttcacctttgtgatgastgaccgctcctacgtggcgttgtgatggacacaccactgtcaaagtcaacgtcaggatccacgttgacatttaaagacagaggggactgtcccggggactccacaccaccatggatgggaagtctccacgccaatgatggtaggactaggagactctgaagacccagcctcaccgcctaatgcggccactgccctgctaactttcccccacatgagtctctgtgttcaaaggcttgatggcagatgggagccaattgctccaggagatttactcccagttccttttcgtgcctgaacgttgtcacataaaccccaaggcagcacgtccaaaatgctgtaaaaccatcttcccactctgtgagtccccagttccgtccatgtaccattcccatagcattggattctcggaggattttttgtctgttttgagactccaaaccacctctacccctacaaaaaaaaaaaaaaaaaa

SEQ ID NO: 1044 - DNA, 2109 bp, Homo sapiens
  misc_feature (2050)..(2050): n equals a,t,g, or c
  misc_feature (2098)..(2100): n equals a,t,g, or c
gctgagctgctgctcagtcaggtttcccaaaaggtaagaagaaatgaggcagacctgaatctgctgaaacaccatttgctaacattcttccttcagacaggttaaagaaatagattacttgagtgtctgtgtcatgggttcccaacaggaagtggttctgctgcccccatagtccctgacatttggcaatgtctggagacattttaggttcatgtttttggtgctgctggtatccagtgggtaggagccagggtgctgccaaatatcctacaatgcacaggcagccccctgcaacaaagaagtatccatcctaaaccctgctctatgtgtatcccatggaactctttcttcataccttgtttacataaatgtcaaaagtttgttcaggtttttgagcgtgattcctccttctttgggaatcactgcacttcatacatcattttgtcaagaacggtgagttttccctagggctttatgccactgggccttggtggtatacctgtccaccttctccaggtgttctgtgggtggtcagtttgatggactgcatttgtgctgtcccctttgcaaagcacagttctgaagtgtgtttctgtctatttttgttgtccttgggtaccatcctccccacctgccattatgtcagggactgtgaacccatgggactggtttattttgccttaacattgaaatagtgtgctcctagctgattccctgtttaatgacgtctatgtgctagttttatgtcgtcggatttttcactttgctcatgttttttggttagctctcaaacagtgagtcggtccagcagcagatggagttcttgaacaggcagctgttggttcttggggaggtcaacgagctctatttggaacaactgcagaacaagcactcagataccacaaaggaagtagaaatgatgaaagccgcctatcggaaagagctagaaaaaaacagaagccatgttctccagcagactcagaggcttgatacctcccaaaaacggattttggaactggaatctcacctggccaagaaagaccaccttcttttggaacagaagaaatatctagaggatgtcaaactccaggcaagaggacagctgcaggccgcagagagcaggtatgaggctcagaaaaggataacccaggtgtttgaattggagatcttagatttatatggcaggttggagaaagatggcctcctgaaaaaacttgaagaagaaaaagcagaagcagctgaagcagcagaagaaaggcttgactgktgtaatgacgggtgctcagattccatggtagggcacaatgaagaggcatctggccacaacggtgagaccaagacccccaggcccagcagcgcccggggcagtagtggaagcagaggtggtggaggcagcagcagcagcagcagcgagctttctaccccagagaaacccccacaccagagggcaggcccattcagcagtcggtgggagacgactatgggagaagcgtctgccagcatccccaccactgtgggctcacttcccagttcaaaaagcttcctgggtatgaaggctcgagggggggcccggtacccaattcgcctatagtgagtcgtattacaattcactggccgtcgttttacaacgtygtgactgggaaaaccctggcgttacccaacttaatcgccttgcagcacatccccctttcgccagctggcgtaatagcgaagaggcccgcaccgatcgcccttcccaacagttgcgcagcctgaatggcgaatggcaaattgtaagcgttaatattttgttaaaattcgcgttaaatttttgttaaatcagctcattttttaaccaataggccgaaatcggcaaaatcccttataaatcaaaagaatagaccgagatagggttgagtgttgttccagtttggaacaagagtccactattaaagaacgtggactccaacgtcaaagggcgaaaaaccgtctatcagggcgatggcccactacgtgaaccatcaccctaatcaagttttttggggtcgaggtgcccgtaaagcactaaatnggaaccctaaagggagccccgaatttagagctttgacggggaaagccnnnaaccttggc

SEQ ID NO: 1045 - DNA, 2612 bp, Homo sapiens
cccggggtaaaatgtacgtaacaaaacttaataatttttcagtgtacagttcagtggcattaagtacattcacattgttaaccatcaccactatctatctgcagaactttttcatcatcccaaactgaatgtgtactcataaaagagtggcagctcttcaatttttcttttcttttcttctgcttcagataaccaccattctactttgtctgtctagaaacttgactattgcaggtacctcatatgagtggaatcatgtagtatttgtccttttttgtctgggttatttcagtaagcataaaatcttcaagattcatttatgaagcatgtggatagaatccccttatttttaaggctgaatagtattccgttgtatgtatatactacattttgtttatgtattaatctgtaaatggtatttgggttgttttcaccttttggctattgtgaataatgctgctatgaacattggtctgcatatctctcatcaagtccctgctttaagttcctttgggtgtctacccagaagtggaattgctggatcatatggtaatttgaagtacaatttttggaggaatttccatactgctttccatggtggctgcactattttacattcccaaaggcaatgcagaggagtgccattttctccacatcctcatcaacacttgttatttcctgttttttttaaagctatttttatgggtgtgaggtggtatcttactgtgtttttggtttgcatttccctaatgattagtgatgtgttgagcatgttatgtgtttatcggccatttttatatcatttttggagaaacgacttttgaagtcttttgcccatttttttaattggttgataaggtgtttagagtttgaaatcagcattctctttactagtattatgatttaacacaagccatttaacctcttgtgcctcggattctctactggcaaatgggatatcatttttctgtagctgcttaatacaaatgctagaaataggtttgatgtggcactgcctaatctagcatacatatggaattgttgctgttagagcagccagctttaatctataagcacgtcttcattttctgtttagaaataatcttttcattaatttcagtacttaatttgacgaacttttttttccacgatggaacattggtcaagtttcatttataaaattctgcctcattcataactttttgttttacatattgtagtgtgacctcagggagacaacagtattcgctgcaatcctttatagtaactaataatacttcgaattgttattgtggtgacatgtttttgttttaactcacttttctgagtgttaaataccaaaaatgtttgatgggatgatacaaataacatttctccttggaaaaaaagcaagtctgaatttactatgttagtattttctaattgttttataatattctctgactagaatattgcctttaatataaggatttcggagatttgggtgtggtggtgcacacctgtggttcaagctacttaagaggctgcggcaggaggatcacttgaggttgggagtttgaggctgtagtgctccggactgtgcctggcctaaaaaaaatttatttcgattaaaagcattttttagactagtcacagatgcagtagtggaaagaggggaaagagtagaacaaggagtttgatctgcaactaactgacagtcaactgaggaactcactaccttagactagccttgtcagtaacatttgtaacttgaataacatgcttaaatttctatttgtggttcaatcaagttagacatttgtatggactccatatgtataagaacagaaattcttagctctgtattgctttttgcttcttttataccatctattttcccacttctgttaactctagcattacttgtactataatttaattttaattcactatgttgtgcttatccagaagaaattcaagagggctatacatatataaaacaggttctgagttgattaatatcatagtttaaaaaacttttaaggatgaattcttaagataaatgtgtggagaaggaataaaaagagtttattttcttagtgtacactcttatcctcctctgcgcaacttgacccttctaaattgtatcttgaagatacctctgatgtcctgggaacttttattttccaacctgtatacccagccatacctgaatttcattaaggtgtactgttttgcatatattcttgattgtaggatgccttcaactgtaagacccattattgctttaaaataatgttattggttgggaggggattgcattaaatgattagtccaattaattaataaagtgagaaaacatttatagtttcttatatagaggggaaaataggcaaaaataaaaattaagtcactgttaattctgttgtccgcctttattttctttatccaaataaaactttttttttctttaaaaaaaaaaaaaagagctgggtacagtggcccacatctgtagtcccagctgctttggaggctgaggtcagaggatcccttgagcccaggagttacaagccaccctgggcaacatactgagaccctctctctttctttaaaaaaaaaaaaaaaaaaaaaaa

SEQ ID NO: 1046 - DNA, 583 bp, Homo sapiens
  misc_feature (380)..(380): n equals a,t,g, or c
gtttttttatgactacataatgtttattgcgatctattttaaggcttttcatggatcttttcagctatgcacatggttagtcataatgattgtcattttaggtcagagtttctcagccttagcattgttgacattttggttaattctttgttgtaggggctgtcctgtacactgtagggtgtttagcagcatccctgatctctacctactaaatgccaggagcaacacagtacctccagctcagttgtgacaactactgaatgtctccagacaactactgaatgtctccagacattgcagagaaattgagtctggttgagaagtcactgttttagggcataatttttgggtagactgttagattctttgtgttcgttgtntctggcctgtataactcttcttaattatctgctactcaaatgtatttgggatcagccactgtcttccatttctcttttgctcacagatctactccacagctcttctcccttcaaacactgttcctcagcatcttgttttttgcagccaaacatttcttggagatctttccattggatcagtgttctgaactgcctgcgccggg

SEQ ID NO: 1047 - DNA, 1308 bp, Homo sapiens
cacggattggacgaaccactgaattccgcattgcagagatattgtatttaagtgcccagctcgatacaataaacgccatttgaccattcaccacattggtgtgcacctgggttgggatccactagtaacggccgccagtgtgctggaattctgcagatatccatcacactggcggccgccccgggctgcaggaattcggcacgagggaaaatggcgcctcacggcccgggtagtcttacgaccctggtgccctgggctgccgccctgctcctcgctctgggcgtggaaagggctctggcgctacccgaggtacagaagcaagtttgaggtcgggctgaagcagggtcrctggccagccgtgcgtcgcgctcgccagcggctcccccttctcctcggcgggcctgcggttctgatttcgtccctgacgcttcccgaccctgcccagccagatatgcacccaatgtccagggagcgtgcaaaatttgtcaaaagtggccttttattgtaaaacgacacgagagctaatgctgcatgcccgttgctgcctgaatcagaagggcaccatcttggggctggatctccagaactgttctctggaggaccctggtccaaactttcatcaggcacataccactgtcatcatagacctgcaagcaaaccccctcaaaggtgacttggccaacaccttccgtggctttactcagctccagactctgatactgccacaacatgtcaactgtcctggaggaattaatgcctggaatactatcacctcttatatagacaaccaaatctgtcaagggcaaaagaacctttgcaataacactggggacccagaaatgtgtcctgagaatggatcttgtgtacctgatggtccaggtcttttgcagtgtgtttgtgctgatggtttccatggatacaagtgtatgcgccagggctcgttctcactgcttatgttcttcgggattctgggagccaccactctatccgtctccattctgctttgggcgacccagcgccgaaaagccaagacttcatgaactacataggtcttaccattgacctaagatcaatctgaactatcttagcccagtcagggagctctgcttcctagaaaggcatctttcgccagtggattcgcctcaaggttgaggccgccattggaagatgaaaaattgcactcccttggtgtagacaaataccagttcccattggtgttgttgcctataataaacacttttttctttttaaaaaaaaaaaaaaaaaaaaactcgagggggggcccggtctagaaaggtaccaaagatc

SEQ ID NO: 1048 - DNA, 1698 bp, Homo sapiens; identical to SEQ ID NO: 331

SEQ ID NO: 1049 - DNA, 2201 bp, Homo sapiens
gattgctcccccaccctggccgcatgctaacattcatggaggcagacatgtgtacccagaatcagagggagccggttatcctcagttggagatcccaaaagacttctgcatacagttcctttcgttggatggcacaagaaagctcagagcccatgggagatttaatttattatcatataagactccttggaatgaatatatgtgttatctttccaaatgaccttactttattctacttatgtatacaatttctctgtcataatgtcttattttgtttttctttttcaattgtggaagaaggcagatcatcaaagttgttatgaataagtgtttagaagtacaatcaagcctgcaagtagttattaaggtctaatattgcaaatgctgaggtgacatgagacaaaggaggcaakatttctkatctaaagatacttgtattctggctgggtggagaagccataaactcctaaggaattagctcaaagtaagtcaacatgtgcatacatctgttgcaccaaaatgaaagcccaaccctgactttaatgacatcagtttctagaaaaacactattatagcaccaatcagaaaagccaagtaactaaatcttttaattttctgggcacactaagacttaagtagtctgaggatatcagggtggaaataaatgtagaaaaagttattgtgattccatggtagtggaaactcccatacacttctctttccctttctctttctcttttcctctcttctctttcttgattcctctgtctctctatcattggctttccccttgctaccctggcagacctgattgacaggtgtgacaattcccatggcaagctaatcccaccaggctggcagcttttgaaatttctatgtaaatacagtatttgtctaagtaccacacttaaatacagtagttaacgtttaagcacccacaggttggttctctttgtacttgaatcaacaaccattttcagctcttagaagggaccacccacaaaactgtactttytgactgtagaaaaactcagggagaaacaaatmaaatgaagcaaaaagttgagagaaaaaaaaccccaaaaaccacaaaactaaattatcgctaaattatcgacccaaggaggcatggttaggctaaggccaaaaactctgaattaaacttccaaatctaaccagctacctctagatgtaaacctgattttcatcttttctatcacccacatagacatgacttttttttccagacatcttgattacagttaatgttaaaatagcttcaagtctaaaatgcagatgtgttgtcttgaactgaaacgaactatcaaacagacaatgataaataatgatcatttaaacttggccttttaaaaagcacattggatacaataaaaatcagtgtattagtacactaaatgtgcttccaattatgatataaatagtgcataaagctttaaaattttcatcaaattaatgtatcactgacatgcaaattaactactgacatctatggtgtatgccatgtgatgatttctaattggcaagtgaacctcagaggattatttatagattacactgcaacaaagtgctggagtaaattcgcattgtgcagctcaattcaaattggtgtttgagctttgattctcttcactttttcacaccccttttgatctccaaaggctctcagaaataagctagctaaggtgctaaatatctaattaataacatttgggcagagaatttgcttcaaatgacccctaagagatttggagaccagttaatatccctcactagcttgttcaggtatgaataactcttgaggctgttgagtttgaactccaagatttggtaacatccatttccatccaaagcacgtaagagaaatgttcacacaggaaaagtgaggaggaaacttgaaaatttaccaagtgtattaatttttaagaacagctgcttctaaggatctaagtggaaatcctgtattattctctaatggcaattgaggcttcttttatctttactttccattacaatttgtgtatgaagaatgcagtgagagaattacaatgtatctgcaattcccatactatgttattagctccaagtttggcctttctttattccatgtccgtgtctccctaaaggtagaatgaccaaataaaaaaatgaagaagtaaaaaaaaaaaaaaaaaaaactcgag

SEQ ID NO: 1050 - DNA, 988 bp, Homo sapiens
ggcacgagcacgccggagggtcgcacgcgggttccagttgtgattgctggagttgtgtattgccaggaggctctccgagattggggtcgggtcactgcctcatccaccggagcgatggcgtttctccgaagcatgtggggcgtgctgagtgccctgggaaggtctggagcagagctgtgcaccggctgtggaagtcgactgcgctcccccttcagttttgtgtatttaccgaggtggttttcatctgtcttggcaagttgtccaaagaaacctgtaagttcttaccttcgattttctaaagaacaactacccatatttaaagctcagaacccagatgcaaaaactacagaactaattagaagaattgcccagcgttggagggaacttcctgattcaaagaaaaaaatatatcaagatgcttatagggcggagtggcaggtatataaagaagagataagcagatttaaagaacagctaactccaagtcagattatgtctttggaaaaagaaatcatggacaaacatttaaaaaggaaagctatgacaaaaaaaaaaagagttaacactgcttggaaaaccaaaaagacctcgttcagcttataacgtttatgtagctgaaagattccaagaagctaagggtgattcaccgcaggaaaagctgaagactgtaaaggaaaactggaaaaatctgtctgactctgaaaaggaattatatattcagcatgctaaagaggacgaaactcgttatcataatgaaatgaagtcttgggaagaacaaatgattgaagttggacgaaaggatcttctacgtcgcacaataaagaaacaacgaaaatatggtgctgaggagtgttaaaagtagaagattgagatgtgttcacaatggataggcacaggaaaccagttaggtctcaatacctgaagctatcgtaaaattaagaaaggataaagttggtaaacctttaaaaaaaaaaaaaaaaaaaaaaaa

SEQ ID NO: 1051 - DNA, 1494 bp, Homo sapiens
ggcacgaggctgactgtaggccgggaaaggatatcctgtgattttgaagaggcagcagaacctgttctcatccaagaaggacttaagaacacaggatgtgcaataattttcttgctgatgtacttttttggaatggccagctccatttggtgggttattctgacactcacttggtttttggcagcaggactcaaatggggtcatgaagccattgaaatgcacagctcttatttccacattgcagcctgggccatccccgcagtgaaaaccattgtcatcttgattatgagactggtggatgcagatgaactgactggcttgtgctatgttggaaaccaaaatctcgatgccctcaccgggttcgtggtggctcccctctttacttatttggtcattggaactttgttcattgctgcaggtttggtggccttgttcaaaattcggtcaaatcttcaaaaggatgggacaaagacagacaagttagaaagactgatggtcaagattggggtgttctcagtactgtacacagttcctgcaacgtgtgtgattgcctgttatttttatgaaatctccaactgggcactttttcggtattctgcagatgattccaacatggctgttgaaatgttgaaaatttttatgtctttgttggtgggcatcacttcaggcatgtggatttggtctgccaaaactcttcacacgtggcagaagtgttccaacagattggtgaattctggaaaggtaaagagagagaagagaggaaatggttgggtgaagcctggaaaaggcagtgagactgtggtataaggctagtcagcctccatgctttcttcattttgaaggggggaatgccagcattttggaggaaattctactaaaagttttatgcagtgaatctcagtttgaacaaactagcaacaattaagtgacccccgtcaacccactgcctcccaccccgaccccagcatcaaaaaaccaatgattttgctgcagactttggaatgatccaaaatggaaaagccagttagaggctttcaaagctgtgaaaaatcaaaacgttgatcactttagcaggttgcagcttggagcgtggaggtcctgcctagattccaggaagtccagggcgatactgttttcccctgcagggtgggatttgagctgtgagttggtaactagcagggagaaatattaacttttttaaccctttaccattttaaatactaactgggtctttcagatagcaaagcaatctataaacactggaaacgctgggttcagaaaagtgttacaagagttttatagtttggctgatgtaacataaacatcttctgtggtgcgctgtctgctgtttagaactttgtggactgcactcccaagaagtggtgttagaatctttcagtgcctttgtcataaaacagttatttgaacaaacaaaagtactgtactcacacacaaaaaaaaaaaaaaaaaaaaaaaaaaaaaaaaaaaaaaaaa

SEQ ID NO: 1052 - DNA, 1352 bp, Homo sapiens
ggcacgagctcgtgccgcttttttcctgccatcggtcagaaaaaacatgtcgaagatggatggcattagattatgcaggaatttctattggaatactgggctgctatgtctcaggagtattttacgcattttattgtaataactactggcgtcaggtgtacttgatcacagtgcttgctatgatcctggcagtgttctttgcgcagattcatcccaattacctcacgcagcaatggcaaaggctccgttctatcatcttttgttctgtttcgggatatggagtgattcctactcttcactgggtttggctcaatggaggaattggtgctcctattgtacaggactttgcaccccgtgtaattgtgatgtatatgattgctcttcttgctttcctattctacatttccaaagtcccagagcggtactttccagaatcacttccacggtgaatcagagaagggattgtaccactcgtcacgtgtgttgggaaagaagaaagggtgagaaaccctggcctaaacaatccatcccacagatcctcaggcattcctttgtgtacttggtttttcaccactgagctttaaataagaatggaaatacaagggaaaacctgcgttgtaaacatgaggatttgggaacagatctaggacatgccactgaattgaagaccacccatcttccaggcagggccagaattacagaaaacaattctggacaactaaactacctcggatcaagccaccaaatatggcatatccttgcagtagtgatgttatattggtggcatcagtcaacagtgtatgtcatgcagtacagacatagcaagccttgtcctgactatgtttcacatttgtgaattagaatcaggaacgaagattcagggaatgtctgtcacatcttatggcatcccacctggacagaatatccgatttgaagattgtgattgacttccgtaaaactgtacaactctccatttggcagctgctacataataggtgcttaatgtttgtggtgtgaatgaaataactgaatttgaatagaagtttacatccaaaagtcataataagacaaataatgaaaaactccaaagtcactgattataaagaatatgcaatccatttgggatttattgcatttaaagaaaacagattaaaacagtgcttacgtgaagtaccaaaacctaaaataaaccaagcagagtagctgacttgtaagaaaactgctctgcctggtgaacttcagcatagaagagtgggctccaccttagattttccaccagcaagaggacaacagtctatcactcttaaacaataaacagggtaagactgaaaaaaaaaaaaaaaaaaaaaaaa

SEQ ID NO: 1053 - DNA, 1721 bp, Homo sapiens
  misc_feature (1656)..(1656): n equals a,t,g, or c
accttccctccctggcaatggaaagagctttggagaccagcccatggggacagagtcagaggcactgggtgtaaaaaagagcgagcgtgtggcacatttggtccattgtcatgtgtgggtatggcaggaggagggggtaatctagaagccccacatctagggccttctagggacccagatatgcccccttaggcaaggctcacatgccaaagcaaagcagatgaggtcagcctggcttgggttgagggctcagtgcctcttagccttgccctggggttcttggaccttccggaaactgagccacatcaggctcacgttgatagcataggtggtgatacaaacaatgcagaaatcatagagcacgaagaacaggatccaggccaggtagacagaaccagcgagagacaccagggagctcagcagcatcaggacagaggcccagcgtgtccgcaggcaacctaacaatagctgtagtgtgtagaagcccacgcgtccgcccacgcgtccgcccacgcgtccgcggacgcgtgggcagacgcgtgggcgacccacgcgtccgattcactagtcccggcattcttcgctgttttcctaactcgcccgcttgactagcgccctggaacagccatttgggtcgtggagtgcgagcacggccggccaatcgccgagtcagaggccaggaggggcgcggccattcgccgcccggcccctgctccgtggctggttttctccgcgggcgcctcgggcggaacctggagataatgggcagcacctgggggagccctggctgggtgcggctcgctctttgcctgacgggcttagtgctctcgctctacgcgctgcacgtgaaggcggcgcgcgcccgggaccgggattaccgcgcgctctgcgacgtgggcaccgccatcagctgttcgcgcgtcttctcctccaggtggggcaggggtttcgggctggtggagcatgtgctgggacaggacagcatcctcaatcaatccaacagcatattcggttgcatcttctacacactacagctattgttaggttgcctgcggacacgctgggcctctgtcctgatgctgctgagctccctggtgtctctcgctggttctgtctacctggcctggatcctgttcttcgtgctctatgatttctgcattgtttgtatcaccacctatgctatcaacgtgagcctgatgtggctcagtttccggaaggtccaagaaccccagggcaaggctaagaggcactgagccctcaacccaagccaggctgacctcatctgctttgctttggcatgtgagccttgcctaagggggcatatctgggtccctagaaggccctagatgtggggcttctagattaccccctcctcctgccatacccgcacatgacaatggaccaaatgtgccacacgctcgctcttttttacacccagtgcctctgactctgtccccatgggctggtctccaaagctctttccattgcccagggagggaaggttctgagcaataaagtttcttagatcaatcagccaagtytgaaccatgtgtctgccatggactgtggtgctgggcctccctcggtgttgccttctctgggagctgggaagggtgagtcagagggagagtggagggcctgctgggaagggtgggntatgggtagtctcatctccagtgtgttggagtcagcaagggcctgggggcaacatttggccccac

SEQ ID NO: 1054 - DNA, 553 bp, Homo sapiens
aattcggcacgagagcagctgggcctgtctgtggccatctggacagatctgtttttgtcatgtctgcacggcctgatgttggtggccttgctcttggtggtagtgacctggagggtgtgtcagaagtcccactgcttccgactgggcaggcagctcagtaaggccttgcaagtgaactgcgtggtaaggaagctcctggtacagctgagacgtctgtattggtgggtggagactatgactgccctcacctcctggcacctggcctatctcatcacttggaccacctgcctggcctcccacctgctgcaggctgcctttgagcacacgacccagctggccgaggcccaggaggttgaaccccaggaggtctcagggtcttccttgctgccctcactgtctgcgtcctcggactcagagtctggaacagttttgccagagcaagaaactcccagagaataaatgtatccccatctgcaaaaaaaaaaaaaaaaaaaaaaaaaaaaaaaaaaaaaaaaaaaaaaaaaaaaaaaaaaaaaaaaaaaaaaaaaaaaaa

SEQ ID NO: 1055 - DNA, 1039 bp, Homo sapiens
ggcacgagggcctctctagttctttttacaagtcatttgcctttggacttttaagatctaaaaagtatcacattgcttatgggtatttttttgagattgtataatttaactaggaaacatgattttaggagtcatagtgtaatgattaggtgtggagactcttgactgtcagcctgtgtttgtatctctgcaccatgacttaatacttttacgaattttttttttttttggagacagtcttgctctgtcgccagactggagtgcagtggcgtgatcttggctcactgcaatctccgcctccggggttcaagcaattctcctgcctcagcctcctgagtaggtgggactacaggcatgtgccaccatgcccagctaattttttttgtatttttagtagaggcggggtttcaccatgttggccaggatggtctcgatctcctgatctcgtgatctgcccgcctcggcctcccaagtgctgggattacaggcgtgagccaccacacctagtctttaccaaattattaatctctccaagctgtaccctcctcatcttttaaaggagttgaaattaaacctttcttatgaagtagtgagagagaactaaatgagaaacmccatgttaaaatagtgcagttctgattttttgtagctcgtaatttcgtttgtattgatactgatttctgtatctgggaattaggttactgaacatgtattgctacttgagttgctttgtgctcgaattatatcagtagataagaaaataaataattaaaatttattgttttatgggatgggaaaaggaaagtcattattttaagcaagatatcaaatgcttaatctgtttgtgatatttgggggtttttagctattaaacacctttatttttgaaaattctgcagaaaaaaattattcaacagatactcggtttcagctgtgtatcagggaaacatgcagaatgacatggtttcctgcacagtcaaacttgcattcagttggggcaagaaaaaaataatgaaacattaaaaaaaaaaaaaaaaaa

SEQ ID NO: 1056 - DNA, 1680 bp, Homo sapiens
ggcacgaggtacgccgctgccagcccggcctgggcggccgcgcaacaaaggagtcacccggcgatgagccccggcacccccggaccgaccatgggcagatcccagggcagcccaatggatccaatggtgatgaagagacctcagttgtatggcatgggcagtaaccctcattctcagcctcagcagagcagtccgtacccaggaggttcctatggccctccaggcccacagcggtatccaattggcatccagggtcggactcccggggccatggccggaatgcagtaccctcagcagcagatgccacctcagtatggacagcaaggtgtgagtggttactgccagcagggccaacagccatattacagccagcagccgcagcccccgcacctcccaccccaggcgcagtatctgccgtcccagtcccagcagaggtaccagccgcagcaggtgagcacagtgcactgccccgcaggccctgttttctccaccaaggcagacccggctctgaatcatcttcctgtcctttattaaaaattatgttctggtggaaaaaaaattagttttgagaaaatgcataactgtaacctaatctaactccatctccccctccgtcttttccccttttgagattggagggtgagaagaatgactggtttaatagctgcttgcattactggttagtggcagcagaaagtgtcagtcattgcttgttccctgtcatttgtgttctgaacctttcaagaaagcactctgccactttgttaaggcttattcaggagaaggattttatcaatcatttaatccttctagttggcacgtgcatggtatttttatcttgacctttgttttgttttgttttaatggtaagtgctactttgtgaaaacattgttgcctttgactgtgttattctatttaaactagcttataagtagatattcacttcagttgcagtatattaaaatactaattggaatcatgtactttaaatatatcaagcagtttctagtttaaattagtctcattaaatactcctttaggttactgggttatatatttcagcttacagaatttgtggaaaaatagtatatatgttatttgataaaatgattcagtttccttatgttttagagactgtcactcatgagtgacatgaaaagaagtagtgagtgagggactcttactctgaatccagataaaatgttcgtagcacatccaatcataaacatcaaaatataattttccattttaatacttccttccttctcttttgtgtggtggaggtggcaaagagaaggtgaacacatgtagcatcgactttttcctctttaaaggacttcttttgtggcttgaatagatcgtggatattaagcaaaataaataaatttacggagcttaattttaatcagtttggctggtttcttacatattttcttgggtttgttggagtccctttccgtatgacttactagagaattctaaagagagtttatgatttgaagcaaaacatgttaaaacaacagctaggattcgagacccagtacaatcttgtttttacatacatgtatttaaaagcttgaacccgggaggcggaggttgcagtgagcggagaccacatcactgcactccagccttgcaacagagtgagactctgtctcaaaaaaaaaaaaaaaaaaaaa

SEQ ID NO: 1057 - DNA, 1996 bp, Homo sapiens
  misc_feature (1975)..(1975): n equals a,t,g, or c
  misc_feature (1980)..(1980): n equals a,t,g, or c
ggtcgacccacgcgtccgggtggctccagagatggcagtgagcgagaggagggggctcggccgcgggagccccgcggagtgggggcagcggctacttctggtgctgctgttgggtggctgctccgggcgcatccaccggctggcgctgacgggggagaagcgagcggacatccagctgaacagcttcggtttctacaccaatggctctctggaggtggagttgagcgtcctgcggctgggcctccgggaggcagaagagaagtccctgctggtggggttcagtctcagccgggttcggtctggcagagttcgctcctattcaacccgggatttccaggactgccctctccagaaaaacagtagcagtttcctggtcctgttcctcatcaacaccaaggatctgcaggtccaggtgcggaagtatggagagcagaagacgttgtttatctttcccgggctcctcccggaagcaccctccaaaccagggctcccgaagccacaggccacagtcccccgcaaggtggatggcggagggacctctgcagccagcaagcccaagtcaacacccgcagtgattcagggtcctagtgggaaggacaaggacctggtgttgggcctgagccacctcaacaactcctacaacttcagtttccacgtggtgatcggctctcaggcggaagaaggccagtacagcctgaacttccacaactgcaacaattcagtgccaggaaaggagcatccattcgacatcacggtgatgatccgggagaagaaccccgatggcttcctgtcggcagcggagatgccccttttcaagctctacatggtcatgtccgcctgcttcctggccgctggcatcttctgggtgtccatcctctgcaggaacacgtacagcgtcttcaagatccactggctcatggcggccttggccttcaccaagagcatctctctcctcttccacagcatcaactactacttcatcaacagccagggccaccccatcgaaggccttgccgtcatgtactacatcgcacacctgctgaagggcgccctcctcttcatcaccatcgccctgattggctcaggctgggccttcatcaagtacgtcctgtcggataaggagaagaaggtctttgggatcgtgatccccatgcaggtcctggccaacgtggcctacatcatcatcgagtcccgcgaggaaggcgccagcgactacgtgctgtggaaggagattttgttcctggtggacctcatctgctgtggtgccatcctgttccccgtagtctggtccatccggcatctccaggatgcgtctggcacagacgggaaggtggcagtgaacctggccaagctgaagctgttccggcattactatgtcatggtcatctgctacgtctacttcacccgcatcatcgccatcctgctgcaggtggctgtgccctttcagtggcagtggctgtaccagctcttggtggagggctccaccctggccttcttcgtgctcacgggctacaagttccagcccacagggaacaacccgtacctgcagctgccccaggaggacgaggaggatgttcagatggagcaagtaatgacggactctgggttccgggaaggcctctccaaagtcaacaaaacagccagcgggcgggaactgttatgatcacctccacatctcagaccaaagggtcgtcctcccccagcatttctcactcctgcccttcttccacagcgtatgtggggaggtggagggggtccatgtggaccaggcgcccagctccccgggaccccggttcccggacaagcccatttggaagaagagtcccttcctccccccaaatattgggcagccctgtccttaccccgggaccacccctcccttccagctatgtgtacaataatgaccaatctgtttggctaaaaaaaaaaaaaaaaaaaaaaaaaaaaaaaaaaaaaaaaaaaaaaggggggccgntctanaggatccctcgagggg

SEQ ID NO: 1058 - DNA, 888 bp, Homo sapiens
ggcacgagctggaaccagcaagtcccagacaaggagagcggaggaggaagtcatgggaacgcagcctccagttgtagcaggtttcactattcctatgctggggtacacagtgagagtactcacttttcacttgtcttgctcttagattgggccatggctttcatcctgtgtcccctgacctgtccaggtgagtgtgagggcagcactgggaagctggagtgctgcttgtgcctcccttcccagtgggctgtgttgactgctgctccccacccctaccgatggtcccaggaagcagggagagttggggaaggcaagattggaaagacaggaagaccaaggcctcggcagaactctctgtcttctctccacttctggtcccctgtggtgatgtgcctgtaatctttttctccacccaaaccccttcccacgacaaaaacaagactgcctccctctcttccgggagctggtgacagccttgggcctttcagtcccaaagcggccgatgggagtctccctccgactccagatatgaacagggcccaggcctggagcgtttgctgtgccaggaggcggcagctcttctgggcagagcctgtccccgccttccctcactcttcctcatcctgcttctcttttcctcgcagatgataaaaggaatctggcattctacacctggaccatttgattgttttattttggaattggtgtatatcatgaagccttgctgaactaagttttgtgtgtatatatttaaaaaaaaaatcagtgtttaaataaagacctatgtacttaatcctttaactctgcggatagcatttggtaggtagtgattaactgtgaataataaatacacaatgaattcttcaaaaaaaaaaaaaaaaaaaaaaa

SEQ ID NO: 1059 - DNA, 1127 bp, Homo sapiens
  misc_feature (1069)..(1069): n equals a,t,g, or c
  misc_feature (1084)..(1084): n equals a,t,g, or c
ggcacgagctcgtgccgctccagactaggcctgtgttggctcggwaccctcccttcctacagcagagacccaccgaggcagagggcttcagagagccccacgaggttgtgtccatagtggcgactctggagagtatagctgctgggtgcagctgctccgtggccagcttcacggcggcaccaggtggtgacagctgttggcagagctstgtgcagcgctctgtgcatgcacttacccctcagacttgagaaatggctttgctccaaagtcgtactctcattttcattttcatgagtcacagctggggccttgtgggaagaatcgaaggtcagcttactcaggagtgaggggcatcaggtccagtcacaggccagccagggtgaggaccagggtggaccactcagctctgggaccctgtgtgtgtgtagggagggagaagaggtgggaggaccatgggctgcttatccccaggaggtgggacgaagggggaggcctgatgctgggaggcttgtgtggtccgccaccaacagatggctcctaccagggcgacagggacggargcgccggtggcaactggtgctgggtcaraaccaagccactgcgtgctgtcgtgggtgcagaagcttagctttggggtagaagggacagtgggccaggggccttccctcaagaagctccagctcactgaaagcccaagcagacccctgaaggactatatctctgtgtgccgagatgctcccctccatgagctccaccttcattgtgcataggacgctgattcttagtacacagcagcaacagagcttcagcagatgccttcttgggaccgcgcttgactctagttccttctccccgggagggagaaagggaaggagcctttgaaatttcccctttcgctatgtttcactggtttttaaacaaatagggctaaatagagaccaagaagttaaccatgtaccttaacgtgcggctttaggcaaaatgttattcaaaaaaaaaaaaaaaaaactcgagggggggcccggtacccaattcgccctatagtgagtcrtatkrcattcactggcgncgtttacaacgtcgngactgggaaaaccctggcggtacccaacttaatcgccttgcag

SEQ ID NO: 1060 - DNA, 855 bp, Homo sapiens
gaattcggcacgagtaaacagtttgcctttaccagtgaacatctctcagaggttgaactcaggtactctcaagtaccctcacagaggttgcccagaatcttcggattgacccaatcttagatctaatataacctgctaattttgcagatgaggacatttagacctaaagaggtaaatgagtgaattgatcaagactgacaggagatattagcaagggtgataccgtaacctggtttttattttgcttcccaatcttgtagtcattcatataagtatactatgattcctgtgacttttttctatactcattctgcattccagagtttcttcagactattactcgttctacctgtattttgtacttgggtcaaactctcttgctttgtccctccctgaaattgattaatgtttttctgccttgcctttgctttaaaggtttcctttattcccacccaagactaacttctaaaattcctctttatacaattcagcttttcatctccctagcatagtgttttgcacagactaagatatttgattcttggccaggcgcggtgstcacgcctgtaatcgcagcacttttggaggccgaggcaggtggattgccagagctcaggaattcaagaccagcctgggcaacacagtgaaaccccatctctactaaaatacaaaaaaattagctgggtgtggtggcgtgcacctgtagtcccagctactcgggaggtcgaggcaggagaattgcttgaacccaggaggcggaggttgcagtgagccaagaagatcacgccactgcactccagcctgggcgacagagcaagactgtctcaaaaaaaaaaaaaaaaaaaaaaaactcga

SEQ ID NO: 1061 - DNA, 1184 bp, Homo sapiens; identical to SEQ ID NO: 569

SEQ ID NO: 1062 - DNA, 1184 bp, Homo sapiens; identical to SEQ ID NO: 569

SEQ ID NO: 1063 - DNA, 686 bp, Homo sapiens
  misc_feature (16)..(16): n equals a,t,g, or c
  misc_feature (19)..(19): n equals a,t,g, or c
  misc_feature (29)..(29): n equals a,t,g, or c
  misc_feature (539)..(539): n equals a,t,g, or c
tggatcccccccgggnttncaagaaattncggcacgaktacctgctggatattggctgtggcactgggctgagtggaagttatctgtcagatgaagggcactattgggtgggcctggatatcagccctgccatgctggcatttctgctgtgcagtggctctgtaatgctaacaagaagtctgaaaaccctgccaagcgcctgtactgcttttttgcttctcttttttctgttctcgtccggggatcccgagctgtcctgcagctgtaccctgagaactcagagcagttggagctgatcacaacccaggccacaaaggcaggcttctccggtggcatggtggtagactaccctaacagtgccaaagcaaagaaattctacctctgcttgttttctgggccttcgacctttataccagaggttcccattaaggatgtcgaggcggggaatggtgaggaagagtcgggcatgggtgctggagaagaaggagcggcacaggcgccagggcagggaagtcagacctgacacccagtacaccggncgcaagcgcaagccccgcttctaagtcaccacgcggttctggaaaggcacttgcctctgcacttttctatattgttcagctgacaaagtagtattttagaaaagttctaaagttataaaaatgttttctgccagtaaaaaaaaagtt

SEQ ID NO: 1064 - DNA, 1091 bp, Homo sapiens
  misc_feature (1066)..(1066): n equals a,t,g, or c
  misc_feature (1080)..(1080): n equals a,t,g, or c
gaattcggcacgaggaactctgggtagctggttttggagttgtatggggtttcatttattctccaggtctcttagtcttcacttgaaaatagaaactagagttcatttttcctgacaagaatgaacttaattatttacctagaatggttagtaatctgttcttattaccagaaagctttcttctgatctatttagtatcttttttcataagagttkgaatatattagcatgtattctcaatagaatctaatctttcattattaaagttcctaaatatcttatattactatgttttatcattatgaacattgactctcattgtttagagttttgcttctctaattatcttgggtgaaggaccagttttgtttttaatttccagtatgtcatggattgataattttataaaatacaataaaaatgatttactagaaaaatgaaatactagaaaaatgaaatttaaagaaactaaaaacataagcctgattaaacatttattattcttatagtcaacagacataaaattactctggcaagctgctgtaaaaaaattctaaaggtctactctcagtttctgtgcttattctgggactagggctggtctgcagagtccagttcgagttgcactgttggacagaatatatacaacttaggagactgaagttcagtagatactaatttcagaacatatcctcaaagtgggtttttggggactgtccccttcacatttcttgcatgtataaaaggcaagtgcagttcgggtacagtggttcatggctgtaatcccagcactttgggaggccaaggcaggcagatcacttgagatcaggggtttgaggcaaatttggccaacatggtgaaacctcgtctctaaaaatacaaaaattagctgggcatggtggtgtgcacctgtaatcccagctactcaggaggctgaggcatgagaattgcctgaacccaggaggcagaggttgcagtaagccaagatcatggcactgcactctagcctgggcgacagagcaagaccctgtcttgaaaaaaaaaaaaaaaaactcgcagggggggncccggtacccaatntgagtctgaaa

SEQ ID NO: 1065 - DNA, 2078 bp, Homo sapiens
ggcacgagccgcctgaccgccccgggcttaagggagcctggctaggccggcagccggatggtcccgcagctcggggccggccatgcttcgcggtccgtggcgccagctttggctctttctcctgctgctgctcccgggcgcgcctgagccccgcggcgcctccaggccgtgggagggaaccgacgagccgggctcggcctgggcctggccgggcttccagcgcctgcaggagcagctcagggcggcgggtgccctctccaagcggtactggacgctcttcagctgccaggtgtggcccgacgactgtgacgaggacgaggaggcagccacggggcccctgggctggcgccttcctctgttgggccagcggtacctggacctcctgaccacgtggtactgcagcttcaaagactgctgccctagaggggattgcagaatctccaacaactttacaggcttagagtgggacctgaatgtgcggctgcatggccagcatttggtccagcagctggtcctaagaacagtgaggggctacttagagacgccccagccagaaaaggcccttgctctgtcgttccacggctggtctggcacaggcaagaacttcgtggcacggatgctggtggagaacctgtatcgggacgggctgatgagtgactgtgtcaggatgttcatcgccacgttccactttcctcaccccaaatatgtggacctgtacaaggagcagctgatgagccagatccgggagacgcagcagctctgccaccagaccctgttcatcttcgatgaagcggagaagctgcacccagggctgctggaggtccttgggccacacttagaacgccgggcccctgagggccacagggctgagtctccatggactatctttctgtttctcagtaatctcaggggcgatataatcaatgaggtggtcctaaagttgctcaaggctggatggtcccgggaagaaattacgatggaacacctggagccccacctccaggcggagattgtggagaccatagacaatggctttggccacagccgtcttgtgaaggaaaacctgattgactacttcatccccttcctgcctttggagtaccgtcacgtgaggctgtgttcacgggatgccttcctgagccaggagctcctgtataaagaagagacactggatgaaatagcccagatgatggtgtatgtccccaaggaggaacaactcttttcttcccagggctgcaagtctatttcccagaggattaactacttcctgtcatgaaggctagaggaagacttcctggaactgcctttcttccactaacaggaccctgggacctgtaggagcaccccgtttgggactgtgaggtgtttgagggtgtggactggcatccagcagccactaacaaacacacaactggtgtgtaaaaggcaggccttacattagaagccaagccaatcctttttcttttttttggaggtcccaccgagatagataggaacttggattgctgaattcaaaaacagagcccattcttaagatcacttggtgccttaaagacacgcattccaaagtggaatgtggttgaagaaagtgggccaggtggttgaagaaagccatgtgggagctcagcaaatcccaagggcttattatgacactccagatggtctccttagcatctcagctcttctgcaaggaagagcttgggtgttaggcctcagaggctgtagggtccttgggttacagagccggggagaacgaagttctgtgacccaggggtggagaatacactctaggtttgcgggctggtgggctttcaaattggtacttccagaggaaagccaagctgcttctgttgtgagcgaatcagccaagagcctgaggctgaagggaaaagtacacagaggaagatattttacaaaccaggtcagtgtaggccaagacttatggtctacagattttggcgggggaggggggaccttttcaaagacaatagggggtcttgacatgtttgttgtatgtaaagatgataagattaaaatttttgattttcctaaaaaaaaaaaaaaaaaaaaaaaaaaaa

SEQ ID NO: 1066 - DNA, 2542 bp, Homo sapiens
cacgcgtccgcggacgcgtggggcccgctcgccgcccgccatggcccgcgcacccccgctgctcgccgcgttgaccgcgctcctcgccgccgccgctgctggcggagatgccccgccgggcaaaatcgcggtggttggggctgggattgggggctctgctgtggcccattttctccagcagcactttggacctcgggtgcagatcgacgtgtacgaaagggaaccgtgggtggccgcttggccaccatctcagtcaacaagcagcactatgagagcggggctgcctccttccactccctgagcctgcacatgcaggacttcgtcaagctgctggggctgaggcaccggcgcgaggtggtgggcaggaacgccatcttcggcggggagcacttcatgctggaggagactgactggtacctgctgaacctcttccgcctctggtggcactatggcatcagcttcctgaggctgcacatgtgggtggaggaggtcatggagaagttcatgaggatctataagtaccacgcccacggctatgccttctcgggtgtggaggaactgctctactcactgggggaatccacctttgttaacatgacccagcactctgtggctgatccctgctgcaggtgggcgtcacgcagcgctttattgatgatgtcgtttctgctgtcctgcgggccagctatggccagtcagcagcgatgcccgcctttgcaggagccatgtcactagccggggcccaaggcagcctgtggtctgtggaaggaggcaataagctggtttgttccggtttgctgaagctcaccaaggccaatgtgatccatgccacagtgacctctgtgaccctgcacagcacagaggggaaagccctgtaccaggtggcgtatgagaatgaggtagcaacagctctgacttctatgacatcgtggtcatcgccacccccctgcacctggacaacagcagcagcaacttaacctttgcaggcttccacccgcccattgatgacgtgcagggctctttccagcccaccgtcgtctccttggtccacggctacctcaactcgtcctacttcggtttcccagaccctaagcttttcccttttgccaacatccttaccacagatttccccagcttcttctgcactctggacaacatctgccctgtcaacatctctgccagcttccggcgaaagcagccccaggacgcagctgtttggcgagtccagtcccccaagcccctctttcggacccagctaaagaccctgttccgttcctattactcagtgcagacagctgagtggcaggcccatcccctctatggctcccgccccacgctcccgaggtttgcactccatgaccagctcttctacctcaatgccctggagtgggcggccagctccgtggagtgatggccgtggctgccaagaatgtggccttgctggcttacaaccgctggtaccaggacctagacaagattgatcaaaaagatttgatgcacaaggtcaagactgaactgtgagggctctagggagagcctgggaactttcatcccccactgaagatggatcatcccacagcagcccaggactgaataagccatgctcgcccaccaggcttctttctgacccctcatgtatcaagcatctccaggtgacctactgtctgcctatattaagggtccacacggcggctgctgcttttttttaagggggaaagtaagaaaagagaaggaaatccaagccagtatatttgttttatttattttttttaagaagaaaaaagttcatcttcacaaggtgcttcagacttggtttcttagctagaaaccagaagactacgggagggaatataaggcagagaactatgagtcttattttattactgtttttcactacctactcccacaatggacaatcaattgaggcaacctacaagaaaacatttacaaccagatggttacaaataaagtagaagggaagatcagaaaacctaagaaatgatcatagctcctggttactgtggacttgatagatttgaggtacctagttcagaactccctagtcaccatctccaagcctgtcaacatcactggatattggaggagatgactgtggtaggacccaaggaagagatgtgtgcctgaatagtcgtcaccatatctccaagcttcctggcaaccagtgggaaaagaaacatgcgaggctgtaggaagagggaagctcttccttggcacctagaggaattagccattctcttccttatgcaaagattgaggaatgcaacaatataaagaagagaagtccccagatggtagagagcagtcatatcttacccctagatgttcatcccagcagaagaaagaagaaggtgttggggtaggattcttcagaggttagcctggtactttctcatcagacactagcttgaagtaagaggagaattatgcttttctttgctttttctacaaacccttaaaaatcacttgttttaaaaagaaagtaaaagcccttttcattcaaaaaaaaaaaaaaaaaaaaaaa

SEQ ID NO: 1067 - DNA, 2539 bp, Homo sapiens
ccacgcgtccgggcagtttggagcatgtgaacaccttgagccttgatgagttccagtatgtggtatattatgcagagcattcagagcaaatactctctctccgagcgcttaatccgaacaattgctgccatccgttccttcccacatgataatgtagaggacctcatcagagggggagcagatgtgaactgcactcatggcacactgaagcccttgcactgtgcctgtatggtgtcagatgctgactgtgtggagttacttctggaaaaaggagccgaggtgaatgccctggatgggtataaccgaacagccctccactatgcagcagagaaagatgaggcttgtgtggaggtcctattggagtatggtgcaaaccccaatgctttggatggcaacagagataccccacttcactgggcagcctttaagaacaatgctgagtgtgtgcgggctctcctagagagcggggcctctgtcaatgccctggattacaacaatgatacaccgctcagctgggctgccatgaagggaaatcttgagagtgtcagcatccttctggattatggcgcagaggtcagagtcatcaacctaataggccagacacccatctcccgcctggtggctctgctagtcaggggacttggaacagagaaagaggactcttgctttgagctcctccacagagctgttggacactttgaattgaggaaaaatggcaccatgccacgagaggtggccagagacccgcagctatgtgaaaaactgactgttctgtgctcagctccaggaactctaaaaacactcgctcgctatgccgtgcgccgtagcctgggactccagtatctccccgatgcagtgaagggccttccactgccagcttctttgaaggaatacctgttacttttagaatagccggagaagatgtttgcaccatcgtgcaggcagctctgggtgaggttgtccctgcagtactccttgtcacagaaaacagaaaaacagttgttcctgttgtgtggtttatagatttcgaagcaacatgtcacaacaataacctccatagcacctccccttcccaaaccaaacaacccaacaaaaaaaatccctcacttttgttttctgtttattgcttacctggctttttatattgcattttgcaaaagaagaggtctccctcaatcctcccctttagggaaggagtcaacagtgtaactaaatttctctaggaagatggaaagtacttaaataatgtgtgtgtggttttcctttggggacgtggttaacggtccagaagaatcccttctagaaagcattttaggccagccatggtggctcacgtctgtaatcccaggactttgggaggctgaggcaggtggatcacctgaggtcaggagttcgagcccagcctgaccaatatgatgaaaccccgtctctactaaaaatacaaaaattagctgggcatggtggcatgcgcctgtaatcccagctactcaggaggctgagacagaagaatcgcttgaacctgtgaggcagaggttgcagtgagccaagatcgcgccattgcactccagcctggacaacaagagcaaaactgtctcaaaaaaaaaaaaaaaaaaaaaaccattttaattgatctgtgaaaaaacttaagaaaatcacaatttcagctaacagcaattgtgtcccaaagatgaagatactataacctcaaatggtgcagatccagaactgggctggatgacatccctactgtgccatgtcctggggcatttggaagggactggacctctttcccctcatcaaaggaaacagcagtctttgcctctttctgttggttgtgcccaagggctacagtagctctgaaataacaagagctctgtaataacagtaataaatagctctgaaataacagtcctaagaactcctaaagtcctgagaacttttcttgtaatgcagctttttctcttcctgagaaacagtgtgttctaatgggattcccaggcagttcctacacctacggtgtgtgttccagcagggaggagttatgggctgggctgccttttcccatgggtcttcattcccaatggaaagttcactctgcttagtttggaattatttttctttcagttgttctggaacctttgctttttattgatttatacaatacaattggtgggagggtggacttgggatgggagtgggaaaagcatgtaagagctccttttgtgatggtccatctacccaaaagagatctgctttagtgaacgatactctttcatttttctaaattagatcaagttgttattgattttagatgacttgtatgcaaatttgaaaaacttttttttttaaagctgattgggaactacaaacaatgaatggaatctactgacacagctaattggaaaacagatgtcttcttctgtcctattgatgctggtgtttaaaaaacatcacttaaaaaaaaagaataaatagttctaaaagcaaaaaaaaaaaaaaaaaaaaaaaaaaaaaaaaaaaaaaaaaaaaaaaaaaaaaa

SEQ ID NO: 1068 - DNA, 1050 bp, Homo sapiens
ggcacgagatgataatgtccggcctctggcctatcctgattctgatgctgtgctcatctgcttcgacattagccgaccagaaacactggacagtgttctcaagaagtggcaaggagagactcaagagttctgccccaatgccaaggttgtgctggttggctgtaaactggacatgcggactgacctggccacactgagggagctgtccaagcagaggcttatccctgttacacatgagcagggcactgtgctggccaagcaggtgggggctgtgtcctatgttgagtgctcctcccggtcctctgagcgcacgccagggatgtcttccatgtggctacagtggcctcccttggccgtggccataggcagctgcgccgaactgactcacgccggggaatgcagcgatccgctcagctgtcaggacggccagaccgggggatgagggcgagatacacaaggatcgagccaaaagctgcaacctcatgtgaggggctaggagagggcagagtgtgaagaggggtggtgagggacacaattgttcccctgcctgcgcccaggcttcctgacctcctgatcctggctgggaagttagggcaggcagagcgagcaattctgggcaggggagctggagggcagaagggtatcatcgtttctcatctcctcctccctcctcttctccagtggatgttgagggagctaacagggctggcatctggggcatgaactgggatggggcaggtgggcgttagggaagctggtatcaaatggtgaccttggtggagtctcctatgtgaagagtaccctccctctccacccccagtccccatatcctggttctggcccaaggaaaatgtccattctatgaccttctcttttcctctcctctcacttctgcagctattctcacacatctaacctctaggcaacatgcactaaattcaaaagcaaggagaagcccttgccccccatcagtccaccagccctagaacctcccttgcctcaacagtcacctaataaagcccacctccatggaaaaaaaaaaaaaaaaaa

SEQ ID NO: 1069 - DNA, 2009 bp, Homo sapiens
  misc_feature (2003)..(2003): n equals a,t,g, or c
aattcggcacgaggggtggctgagcgcgcggggaaatggtgagattggcaccgtgtcggagataggggcgtctgggggtggggtcccgggtctgctcaggagctggggcatgggcacttggaacggggattgctctcccgcccccactattgtacggacgacaacgcggaggcctagcattctctcccagcctagaaactgatccctagtcagccttctaccatctgttgaatgggaagcttagaccgtgatcgggccgcgacgccccgcttccattagtgcgccgaaatagagggtcacttcgtcagctgagacctcccttttytccaggccacggggacagaccaggtggtgggactcggcctcgtcgccgttagcctgatcatcttcacctactacaccgcctgggtgattctcttggtatgtcattctccccgtccgctgctcaccttccccgagccctggcaccgccagagcaactactatataggctctaggcacggcgctggcttcattgcctgcctcatctcttgaactctccagaacaactctatgaggaagatgccagtggtaccgcattttatagatgagatagctgaggctaggggagaaggatctggcccaagattgcatccttagccgctacacttataactctgtttccggcttgctttgacttttgggggagttctgttccttctgggttagcctgctgactcttaggcatggcaaacgccagtgatatttgtgaaggcctttaggatatttttttcttgtgggaaaacttgttggttattgcttaagaagtgcagtgtgtctggaagtgcagaacttggtatcctttagagaaaaaatattagtgaagaagccctggaggcccaggttgggagtcagtcgaggattcctcaagtaccatttgctaggctgtgaggtgccttagggcaggtctcttgtgccctgttctcttgtccccaccaccaacctatagcaggcaccaaagcaagtgcccggtaaataccaataagaaattaaggaaagaaacaaaccacgacacccaaatgccgtaatcttaaagaaaagcaaatgcagtcccagtcctctgaatgggtcagccccttagatggaggaggtgggacgtttgggcttgggggctcggcaaggcaagcaagacacaccagagctcttccctcgatgccagccattcatcgacagtcagcatgtcatccacaagtatttcctgccccgagcctatgctgtcgccatcccactggctgcaggctcctgctgctcctgtttgtgggactgttcatctcctacgtgatgctgaagagcaagagagtgaccaagaaggctcagtgaaggtcccgcagatgaggctgccagccccttctctgcttcccctccagcacagggaccaagtgggggagcctgcagaacctgtccaggcacagtggctcctcaagcctgcctgtcctgcagagtccccatggcatggagcttacacctgactgactggagccccctccccgactcccacttccagaagctaggagggagggatacctggaagactccggtcacctccttcttgctcagggcctaaaagatgctggtcctcccaacctcactctcagactccctgccaccttttcccctgggttctgccgtcttgcctcacttcccctcctgtcacatgctgacgttggacttagcaggttctaaggccacatgtgtgacctctctgacttctcttcctccaccaaggcagctttccttaccctgacacagccccagaccccacaaagccttctggacctggaaagcctggggaaggactgacagaccccaggaccagccctggggctcagggcagccaccccgggccgctgaccgactgacctctcctcacggaggcccagccccaaagccccagggctggcccgtttgggacagctgaccaataaacactgatggtgtgttaaaaaaaaaaaaaaaaagtcccntttatc

SEQ ID NO: 1070 - DNA, 1332 bp, Homo sapiens
gccatggagctctggaagctgggctgggggaggaagcctggtggctctgacctcccctggaggcgaaggaggcccagccatgacactcttaacggatgccacgccgctggtgaaggagccccatcccctgcctctggtcccacgtccctggttcctccctagcctctttgctgccttcaatgtggtgctgctggtctttttcagtggcctcttcttcgcattcccttgmaggtggctggctmagaacggggagtgggcctttcctgktatcacaggctccctctttgtccttaccttcttcagtcttgkttcactcaacttctcagaccctggcatcttacatcaaggctccgctgagcagggccccttgacggtgcacgtggtgtgggtgaaccacggggccttccgcctgcaatggtgtccaaagtgctgcttccaccgcccgccccggacttaccactgcccctggtgcaacatctgtgtggaggactttgaccaccactgcaagtgggtcaataactgcatcggtcaccgcaacttccgcttcttcatgctgcttgtcctgtccctgtgcctctactcgggcgccatgctggtcacctgtctcatcttcctggtgcgcacaacccacctgcccttctccaccgacaaggccatcgccatcgtggtggccgtgtccgccgcgggcctcctggtgccgctgtccctcctgctgctgatccaggcactgtccgtgagctcggccgaccgcacctacaagggcaagtgcagacaccttcagggatacaaccccttcgaccagggctgtgccagcaactggtatttaacaatttgtgcaccactgggacccaagtacatggctgaagctgtccagctgcagagagtggtggggcctgactggacatccatgccgaatctgcaccctccaatgtccccctctgctctcaaccccccagccccaacctctgggtccctacaaagcagggaagggacccccggggcgtggtgaggctgcagctctccaggagttccacacgggcccagtgctgcccctgctgctgcaggagcccccaggckaggttcggccttcctctcgcccctgtgcacccggagatgcccacagcaccagcacctgagctcacctccgaacccgcctcctgaacccgcctcctgaacctgcctccttacctcccacttcctgagccctgagtggaagcctttctgtgccttgccctttgcccactcccctggtgggactgccaagaccctcaatgcccattaaatactcttgcctgcctcttaaaaaaaaaaaaaaaaaaaaaaaaaaaaaaa

SEQ ID NO: 1071 - DNA, 1460 bp, Homo sapiens; identical to SEQ ID NO: 666

SEQ ID NO: 1072 - DNA, 504 bp, Homo sapiens
cggcacgagatctaacaatccctggggagccggagaccggtgactgccgccctgcccgcaggccatgtggcccccgctgttgctgctgctgctgctgctcccggccgccccggtccccaccgccaaagccgctccccacccggatgctaacacccaggaaggccttcagaacctgctccaaggagtcggggctggcggagacggagagctgcgggcagactcacacctggccccgggctctggctgtattgatggggctgtggtggccacgcgaccagaaagccggggaggaagacctgcggttccgtgagaggcgtccagggctgcaggccacggcgacaggctccggggaacatggggctttccctgtccactcccaaggagtgtgggcctcaacgcattggcaggggacggccgtgtgccctctccagaccccacccccagatgcatttattagaaataataaagttctttcttagctaaaaaaaaaaaaaaaaaaaaaaa

SEQ ID NO: 1073 - DNA, 702 bp, Homo sapiens
atcagaggttgtcagactgccctatcctctccaaatgaaatcttcaggtccaccttcttactttattaaaagggaatcgtggggctggacagactttctaatgaacccaatggttatgatgatggttcttcctttattgatatttgtgcttctgcctaaagtggtcaacacaagtgatcctgacatgagacgggaaatggagcagtcaatgaatatgctgaattccaaccatgagttgcctgatgtttctgagttcatgacaagactcttctcttcaaaatcatctggcaaatctagcagcggcagcagtaaaacaggcaaaagtggggctggcaaaaggaggtagtcaggccgtccagagctggcatttgcacaaacacggcaacactgggtggcatccaagtcttggaaaaccgtgtgaagcaactactataaacttgagtcatcccgacgttgatctcttacaactgtgtatgttaactttttagcacatgttttgtacttggtacacgagaaaacccagctttcatcttttgtctgtatgaggtcaatattgatgtcactgaattaattacagtgtcctatagaaaatgccattaataaattatatgaactactatacattatgtatattaattaaaacatcttaatccagaaaaaaaaaaaaaaaaaaaaaaaaaaaaaaaaaaaaaaaaaaaaaaa

SEQ ID NO: 1074 - DNA, 882 bp, Homo sapiens
ggcacgagtgggaatctcaccatggcctggacccctctcctgctccccctcctcactttctgcacagtctctgtggcctcctatgagctgacacagccaccctcggtgtcagtgtccccaggacaaacggccaggatcacctgctctggagatgaattgccaaaaacatatgctttttggtaccagcagaagtcaggccaggcccctgtgctggtcatctatgcggacaacaaacgaccctcccggatccctgagagattctctggctccagctcagggacagtggccaccttgactatcagtggggcccaggtggaggatgcggctgactactactgttactcaacagacagcagtggtaatcatggggtcttcggaactgggaccaaggtcaccgtcctaggtcagcccaaggccaaccccactgtcactctgttcccgccctcctctgaggagctccaagccaacaaggccacactagtgtgtctgatcagtgacttctacccgggagctgtgacagtggcctggaaggcagatggcagccccgtcaaggcgggagtggagaccaccaaaccctccaaacagagcaacaacaagtacgcggccagcagctacctgagcctgacgcccgagcagtggaagtcccacagaagctacagctgccaggtcacgcatgaagggagcaccgtggagaagacagtggcccctacagaatgttcataggttcccaactctaaccccacccacgggagcctggagctgcaggatcccaggggaggggtctctctccccatcccaagtcatccagcccttctccctgcactcatgaaaccccaataaatatcctcattgacaaccaaaaaaaaaaaaaaaaaaaaaaaa

SEQ ID NO: 1075 - DNA, 1209 bp, Homo sapiens
ggtcgacccacgcgtccggaccactcagacaccgtgtcctcttgcctgggagaggggaagcagatctgaggacatctctgtgccaggccagaaaccgcccacctgcagttccttctccgggatggacgtggggcccagctccctgccccaccttgggctgaagctgctgctgctcctgctgctgctgcccctcaggggccaagccaacacaggctgctacgggatcccagggatgcccggcctgcccggggcaccagggaaggatgggtacgacggactgccggggcccaagggggagccaggaatcccagccattcccgggatccgaggacccaaagggcagaagggagaacccggcttacccggccatcctgggaaaaatggccccatgggaccccctgggatgccaggggtgcccggccccatgggcatccctggagagccaggtgaggagggcagatacaagcagaaattccagtcagtgttcacggtcactcggcagacccaccagccccctgcacccaacagcctgatcagattcaacgcggtcctcaccaacccgcagggagattatgacacgagcactggcaagttcacctgcaaagtccccggcctctactactttgtctaccacgcgtcgcatacagccaacctgtgcgtgctgctgtaccgcagcggcgtcaaagtggtcaccttctgtggccacacgtccaaaaccaatcaggtcaactcgggcggtgtgctgctgaggttgcaggtgggcgaggaggtgtggctggctgtcaatgactactacgacatggtgggcatccagggctctgacagcgtcttctccggcttcctgctcttccccgactagggcgggcagatgcgctcgagccccacgggccttccacctccctcagcttcctgcatggacccaccttactggccagtctgcatccttgcctagaccattctccccaccagatggacttctcctccagggagcccaccctgacccacccccactgcaccccctccccatgggttctctccttcctctgaacttctttaggagtcactgcttgtgtggttcctgggacacttaaccaatgccttctggtactgccattctttttttttttttttttcaagtattggaaggggtggggagatatataaataaatcatgaaatcaatacaaaaaaaaaaaaaaagggcggccgc

SEQ ID NO: 1076 - DNA, 492 bp, Homo sapiens
cggctgctgttggttgggggccgtcccgctcctaaggcaggaagatggtggccgcaaagaagacgaaaaagtcgctggagtcgatcaactctaggctccaactcgttatgaaaagtgggaagtacgtcctggggtacaagcagactctgaagatgatcagacaaggcaaagcgaaattggtcattctcgctaacaactgcccagctttgaggaaatctgaaatagagtactatgctatgttggctaaaactggtgtccatcactacagtggcaataatattgaactgggcacagcatgcggaaaatactacagagtgtgcacactggctatcattgatccaggtgactctgacatcattagaagcatgccagaacagactggtgaaaagtaaaccttttcacctacaaaatttcacctgcaaaccttaaacctgcaaaattttcctttaataaaatttgcttgttttaaaaacaaaaaaaaaaaaaaaaaaa

SEQ ID NO: 1077 - DNA, 2065 bp, Homo sapiens
  misc_feature (961)..(961): n equals a,t,g, or c
  misc_feature (964)..(964): n equals a,t,g, or c
aggtttttcttttatagatttatgttttccatcattattcttttctcctattatgttcatgctatatcgctttcctataaatgcatattaggcctcatactttcctctgggtatcattttggctaaatcacgggttgcacaggtggtactctatggctctgctttacatactcatattttctgactttctttttgacaggaataatttagaagtattttgtttgatcttaaaatttctacgtcagcttattttaattgtccattattactatttctaagaaactgttcattgttattttccagcattattgcattgtgatctgtgaatatggcctgtgtaaattctgttttgcaatttgttagtaatttctgtatgatcctatatatggcctatttagaggatagtatttgaaaagaatgaggacaaaattctgtctgctaacctgaaggttgttagtcatatcatatcctttacttattttctgactatttaatctgttaattttcagaggaaattaatgatcactgtgattgtgattttgtcagttttttcttcaatttctatgcattttttgctttgtatttcacgtgtgtagargtccagtggtttatcttcctggtggcttctttttttttttaatcagtgtgaaatatgtcccactttgtgtatacctcagtggcctttgcttttcttatttggttttctgtaacattgttatacctccgttcattttgttagcatatacctggtattawtcyctacatttatgcatgtgtgaatgaatgacaaggtccccctctgtcayctaggctggattgcagtagcatgctcatagcttactgcagcctcaaactcctggctcaagcaatcctcctgcctcagcctctcaagtagctgagactacaggcacacgccatcacactcagctaatctacttttatttttaacttttatcatttngtnttagatatgtgacttatgaagaatacttagctgtttttttaacccagtctgaktcttttaataggtgcactttgtagtttaagtctcaataaactactgatacgcttaagcttttcctgccytcttatttttttcctattaaacgtgaattgtaatttgttcttttttgcttgtcctgtcttttattgaactgatttgaaatgtcttggttccattttattattttctcctaatggtttggaacctttatgcaaattgcatttgtaaagggtttaaagggtacatctaggaaattttaccaaacatgcagttggggattaaaggttggagcttgaaaaggaattggtagtggggatatagtttttatttctttttctttttctttcttttttttggttttctgggatatgagagagaggaaatagcttttaaactgtcatcttgttgatggaagtcatggtagtgtttgctattactgaggaaaatcacagagaacaaacactattgcctagcacaatgccaggtacataagtattcagtgaatgttttatgaatgcttaaataaatagagaagagaaaggactaagtgtggaatcaggggtaacagtgacattgaaagaggggaggamaaactagcaaragagagaaggagtagcttacaagacagaaggtaaacttagagtggtatctccaacaccatagaggagagaatttcataaaggagatgatagaaaacagtgctacatgctacagagagattaggtagcatgacaactgcaagtgagcctttggacagacccttgggtctggtgactggtggccttaggagagagtgtttagatagtagtactagaagttgagtgttgggattaaatgtagaggcagatgaaaaataagggcctttcttctatgaaattattcagggaaaactaaaaagaaaattggacatatctacaaggagatgtgagccaggagaatcgcttgaacctgggaggcagaggatgctgtgagccgagatcgcgccattgcactccagcctgggcaacaagagtaaatctctgtctcaccaaaaaaaaaaaaaaaaaaaaaaaaaaactcgta

SEQ ID NO: 1078 - DNA, 2575 bp, Homo sapiens
acacactgatagcttatagtgatttaggatactacattatcaataaactgcaccatgtggacgagtcggtggggagcaagacgagaagggccttcctgtacctcgccgcctttcctttcatggacgcaatggcatggacccatgctggcattctcttaaaacacaaatacagtttcctggtgggatgtgcctcaatctcagatgtcatagctcaggttgtttttgtagccattttgcttcacagtcacctggaatgccgggagcccctgctcatcccgatcctctccttgtacatgggcgcacttgtgcgctgcaccaccctgtgcctgggctactacaagaacattcacgacatcatccctgacagaagtggcccggagctggggggagatgcaacaataagaaagatgctgagcttctggtggcctttggctctaattctggccacacagagaatcagtcggcctattgtcaacctctttgtttcccgggaccttggtggcagttctgcagccacagaggcagtggcgattttgacagccacataccctgtgggtcacatgccatacggctggttgacggaaatccgtgctgtgtatcctgctttcgacaagaataaccccagcaacaaactggtgagcacgagcaacacagtcacggcagcccacatcaagaagttcaccttcgtctgcatggctctgtcactcacgctctgtttcgtgatgttttggacacccaacgtgtctgagaaaatcttgatagacatcatcggagtggactttgcctttgcagaactctgtgttgttcctttgcggatcttctccttcttcccagttccagtcacagtgagggcgcatctcaccgggtggctgatgacactgaagaaaaccttcgtccttgcccccagctctgtgctgcgaatcatcgtcctcatcgccagcctcgtggtcctaccctacctgggggtgcacggtgcgaccctgggcgtgggctccctcctggcgggctttgtgggagaatccaccatggtcgccatcgctgcgtgctatgtctaccggaagcagaaaaagaagatggagaatgagtcggccacggagggggaagactctgccatgacagacatgcctccgacagaggaggtgacagacatcgtggaaatgagagaggagaatgaataaggcacgggacgccatgggcactgcagggacagtcagtcaggatgacacttcggcatcatctcttccctctcccatcgtattttgttcccttttttttgttttgttttggtaatgaaagaggccttgatttaaaggtttcgtgtcaattctctagcatactgggtatgctcacactgacggggggacctagtgaatggtctttactgttgctatgtaaaaacaaacgaaacaactgacttcatacccctgcctcacgaaaacccaaaagacacagctgcctcacggttgacgttgtgtcctcctcccctggacaatctcctcttggaaccaaaggactgcagctgtgccatcgcgcctcggtcaccctgcacagcagcccacagactctcctgtcccccttcatcgctcttaagaatcaacaggttaaaactcggcttcctttgatttgcttcccagtcacatggccgtacaaagagatggagccccggtggcctcttaaatttcccttccgccacggagttcgaaaccatctactccacacatgcaggaggcgggtggcacgctgcagcccggagtccccgttcacactgaggaacggagacctgtgaccacagcaggctgacagatggacagaatctcccgtagaaaggtttggtttgaaatgccccgggggcagcaaactgacatggttgaatgatagcatttcactctgcgttctcctagatctgagcaagctgtcagttctcacccccaccgtgtatatacatgagctaacttttttaaattgtcacaaaagcgcatctccagattccagaccctgccgcatgacttttcctgaaggcttgcttttccctcgcctttcctgaaggtcgcattagagcgagtcacatggagcatcctaactttgcattttagtttttacagtgaactgaagctttaagtctcatccagcattctaatgccaggttgctgtagggtaacttttgaagtagatatattacctggttctgctatccttagtcataactctgcggtacaggtaattgagaatgtactacggtacttccctcccacaccatacgataaagcaagacattttataacgataccagagtcactatgtgggtcctccctgaaataacgcattcgaaatccatgcagtgcagtatatttttctaagttttggaaagcaggttttttcctttaaaaaaattatagacacggttcactaaattgatttagtcagaattcctagactgaaagaacctaaacaaaaaaatattttaaagatataaatatatgctgtatatgttatgtaatttattttaggctataatacatttcctattttcgcattttcaataaaatgtctctaatacaaaaaaaaaaaaaaaaaa

SEQ ID NO: 1079 - DNA, 1722 bp, Homo sapiens
ggcacgagcggaggcggcacacccaggggggacgccaagggagcaggacggagccatggaccccgccaggaaagcaggtgcccaggccatgatctggactgcaggctggctgctgctgctgctgcttcgcggaggagcgcaggccctggagtgctacagctgcgtgcagaaagcagatgacggatgctccccgaacaagatgaagacagtgaagtgcgcgccgggcgtggacgtctgcaccgaggccgtgggggcggtggagaccatccacggacaattctcgctggcagtgcggggttgcggttcgggactccccggcaagaatgaccgcggcctggatcttcacgggcttctggcgttcatccagctgcagcaatgcgctcaggatcgctgcaacgccaagctcaacctcacctcgcgggcgctcgacccggcaggtaatgagagtgcatacccgcccaacggcgtggagtgctacagctgtgtgggcctgagccgggaggcgtgccagggtacatcgccgccggtcgtgagctgctacaacgccagcgatcatgtctacaagggctgcttcgacggcaacgtcaccttgacggcagctaatgtgactgtgtccttgcctgtccggggctgtgtccaggatgaattctgcactcgggatggagtaacaggcccagggttcacgctcagtggctcctgttgccaggggtcccgctgtaactctgacctccgcaacaagacctacttctcccctcgaatcccaccccttgtccggctgccccctccagagcccacgactgtggcctcaaccacatctgtcaccacttctacctcggccccagtgagacccacatccaccaccaaacccatgccagcgccaaccagtcagactccgagacagggagtagaacacgaggcctcccgggatgaggagcccaggttgactggaggcgccgctggccaccaggaccgcagcaattcagggcagtatcctgcaaaaggggggccccagcagccccataataaaggctgtgtggctcccacagctggattggcagcccttctgttggccgtggctgctggtgtcctactgtgagcttctccacctggaaatttccctctcacctacttctctggccctgggtacccctcttctcatcacttcctgttcccaccactggactgggctggcccagcccctgtttttccaacattccccagtatccccagcttctgctgcgctggtttgcggctttgggaaataaaataccgttgtatatattctgccaggggtgttctagctttttgaggacagctcctgtatccttctcatccttgtctctccgcttgtcctcttgtgatgttaggacagagtgagagaagtcagctgtcacggggaaggtgagagagaggatgctaagcttcctactcactttctcctagccagcctggactttggagcgtggggtgggtgggacaatggctccccactctaagcactgcctcccctactccccgcatctttggggaatcggttccccatatgtcttccttactagactgtgagctcctcgagggcagggaccgtgccttatgtctgtgtgtgatcagtttctggcacataaatgcctcaataaagatttaattactttgtaaaaaaaaaaaaaaaaaaaaaaaaaaaaaaaaaaaaaaaaaaaaaaaaaaaaaaaaaaaaaaaaaaaa

SEQ ID NO: 1080 - DNA, 548 bp, Homo sapiens
  misc_feature (536)..(536): n equals a,t,g, or c
gtctgtgtcttttaacgggggcatttagcctgtttacatttaaggttaatattgttatgtgtgagtttgatcctgtcattatgatgctagctggttattttgcccgttagttgatgcagattcttcataatgtcaatggcctttacaatttggtatgtttttgcagtggctggtactgctttttcctttttgtatttagtgcttccttcagaagatcttgtaaggcaggactggtggtgacaaaatctttcagcatttgcttttctgtgaaggattttatttctccttcacttatgaagcttagtttggctggmtmtgaaattctgggttgaaaattcttttctttaagaatgttgtgccaggcaccgtggctcatgtgtgtaatcccagcactttgggaggctgaggctggcagatcacctgaggtcaggagttcaagaccagcctgaccaacatgggaaaactccatctctactaaaaatacaaaattagccagctgtggtggcacatgcctgtaatcccaactacttgggagnctgaggcaggag

SEQ ID NO: 1081 - DNA, 1980 bp, Homo sapiens
ggcacgaggagaaatttgcaatatgtctcagtggaaaagagtaaagagaaacccatgttatggtacccagataaatgtcttgatcttctcttattaaaacacattacctgaagtagaaatgagctagtatcccactagtacgtggccccgccatacctgccccacgcatacactactttgagatctggcaacctaattacagtgccagtgggtgattggcccatatttctcacagtctgtatagcaacagcaagattgatgatgataacaggaagactttagaaaccctgcctctttcttctcaccacatttcccgaacactgacatcccaagtctccctgkttaccccatttcacactagttagaacaggcattgtcctaagttctctcaccatcatatgtaagatggatgatactcacatgggtgkctgggcttargtgtaattctatcacctgtaactccatccctttttcttgcattttagaaggcatattaactttcagtctgttacagttgcttttattaaattattcacaaattttggcacttcattattagtgaccaactgttgttcaagtgatctagccccaccatagttgagaactcctgatttggggcatctgacataactatggtacttgtcctgaatcccccttctcttcttcattttctacaccactgataggattctccttcattcaaaacacatgttaagcactcagaaatgtaaagataaataaggctcagtcctggccccttaaagacagaatcttaattcacattaagggagacacacataaaataaccattctgtatgacttggkgtaatggtgcaaagaacagattgtcatgggatttgaggagattctaatctatgaattcaaagctatgatgttggcatcaggcctttttatgtgagtagcaaaggaagaaggcattccaggcagagagaaaaagatgaataatagtgtgaatgggcagagtctgagaactgggacaccttgactttctctagaatgtagggtgtgtggagccattaatggggatggagatgaggatggggtttggkcagatggttcaaggccttaaagagggtctcagggatttggtcctctatcctgtaggcaaagggaagstttgaataggcttttagcagtctgttgacttgatggaagagggtgggttggggctgctggaggaatggggtggagagagcctggaagktgagagacctgtcgggacacttggactgacccaggctgcaggtgagagaaatcagaagcccctcagcaggttggaaactagatatcttctttgtctttgtgttatcaggaccagcaccaggtgcctgacacacagtttgtgctcagtaaatagtagttgaacttaattaacccaattgactgtggaaagtaaagacagaggaaggaaaaaaatggcttcaccatgtttagcttgactagacacatgacttgcagtcacaagttgtcctgtgaataaagccattatgtggtaccaaaaaaaaaatgatgtttatcttgagataacaaatataggaagggcagtttgcgttattggagagtgggataaaatgtgttagtcttgaaaaggtctgatttggattgctggtgaaaggtgtccagtcaagatgtttaggagagagccggagacaaacctgggctstcaagtcagatctgyctcttgggcatggattaatttgggagttgtaccttttagtatctatccttattctttctctattagcaaagcttctcagcttcctatacctgaagccccatcctgccctactcagaagataaataggttcactgtgggacagggcctctgccagtgaagcagcttctgtctcaagacgtcaaaactttgacttgtcttaagatagctttatgtgcaaagttgtttgagcatgcaaacccattataaactgtcttattaaaaaaaaaaaaaaaaaactcgag

SEQ ID NO: 1082 - DNA, 2799 bp, Homo sapiens; identical to SEQ ID NO: 296

SEQ ID NO: 1083 - DNA, 1375 bp, Homo sapiens
ggcacgagtggctatatatttcttcacttgcaattgcctcatggggttcttataaggctgaaatccaataacggatacaaaaatactttaaaaagtaggcatggatttctactgacagccatgagagagtttctagaactagacctggatggccccaaacaactagaaaattggacaaaagatataaaaaaaaaactgttttcaaccattggacagtagtcagcataggactcttatctttgagagaaggggcaaaaacaagatgatccctataagcttccttaatttcttttttttctttttttgagacgctgtctccaaaacaaaacaaaagaataggacaatctcgtatttcctctatctagactcaacaattcttaatatttgctttatccctgtctttctacacatgcatacacatacacacacacaggcatacataattgcatatttacagggtgtttttgctgatctatttgaaagtaagtttcagacattatgacacctactcctaattcctcatgttttttctaagaataaggatattatcttacctaacatatcttttatcaaacctacaaaaattaacaattttatatctaatattagttcatgtttaggttttgcctgttttcccccaaatgtcttttacagtacatgtttttaaaaccaggatctaaggagttcacagattatatttggttattatgtctctttagtgtcttttggcatccttgggttttctacttttatcccccatgacactgactattggaagagtccagaccaattttctatttgattgcttccttgtgtgtatcatttaatttgttcctctatctcatgtgtttcttgtaaactgaaagttaggtgtagagattgagtctaaatatttttggcaagtatatgtcgtaggtaacatttgtgctttatactgcatcatattgggagataaataatattatattgccatctctgttagtgcagccattagaaagacattgtgcctatgtctgtctctttgctgtgtttggtatctgttgagagccatatttttataaaaatcttaaagcattgtcctctgtgaagaaaatatattagaaaaattacacttgacagtataagaattgttgatttgaataaatacatgatttttagaagacatatgtatgaccagcaggaatagtagcctaataggcctttgtttgggacagaatacacttcagatcatccagaaatctaaaatcaggcctgtgtgcctttgactggtatcttccatgtggtgttgaagagtttgagaatttaaaagaaaatgaattaatactaagcaagacacacttttttctttgttccttaaaaaaaaaaaaaaaaaaaa

SEQ ID NO: 1084 - DNA, 1899 bp, Homo sapiens
ggcacgagtaaacatggagattattttaatacttctgatattaatggactagcttgttgcagaccactgctccctctgagaactattagaaaagctagacataatatccaaaacagccgcttgaaggcattggaagctagtgaggtagtaaggacttgagaggcttagaatccatagaggagggaagcatagagataagcctgacatttggcattgcttttaccctcaaagcatttgctgatttgcaagtagtggcaaagaaactgagcacaaaagaatggctgagcagcgaagacactgagttgagattgcagcaatcttaacaggtctaaaggaacaaaaaccgaaatctggggacaaccaaagaggaggggccttgataaacacctcaggctttcagttgggactcactctctgagagtttcaacctagtaggaagagtgtaatacacacagatcagccttacaaagactgaaacccagcctccagtccgctcaatcccttcttggatgaaggtgatctgcctcttccttactacttgccaaaagcaaatgtatgccttctcctatatcacatcactctgaacctcaaattatttcttcaagttttcatacccagttatcaagcatacgaagagacatgactacatgaccaaaaatcaaaaggaaaaatatgataagaagagacccatggaagatacagattttggaaagatcaaagacaaacttttacaataactataattagtgaacaagatggagaatttcatcagagaactaaaattgttttttaaaaaagcagcaaattaaattctaaaactgaaaagtacattaactaaaatttaaagctaagtaaatgaataaaacttcaacagatggatttaacagcaggtttaccataactgaagagagcattggtaaattggaaaatagaagaaaatattcaggctaaatcacagagagaacaagggtggaatacacaagaaagaaggtaagacatgtaggagacagtagaaaggtctaattgtataagccctaggaggagagacaagtgagtgtggctgagaatcttctaaaaccaatcaaagatatcgaaccacagattcagaagtactgtgaaccctatgcagtgtaaacagcaagtctggcatgtttaaatgacaagaccagcctggctgtggcgtgggaaacagagaggcaaagttcttggtagtgggattggacgcagtagatcaggccgggccttatgaagagtttagatctaattataattgtaagtattggaggattttaataaggagagacatcatcttctgtaagatcacttttgctgctgtgttagatgaatcacagagaccacttaggtggtttgtgttagttgaagggagaagtgcttatgttttgaatagagttaaaacacataagtggtcattattgtgcagccagttatccaactaaaaatagaggattctgttactatggagtgggggatatggatgattgggatatgactagcattctttctacagagattgaatgaaggaatagatccagcaaacgagagtgaggagttgccagtgaagtaggaataaaaccaggcaattgtggtgccatggaagtttagcgaagaaaatgatgcaacaaaggaggtggagtggccaagtgtgtcacctactactgagatgttgaataagatgaagatcgggagcctttggctttaacaaaatgaagatcattggtaatctgaagagctattataaagggccgagtacagtggttcacacctgtaatcccagcaatttgggaggccgaggaatgaggactgcttaaggccggaagtttgagacaaaactaggcaacatggcaagaccccacctctccaaaaaaaaaaaaaaaaaaa

SEQ ID NO: 1085 - DNA, 1448 bp, Homo sapiens
ctgcgcaggttctggattcgcctttagtgactacgctctgcagtgggtccgccaggctccaggcaagggactggagtgggtggcctttatctcatatgaaggaaataataaacaatatgaagactccgtcaagggtcgattctccatctccagagacaattccaacaactccgtgtttctggagatgaacagtctgaaaagtgaggacacggctgtctattactgtgtgagagatagatctggtcgtgggaccgactactttgactactggggccggggaaccctggtcaccgtctcctcggcctccaccaagggcccatcggtcttccccctggcaccctcctccaagagcacctctgggggcacagcggccctgggctgcctggtcaaggactacttccccgaaccggtgacggtgtcgtggaactcaggcgccctgaccagcggcgtgcacaccttcccggctgtcctacagtcctcaggactctactccctcagcagcgtggtgaccgtgccctccagcagcttgggcacccagacctacatctgcaacgtgaatcacaagcccagcaacaccaaggtggacaagaaagttgagcccaaatcttgtgacaaaactcacacatgcccaccgtgcccagcacctgaactcctggggggaccgtcagtcttcctcttccccccaaaacccaaggacaccctcatgatctcccggacccctgaggtcacatgcgtggtggtggacgtgagccacgaagaccctgaggtcaagttcaactggtacgtggacggcgtggaggtgcataatgccaagacaaagccgcgggaggagcagtacaacagcacgtaccgtgtggtcagcgtcctcaccgtcctgcaccaggactggctgaatggcaaggagtacaagtgcaaggtctccaacaaagccctcccagcccccatcgagaaaaccatctccaaagccaaagggcagccccgagaaccacaggtgtacaccctgcccccatcccgggatgagctgaccaagaaccaggtcagcctgacctgcctggtcaaaggcttctatcccagcgacatcgccgtggagtgggagagcaatgggcagccggagaacaactacaagaccacgcctcccgtgctggactccgacggctccttcttcctctacagcaagctcaccgtggacaagagcaggtggcagcaggggaacgtcttctcatgctccgtgatgcatgaggctctgcacaaccactacacgcagaagagcctctccctgtctccgggtaaatgagtgcgacggccggcaagcccccgctccccgggctctcgcggtcgcacgaggatgcttggcacgtaccccctgtacatacttcccgggcgcccagcatggaaataaagcacccagcgctgccctgggcccctgcgaaaaaaaaaaaaaaaaaaaa

SEQ ID NO: 1086 - DNA, 517 bp, Homo sapiens
  misc_feature (381)..(381): n equals a,t,g, or c
ggtgtagtagttagagactgaaaataaattcctttgataataaggtgtgtagattgtggaggctcagactgaaacagggtgttcaccaggtacagtataaattgctggcacctttgtgcattgaagcagttgggaaacatgtgaatttttatatatcacccactaaatggtctgtgcttctggttatgtgtttgcttctgtgtatcctgcacataccaggcctgtattcttttctttctttcttttttttttttttctgagatggagtcaaacttgctctgtcaaccaggctggagtgcagtgcagtggcacggatctcagctcactgcaacctccccctactgggttcaagcgattctcctgcctcagctacttggggangcagaagcaagaaaattgcttgaacctgggaggcagaggttgtggtgagccgagattgtgctattgcactccagcctgggcaacaagagcaaaactccgtctccgaaaacaaaaacaaaacaaaacaaaaatggtc

SEQ ID NO: 1087 - DNA, 1603 bp, Homo sapiens
cacgcgtccggaaagacagtaatagttcttctgggtctttcaatggcaacagcaccaataatagcatccaaacaattgactctacccaggctctgttccttccaattggagcatctgtctctcttttagtaatgttcttcttctttgactcagttcaagtagtttttacaatatgtacagcagttcttgcaacgatagcttttgcttttcttctcctcccgatgtgccagtatttaacaagaccctgctcacctcagaacaagatttcctttggttgctgtggacgtttcactgctgctgagttgctgtcattctctctgtctgtcatgctcgtcctcatctgggttctcactggccattggcttctcatggatgcactggccatgggcctctgtgtcgccatgatcgcctttgtccgcctgccgagcctcaaggtctcctgcctgcttctctcagggcttctcatctatgatgtcttttgggtatttttctcagcctacatcttcaatagcaacgtcatggtgaaggtggccactcagccggctgacaatccccttgacgttctatcccggaagctccacctggggcccaatgttgggcgtgatgttcctcgcctgtctctgcctggaaaactggtcttcccaagctccactggcagccacttctccatgttgggcatcggagacatcgttatgcctggtctcctactatgctttgtccttcgctatgacaactacaaaaagcaagccagtggggactcctgtggggcccctggacctgccaacatctccgggcgcatgcagaaggtctcctactttcactgcaccctcatcggatactttgtaggcctgctcactgctactgtggcgtctcgcattcaccgggccgcccagcccgcccttctctatttggtgccatttactttattgccactcctcacgatggcctatttaaagggcgacctccggcggatgtggtctgagcctttccactccaagtccagcagctcccgattcctggaagtatgatggatcacgtggaaagtgaccagatggccgtcatagtccttttctctcaactcatggtttgtttcctcttagagctggcctggtactcagaaatgtacctgtgtttaaggaactgccgtgtgactggatttggcatttaaagggagctcgtttgcaggagagaggtgctggagccctgtttggttccttctcttcctgcggatgtagaggtggggccccttccaagagggacaggcctctccccagcgcgccttcctcccacgtttttatggatctgcaccagactgttaccttctgggggagatggagatttgactgtttaaaaactgaaaacagcgaggagtctttctagaacttttgaacactaaaaggatgaaaaaaattagcaaaccgaagtttcttcaatgacccctcgagaactttgggaccagtttcctatgggggactcagtttcagagaactgagacagaagctcttctgtcgttatattcttctttcctttttttggatttattaaatattttctgtggtgaaaaaaaaaaaaaaaaaaaaaaaaaaaaaaaaaaaaaaaaaaa

SEQ ID NO: 1088 - DNA, 1544 bp, Homo sapiens
  misc_feature (1496)..(1496): n equals a,t,g, or c
  misc_feature (1502)..(1502): n equals a,t,g, or c
  misc_feature (1511)..(1511): n equals a,t,g, or c
  misc_feature (1538)..(1538): n equals a,t,g, or c
tctgactgactataaaagaatagagaaggaagggcttcagtgaccggctgcctggctgacttacagcagtcagactctgacaggatcatggctatgatggaggtccaggggggacccagcctgggacagacctgcgtgctgatcgtgatcttcacagtgctcctgcagtctctctgtgtggctgtaacttacgtgtactttaccaacgagctgaagcagatgcaggacaagtactccaaaagtggcattgcttgtttcttaaaagaagatgacagttattgggaccccaatgacgaagagagtatgaacagcccctgctggcaagtcaagtggcaactccgtcagctcgttagaaagatgattttgagaacctctgaggaaaccatttctacagttcaagaaaagcaacaaaatatttctcccctagtgagagaaagaggtcctcagagagtagcagctcacataactgggaccagaggaagaagcaacacattgtcttctccaaactccaagaatgaaaaggctctgggccgcaaaataaactcctgggaatcatcaaggagtgggcattcattcctgagcaacttgcacttgaggaatggtgaactggtcatccatgaaaaagggttttactacatctattcccaaacatactttcgatttcaggaggaaataaaagaaaacacaaagaacgacaaacaaatggtccaatatatttacaaatacacaagttatcctgaccctatattgttgatgaaaagtgctagaaatagttgttggtctaaagatgcagaatatggactctattccatctatcaagggggaatatttgagcttaaggaaaatgacagaatttttgtttctgtaacaaatgagcacttgatagacatggaccatgaagccagttttttcggggcctttttagttggctaactgacctggaaagaaaaagcaataacctcaaagtgactattcagttttcaggatgatacactatgaagatgtttcaaaaaatctgaccaaaacaaacaaacagaaaacagaaaacaaaaaaacctctatgcaatctgagtagagcagccacaaccaaaaaattctacaacacacactgttctgaaagtgactcacttatcccaagaraatgaaattgctgaaagatctttcaggactctacctcatatcagtttgctagcagaaatctagaagactgtcagcttccaaacattaatgcaatggttaacatcttctgtctttataatctactccttgtaaagactgtagaagaaagmgcaacaatccatctctcaagtagtgtatcacagtagtagcctccaggtttccttaagggacaacatccttaagtcaaaagagagaagaggcaccacttaaaagatcgcagtttgcctgggtgcagtggctcacacctgttaatcccaacattttggggaacccaaggtgggtrggatcacgaggwtcagagrtccaagaccatagtngaccancaagtgaanccctctctctgagtccaaatagccggnggttgg

SEQ ID NO: 1089 - DNA, 828 bp, Homo sapiens
  misc_feature (814)..(814): n equals a,t,g, or c
  misc_feature (818)..(818): n equals a,t,g, or c
  misc_feature (823)..(823): n equals a,t,g, or c
  misc_feature (825)..(825): n equals a,t,g, or c
gctgtatttctccataactatatctttcttcctctgtctccgcccacccacatttttctctttccctttctctctttggggaccctcccccatgctcccctgccccatccccttttccccttcccgtcttctcatccctccattcccatctttccccagcaattaccagctctggctgggtcgccacaacttgtttgacgacgaaaacacagcccagtttgttcatgtcagtgagagcttcccacaccctggcttcaacatgagcctcctggagaaccacacccgccaagcagacgaggactacagccacgacctcatgctgctccgcctgacagagcctgctgataccatcacagacgctgtgaaggtcgtggagttgcccacccaggaacccgaagtggggagcacctgtttggcttccggctggggcagcatcgaaccagagaatttctcatttccagatgatctccagtgtgtggacctcaaaatcctgcctaatgatgagtgcraaaaagcccacgtccagaaggtgacagacttcatgctgtgtgtcggacacctggaaggtggcaaagacacctgtgtgggtgattcagggggcccgctgatgtgtgatggtgtgctccaaggtgtcacatcatggggctacgtcccttgtggcacccccaataagccttctgtcgccgtcagagtgctgtcttatgtgaagtggatcgaggacaccatagcggagaactcctgaacgcccagccctgtcccctacccccagtaaaatcaaatgtgcatccaaaaaaaaggggccgttaagaccaanttcnaccgncntgc

SEQ ID NO: 1090 - DNA, 2110 bp, Homo sapiens; identical to SEQ ID NO: 856
  misc_feature (2104)..(2104): n equals a,t,g, or c

SEQ ID NO: 1091 - DNA, 1698 bp, Homo sapiens
  misc_feature (102)..(102): n equals a,t,g, or c
gcgcgggttcagacctgccgagcgcccgccgccgcgggaggggcttgaggccggggcggggcggggcggggcgtccccctcgtaggctccgggccscgcrtnctcagcgctgggagccgccgcccccgcagctgccgccgccgccagggcccggactcggacgcgtgcctagagtcctggggagcttctgtccacctgtcctgcagaggagtcgtttccagcccggctgccccaggatgggtgagttcaacgagaagaagacaacatgtggcaccgtttgcctcaagtacctgctgtttacctacaattgctgcttctggctggctggcctggctgtcatggcagtgggcatctggacgctggccctcaagagtgactacatcagcctgctggcctcaggcacctacctggccacagcctacatcctggtggtggcgggcactgtcgtcatggtgactggggtcttgggctgctgcgccaccttcaaggagcgtcggaacctgctgcgcctgtacttcatcctgctcctcatcatctttctgctggagatcatcgctggtatcctcgcctacgcctactaccagcagctgaacacggagctcaaggagaacctgaaggacaccatgaccaagcgctaccaccagccgggccatgaggctgtgaccagcgctgtggaccagctgcagcaggagttccactgctgtggcagcaacaactcacaggactggcgagacagtgagtggatccgctcacaggaggccggtggccgtgtggtcccagacagctgctgcaagacggtggtggctctttgtggacagcgagaccatgcctccaacatctacaaggtggagggcggctgcatcaccaagttggagaccttcatccaggagcacctgagggtcattggggctgtggggatcggcattgcctgtgtgcaggtctttggcatgatcttcacgtgctgcctgtacaggagtctcaagctggagcactactgaccctgccttgggccttgctgctgctgcacccaactactgagctgagaccactgagtaccaggggctgggctccctgatgacacccaccctgtgccatcaccataacctctggggaccccaacctcagaggcagcttcaagtgccttttgctgcgcaccaatgcccagcaggggaggtgaggggggctggcggggcgaagtttggggggtgttttgtggggctccccggacatactctctgcctggtggtcagatgcaggttggaaggggccttgctgagtggcgcaaggccgagcgttcccagcagggggagaaacccttcacaccccaggcccttcaggaactggggctttgccttgcagccacatggccccatcccagttggggaagccaggtgagctctgacccttgggcctgggcctctgcccctcccaacccagccgtcgtctccctcgacagcgcccctgctgtcttccccaccgcagtcaccaccacccgaaatgccacgtggtcactgtgcactgccctgttcatgtgcctctgcggggcagggccttcctggttttgtacactgctgtacccagatgcctacaaccatccctgccacatacaggtgctcaataaacacttgtagagcagaaaaaaaaaaaaaaaaaaaaaaaaaaaaaaaaaaaaaaaaaaaaaaaaaaagggcggccgct

SEQ ID NO: 1092 - DNA, 264 bp, Homo sapiens
  misc_feature (262)..(262): n equals a,t,g, or c
gaattcggcacgagagtcacaatggtggaatgtttgttaatcagttaaggcaggaagtggctgtkttacttcttttgtgggtttttggctgccccagacttcttggctcccgcaggccatctggacgcatatgtgcaagtcacaggggttacaatggttgagcttcggctgagaggcctgacagcagagactggaaaattgcttaacagaattataaattccttctttcattactcaaacctttttttttttyctttttganac

SEQ ID NO: 1093 - DNA, 2450 bp, Homo sapiens
agaaccagctgctgcagcaagtcgaccacctcaagcaggagaaatacgagaagttggtgagmagcggcttccgagaaaacggctcgagcagcgacaacccgtcctctcccgagtttttcatgtgagtctgacacgcgattccagctagccaccctgataagtgctccgcgggggtccggctcgggtgtgggcttgctagttctagagccatgctcgccaccacctcaccacccccacccccaccgagtttggcccccttggcccctacacacacacaaacccgcacgcacacaccacacacacacacacacacacacacaccccacaccctgctygagtttgtggtggtggtggctgttttaaactggggagggaatgggtgtctggctcatggattgccaatctgaaattctccataacttgctagcttgttttttttttttttttacacccccccgccccacccccggacttgcacaatgttcaatgatctcagcagagttcttcatgtgaaacgttgatcacctttgaagcctgcatcattcacatattttttcttcttcttccccttcagttcatgaactggtgttcattttctgtgtgtgtgtgtgttttattttgtttggatttttttttttaattttacttttagagcttgctgtgttgcccaccttttttccaacctccaccctcactccttctcaacccatctcttccgagatgaaagaaaaaaaaaagcaaagtttttttttcttctcctgagttcttcatgtgagattgagcttgcaaaggaaaaaaaaatgtgaaatgttatagacttgcagcgtgccgagttccatcgggttttttttttagcattgttatgctaaaatagagaaaaaaatsctcatgaaccttccacaatcaagcctgcatcaaccttctgggtgtgacttgtgagttttggccttgtgatgccaaatctgagagtttagtctgccattaaaaaaactcattctcatctcatgcattattatgcttgctactttgtcttagcaacaatgaactataactgtttcaaagactttatggaaaagagacattatattaataaaaaaaaaaagcctgcatgctggacatgtatggtataattattttttcctttttttttccttttggcttggaaatggacgttcgaagacttatagcatggcattcatacttttgttttattgcctcatgacttttttgagtttagaacaaaacagtgcaaccgtagagccttcttcccatgaaattttgcatctgctccaaaactgctttgagttactcagaacttcaacctcccaatgcactgaaggcattccttgtcaaagataccagaatgggttacacatttaacctggcaaacattgaagaactcttaatgttttctttttaataagaatgacgccccactttggggactaaaattgtgctattgccgagaagcagtctaaaatttattttttaaaaagagaaactgccccattatttttggtttgttttatttttattttatattttttggcttttggtcattgtcaaatgtggaatgctctgggtttctagtatataatttaattctagtttttataatctgttagcccagttaaaatgtatgctacagataaaggaatgttatagataaatttgaaagagttaggtctgtttagctgtagattttttaaacgattgatgcactaaattgtttactattgtgatgttaaggggggtagagtttgcaaggggactgtttaaaaaaagtagcttatacagcatgtgcttgcaacttaaatataagttgggtatgtgtagtctttgctataccactgactgtattgaaaaccaaagtattaagaggggaaacgcccctgtttatatctgtaggggtattttacattcaaaaatgtatgtttttttttcttttcaaaattaaagtatttgggactgaattgcactaagatataacctgcaagcatataatacaaaaaaaaattgcaaaactgtttagaacgctaataaaatttatgcagttataaaaatggcattactgcacagttttaagatgatgcagatttttttacagttgtattgtggtgcagaactggattttctgtaacttaaaaaaaaatccacagttttaaaggcaataatcagtaaatgttattttcagggactgacatcctgtctttaaaaagaaatgaaaagtaaatcttaccacaataaatataaaaaaatcttgtcagttacttttcttttacatattttgctgtgcaaaattgttttatatcttgagttactaactaaccacgcgtgttgttcctatgtgcttttctttcattttcaattctggttatatcaagaaaagaataatctacaataataaacggcatttttttttgaaaaaaaaaaaaaaaaaaaaactcgag

SEQ ID NO: 1094 - DNA, 1118 bp, Homo sapiens
gaattcggcacgagctctgcgtggggccccctttcttccctggttatacccagtcctccgaggggcccaccttgtctcatggctttaaatatgttgatgatgtttccatttatctccagcctagaactctttcttgctcttcaatccactgcctacctgatttcccatagtgaacaatccaacactgaccttctggttaactgccccacatccagcccatctgcagccattcccgtctcaggtaatggccactccatcttcctgcagctcaagtgggaagccctggagccattccgactcctctcccatctggtgcatcaggaaagactgtgggaactaccttcaaattctctccaggagccaaccacctcctgcccctccactgcgaccacccttgttcaagcctgcattgcctctcacctgcattcgtgcagctacctccagaccctccctcagcttccattattgcatcctttggtctcttcccagcagcatccagagtgatcctttgaaaatctcatttctctgctcaaaaccctcctgaggtttcccatcaccaaggatattaaggataaaaaccacatccttcataccattgtctacctgtgattccctaatcgtgtccctttgctcactccctctggcctcttgctgttccctgaacagcagtctgttccagccacagcagcccctttgccctatgtgcccatccccgtcagccttggcactggctgtcctctctgctgggagtgccctttcttcagatgctctcatgcttcgcttctttgccttgttgacatttggtcaatgtcaccttctcagtgaggcctaccctgacctccctgtaggaaaatgcaactcacctcactcccatgccccgtaccttatattgttttccttgcacttaccaatttctaacaaagcatgtaatatctgtttattataacatatctatattttatggtttatgtttcacgcaacttgaatgtaacctttgtgtgggccgtgggtctttctctgtttccttcactgacgcaccttggattcttagcatggtcccagcacatagtagatgctcaataaacatttgttgagtggaaaaaaaaaaaaaaaaaaaa

SEQ ID NO: 1095 - DNA, 1766 bp, Homo sapiens
ggcaccactctccaggctgccatggggcccagcacccctctcctcatcttgttccttttgtcatggtcgggacccctccaaggacagcagcaccaccttgtggagtacatggaacgccgactagctgctttagaggaacggctggcccagtgccaggaccagagtagtcggcatgctgctgagctgcgggacttcaagaacaagatgctgccactgctggaggtggcagagaaggagcgggaggcactcagaactgaggccgacaccatctccgggagagtggatcgtctggagcgggaggtagactatctggagacccagaacccagctctgccctgtgtagagtttgatgagaaggtgactggaggccctgggaccaaaggcaagggaagaaggaatgagaagtacgatatggtgacagactgtggctacacaatctctcaagtgagatcaatgaagattctgaagcgatttggtggcccagctggtctatggaccaaggatccactggggcaaacagagaagatctacgtgttagatgggacacagaatgacacagcctttgtcttcccaaggctgcgtgacttcacccttgccatggctgcccggaaagcttcccgagtccgggtgcccttcccctgggtaggcacagggcagctggtatatggtggctttctttattttgctcggaggcctcctggaagacctggtggaggtggtgagatggagaacactttgcagctaatcaaattccacctggcaaaccgaacagtggtggacagctcagtattcccagcagaggggctgatccccccctacggcttgacagcagacacctacatcgacctggcagctgatgaggaaggtctttgggctgtctatgccacccgggaggatgacaggcacttgtgtctggccaagttagatccacagacactggacacagagcagcagtgggacacaccatgtcccagagagaatgctgaggctgcctttgtcatctgtgggaccctctatgtcgtctataacacccgtcctgccagtcgggcccgcatccagtgctcctttgatgccagcggcaccctgacccctgaacgggcagcactcccttattttccccgcagatatggtgcccatgccagcctccgctataacccccgagaacgccagctctatgcctgggatgatggctaccagattgtctataagctggagatgaggaagaaagaggaggaggtttgaggagctagccttgttttttgcatctttctcactcccatacatttatattatatccccactaaatttcttgttcctcattcttcaaatgtgggccagttgtggctcaaatcctctatatttttagccaatggcaatcaaattctttcagctcctttgtttcatacggaactccagatcctgagtaatccttttagagcccgaagagtcaaaaccctcaatgttccctcctgctctcctgccccatgtcaacaaatttcaggctaaggatgccccagacccagggctctaaccttgtatgcgggcaggcccagggagcaggcagcagtgttcttcccctcagagtgacttggggagggagaaataggaggagacgtccagctctgtcctctcttcctcactcctcccttcagtgtcctgaggaacaggactttctccacattgttttgtattgcaacattttgcattaaaaggaaaatccactgctcaaaaaaagtaaaaaaaaaaaaaaaaaaaaaaaaaaaaaa

SEQ ID NO: 1096 - DNA, 1049 bp, Homo sapiens
ggcacgaggacagaaagagatgaactcttaaaggacttgcaacaaagcattgccagagaacctagtgctccttcaattcctacacctgcgtatcagtccttaccagcaggaggacatgcaccaactcctccaactccagcgccaagaaccatgccgcctactaagccccagcccccagccaggcctccaccacctgtgcttccagcaaatcgagctccttctgctactgctccatctccagtgggggctgggactgctgcgccagctccatcacaaacgcctggctcagctcctcctccacaggcgcagggaccaccctatcccacctatccaggatatcctgggtattgccaaatgcccatgcccatgggctataatccttatgcgtatggccagtataatatgccatatccaccagtgtatcaccagagtcctggacaggctccgtacccgggaccccagcagccttcataccccttccctcagcccccacagcagtcttactatccacagcagtaatatgtctgctcagcagctcagctgattcagatcagagggaaagaaataccaaccctgcaataagtgtactaaactctacgctctggttaatgtaatgtactctcctggactgaatgcagtgtataatttctgtctacagctagaagctgtgccccagttccacatttgattacacatgtgagatttgctgctgttgcagtataaacactaggtataataggatttgaaattgcattacagttcataaaaattgaaaatgagaaattaaacctgcaagtgaaacatttgaaacgattatactttctacataagacatggttgggacatcagatacttacaaagatggtttaagtatggatactagagaaaattaagttttctttctctttggtttattgatttggtttaatttccttatgctattttgcataatcaaggcactgtaaatcttataattttaaaataaattacttaagaacaaaaaaaaaaaaaaaaaaaaaaaaaaaaaaaaaaaaaaaaaaaaaaaaagg

SEQ ID NO: 1097 - DNA, 2979 bp, Homo sapiens
  misc_feature (102)..(102): n equals a,t,g, or c
gcggccgccaacagtgaaaagagaacctccatcaccccagggtcgatccagcaattctagtgagaaccagcagttcctgaaggaggtggtgcacagcgtgtnggacggccagggagttggctggctcaacatgaaaaaggtgcgccggctgctggagagcgagcagctgcgagtctttgtcctgagcaagctgaaccgcatggtgcagtcagaggacgatgcccggcaggacatcatcccggatgtggagatcagtcggaaggtgtacaagggaatgttagacctcctcaagtgtacagtcctcagcttggagcagtcctatgcccacgcgggtctgggtggcatggcagcatctttgggcttttggagattgcccagacccactactatagtaaagaaccagacaagcggaagagaagtccaacagaaagtgtaaataccccagttggcaaggatcctggcctagctgggcggggggacccaaaggctatggcacaactgagagttccacaactgggayctcgggcaccaagtgcacaggaaagggtcctaaggaactggacaccagaagtttaaaggaagaaaattttatagcatctattgggcctgaagtaatcaaacctgtctttgaccttggtgagacagaggagaaaaagtcccagatcagcgcagacagtggtgtgagcctgacgtctagttcccagaggactgatcaagactctgtcatcggcgtgagtccagctgttatgatccgcagctcaagtcaggattctgaagtkagcaccgtggtgagtaatagctctggagagacccttggagctgacagtgacttgagcagcaatgcaggtgatggaccaggtggcgagggcagtgttcacctggcaagctctcggggcactttgtctgatagtgaaattgagaccaactctgccacaagcaccatctttggtaaagcccacagcttgaagccaagcataaaggagaagctggcaggcagccccattcgtacttctgaagatgtgagccagcgagtctatctctatgagggactcctaggcaaagagcgttctactttatgggaccaaatgcaattctgggaagatgccttcttagatgctgtgatgttggagagagaagggatgggtatggaccagggtccccaggaaatgatcgacaggtacctgtcccttggagaacatgaccggaagcgcctggaagatgatgaagatcgcttgctggccacacttctgcacaacctcatctcctacatgctgctgatgaaggtaaataagaatgacatccgcaagaaggtgaggcgcctaatgggaaagtcgcacattgggcttgtgtacagccagcaaatcaatgaggtgcttgatcagctggcgaacctgaatggacgcgatctctctatctggtccagtggcagccggcacatgaagaagcagacatttgtggtacatgcagggacagatacaaacggagatatctttttcatggaggtgtgcgatgactgtgtggtgttgcgtagtaacatcggaacagtgtatgagcgctggtggtacgagaagctcatcaacatgacctactgtcccaagacgaaggtgttgtgcttgtggcgtagaaatggctctgagacccagctcaacaagttctatactaaaaagtgtcgggagctgtactactgtgtgaaggacagcatggagcgcgctgccgcccgacagcaaagcatcaaacccggacctgaattgggtggcgagttccctgtgcaggacctgaagactggtgagggtggcctgctgcaggtgaccctggaagggatcaacctcaaattcatgcacaatcaggttttcatagagctgaatcacattaaaaagtgcaatacagttcgaggcgtctttgtcctggaggaatttgttcctgaaattaaagaagtggtgagccacaagtacaagacaccaatggcccacgaaatctgctactccgtattatgtctcttctcgtacgtggctgcagttcatagcagtgaggaagatctcagaaccccgccccggcctgtctctagctgatggagaggggctacgcagctgccccagcccagggcacgcccctggccccttgctgttcccaagtgcacgatgctgctgtgactgaggagtggatgatgctcgtgtgtcctctgcaagccccctgctgtggcttggttggttaccggttatgtgtccctctgagtgtgtcttgagcgtgtccaccttctccctctccactcccagaagaccaaactgccttcccctcagggctcaagaatgtgtacagtctgtggggccggtgtgaacccactattttgtgtccttgagacatttgtgttgtggttccttgtccttgtccctggcgttataactgtccactgcaagagtctggctctcccttctctgtgacccggcatgactgggcgcctggagcagtttcactctgtgaggagtgagggaaccctggggctcaccctctcagaggaagggcacagagaggaagggaagaattggggggcagccggagtgagtggcagcctccctgcttccttctgcattcccaagccggcagctactgcccagggcccgcagtgttggctgctgcctgccacagcctctgtgactgcagtggagcggcgaattccctgtggcctgccacgccttcggcatcagaggatggagtggtcgaggctagtggagtcccagggaccgctggctgctctgcctgagcatcagggagggggcaggaaagaccaagctgggtttgcacatctgtctgcaggctgtctctccaggcacggggtgtcaggagggagagacagcctgggtatgggcaagaaatgactgtaaatatttcagccccacattatttatagaaaatgtacagttgtgtgaatgtgaaataaatgtcctcaactcccaaaaaaaaaaaaaaaaaaaaaaaaaaaaa

SEQ ID NO: 1098 - DNA, 1043 bp, Homo sapiens
ccacgcgtccgggagggtcggggacggaagcgcagagcacggaccccgccccctcgcggccccgctcgtgacgtcgcggggggcacgagctccgcccggccccgaggggctctccccggaggctcagccccctctgctccccatgggcaactgccaggcagggcacaacctgcacctgtgtctggcccaccacccacctctggtctgtgccactttgatcctgctgctccttggcctctctggcctgggccttggcagcttcctcctcacccacaggactggcctgcgcagcctgacatcccccaggactgggtctcttttttgagatcttttggccagctgaccctgtgtcccaggaatgggacagtcacagggaagtggcgagggtctcacgtcgtgggcttgctgaccaccttgaacttcggagacggtccagacaggaacaagacccggacattccaggccacagtcctgggaagtcagatgggattgaaaggatcttctgcaggacaactggtccttatcacagccagggtgaccacagaaaggactgcaggaacctgcctatattttagtgctgttccaggaatcctaccctccagccagccacccatatcctgctcagaggagggggctggaaatgccaccctgagccctagaatgggtgaggaatgtgttagtgtctggagccatgaaggccttgtgctgaccaagctgctcacctcggaggagctggctctgtgtggctccaggctgctggtcttgggctccttcctgcttctcttctgtggccttctctgctgtgtcactgctatgtgcttccacccgcgccgggagtcccactggtctagaacccggctctgagggcactggcctagttcccgacttgtttctcaggtgtgaatcaacttcttgggccttggctctgagttggaaaaggttttagaaaaagtgaagagctggaatgtgggggaaaataaaaagcttttttgcccaaaaaaaaaaaaaaaaaaaaaaaaaaaaacaaaaaaaaaaaaaaaaaa

SEQ ID NO: 1099 - DNA, 713 bp, Homo sapiens
ggcacgagtccaggcgggcaggagctgcaggctgaccttgcagcttggcggaatggactggcctcacaacctgctgtttcttcttaccatttccatcttcctggggctgggccagcccaggagccccaaaagcaagaggaaggggcaagggcggcctgggcccctggcccctggccctcaccaggtgccactggacctggtgtcacggatgaaaccgtatgcccgcatggaggagtatgagaggaacatcgaggagatggtggcccagctgaggaacagctcagagctggcccagagaaagtgtgaggtcaacttgcagctgtggatgtccaacaagaggagcctgtctccctggggctacagcatcaaccacgaccccagccgtatccccgtggacctgccggaggcacggtgcctgtgtctgggctgtgtgaaccccttcaccatgcaggaggaccgcagcatggtgagcgtgccggtgttcagccaggttcctgtgcgccgccgcctctgcccgccaccgccccgcacagggccttgccgccagcgcgcagtcatggagaccatcgctgtgggctgcacctgcatcttctgaattacctggcccagaagccaggccagcagcccgagaccatcctccttgcacctttgtgccaagaaaggcctatgaaaagtaaacactgacttttgaaagcaaaaaaaaaaaaaaaaaa

SEQ ID NO: 1100 - DNA, 1988 bp, Homo sapiens
tggttctcagggtggggcgagatcgggttggggccgaatgcaagctctatcttgtgcccctgtcgcagccatgatgctsmagccgggcccgcagctctacgacgtgatggacgcggtcccagcgcggcgctggaaggagttcgtgcgcacgctggggctgcgcgaggcagagatcgaagccgtggaggtggagatcggccgcttccgagaccagcagtacgagatgctcaagcgctggcgccagcagcagcccgcgggcctcggagccgtttacgcggccctggagcgcatggggctggacggctgcgtggaagacttgcgcagccgcctgcagcgcggcccgtgacacggcgcccacttgccacctaggcgctctggtggcccttgcagaagccctaagtacggttacttatgcgtgtagacattttatgtcacttattaagccgctggcacggccctgcgtagcagcaccagccggccccacccctgctcgcccctatcgctccagccaaggcgaagaagcacgaacgaatgtcgagagggggtgaagacatttctcaacttctcggccggagtttggctgagatcgcggtattaaatcccgagaaggagagagcaagtcgcggccacagcgagtgagtgaaccggagcccagatgagagcgctttaatggggctgcgaggtggcggagacagggtcgggatggggtgcagcagttggagacacagggtcagggcccctcatcctctattcactccaccggggcagtgaaagggtcccggcagcgagtgggtctggctggggacggggcgcagacttgagggaggtggggccagaggtggggtcccgggggccacaagtgcggcccggccagacaggcagttttcatgtttctggtaaacaaatgactgagaggaaacccttggcggggataagaaatgaggcccgggctaggccgcgcgcagatctgggtcagagaggaagggaaaaccccttccccgagctcggggcctgcctccacccaggatgcgccagcgacgccggttccggggtgcgggggagggggctgcatcctggaggggctgagccccgcaggaaaacaaagtcaccacccacggggctggggagagctctgcactctttgatagtcaacgaacatgcaaatatgtgtaagtcggcatgcaaataagcagcatttgttgttgtttgcgtcagcagcttgggcactttttctgggcaaccgtggcggcgtgtgcactccagtgttgccaagggctggggatacggggggccagggtgggggtcagggagggtttccagcgcaggaggggagggctgtgcggctcccagcctttccaccagggcctggctggctggggctggggcggagggccccacggagctgcgaggctgcggacaggagtctgcggcctctagtacttagcgatgtcccccttcttcaggatgacctgtcgctgccagggcgccagcttgctctcatcgtagcccagcgtccgcagcttctctgactgttccttctcccgccgcagctcctcctgcttctgtcgctcctcctctttccgcttctgctccctctcttcttccagcttcttccgcaggaggtcccgcctccaggcgggcatgctggccagccgggcctcctcctcctcctccttccgcctctgctcctcctcctcctgcatcttcagctgcatcttgcgcaccatcacctggcgcttccactcggggatgggccggccctgctcatcgtgcgtggggatgagagcctcacgtccagctgcactcccggkcgcaggagtagtgggcggcacgggaaccaagcttccattgagcagcggctgaaaccccgcagctttgcggtgtggggctcggactggtgacaagtgcagtgacaccagaagcaaccgcgaaatgggcctggagggcggctgcccgatgcctgaaaaacactggggcaggccccttgc

SEQ ID NO: 1101 - DNA, 2735 bp, Homo sapiens
ggcacgagagacatagcttttctcattcaccctcccacttggggctaatgcacagacatgaacatctattgaggaaaaccacaaaaaacttcaaaacagctacaacgggaaaaagagagttttgtcccacagtcagcaggccactagtttattaacttccagtcaccttgatttttgctaaaatgaagactctgcagtctacacttctcctgttactgcttgtgcctctgataaagccagcaccaccaacccagcaggactcacgcattatctatgattatggaacagataattttgaagaatccatatttagccaagattatgaggataaatacctggatggaaaaaatattaaggaaaaagaaactgtgataatacccaatgagaaaagtcttcaattacaaaaagatgaggcaataacaccattacctcccaagaaagaaaatgatgaaatgcccacgtgtctgctgtgtgtttgtttaagtggctctgtatactgtgaagaagttgacattgatgctgtaccacccttaccaaaggaatcagcctatctttacgcacgattcaacaaaattaaaaagctgactgccaaagattttgcagacatacctaacttaagaagactcgattttacaggaaatttgatagaagatatagaagatggtactttttcaaaactttctctgttagaagaactttcacttgctgaaaatcaactactaaaacttccagttcttcctcccaagctcactttatttaatgcaaaatacaacaaaatcaagagtaggggaatcaaagcaaatgcattcaaaaaactgaataacctcaccttcctctacttggaccataatgccctggaatccgtgcctcttaatttaccagaaagtctacgtgtaattcatcttcagttcaacaacatagcttcaattacagatgacacattctgcaaggctaatgacaccagttacatccgggaccgcattgaagagatacgcctggagggcaatccaatcgtcctgggaaagcatccaaacagttttatttgcttaaaaagattaccgatagggtcatacttttaacctctattggtacaacatataaatgaaagtacacctacactaatagtctgtctcaacaatgagtaaaggaacttaagtattggtttaatattaaccttgtatctcattttgaaggaatttaatattttaagcaaggatgttcaaaatcttacatataataagtaaaaagtaagactgaatgtctacgttcgaaacaaagtaatatgaaaatatttaaacagcattacaaaatcctagtttatactagactaccatttaaaaatcatgtttttatataaatgcccaaatttgagatgcattattcctattactaatgatgtaagtacgaggataaatccaagaaactttcaactctttgcctttcctggcctttactggatcccaaaagcatttaaggtacatgttccaaaaactttgaaaagctaaatgtttcccatgatcgctcattcttcttttatgattcatacgttattccttataaagtaagaactttgttttcctcctatcaaggcagctattttattaaatttttcacttagtctgagaaatagcagatagtctcatatttaggaaaactttccaaataaaataaatgttattctctgataaagagctaatacagaaatgttcaagttattttactttctggtaatgtcttcagtaaaatattttctttatctaaatattaacattctaagtctaccaaaaaaagttttaaactcaagcaggccaaaaccaatatgcttataagaaataatgaaaagttcatccatttctgataaagttctctatggcaaagtctttcaaatacgagataactgcaaaatattttccttttatactacagaaatgagaatctcatcaataaattagttcaagcgtaagatgaaaacagaatattctgtggtgccagtgcacactaccttcccacccatacacatccatgttcactgtaacaaactgaatattcacaataaagcttctgagtaacactttctgattactcatgataaactgacatggctaactgcaagaattaaatcttctatctgagagtaataatttatgatgactcagtggtgccagagtaaagtttctaaaataacattcctctcacttgtaccccactaaaagtattagtctacacattacattgaagttaaacacaaaattatcagtgttttagaaacatgagtccggactgtgtaagtaaaagtacaaacattatttccaccataaagtatgtattgaaatcaagttgtctctgtgtacagaatacatacttattcccatttttaagcatttgcttctgttttccctacctagaatgtcagatgtttttcagttatctccccatttgtcaaagttgacctcaagataacatttttcattaaagcatctgagatctaagaacacaattattattctaacaatgattattagctcattcacttattttgataactaatgatcacagctattatactactttctcgttattttgtgtgcatgcctcatttccctgacttaaacctcactgagagcgcaaaatgcagctttatactttttactttcaattgcctagcacaatagtgagtacatttgaattgaatatataataaatattgcaaaataaaatccaaaaaaaaaaaaaaa

SEQ ID NO: 1102 - DNA, 1270 bp, Homo sapiens
gagtgatacgttgatacgccaagctcgaaattaaccctcactaaagggaacaaaagctggagctccaccgcggtggcggccgctctagaactagtggatcccccgggctgcaggaattcggcacgagcctctccgcactcactgctcgcgccgggcgcgctccgccagctccgtgctccccgcgccaccctcctccgggccgcgctccctaagggatggtactgaatttcgccgccacaggagaccggctggagcgcccgccccgcggcctcgcctctcctccgagcagccagcgcctcgggacgcgatgaggaccttggcttgcctgctgctcctcggctgcggatacctcgcccatgttctggccgaggaagccgagatcccccgcgaggtgatcgagaggctggcccgcagtcagatccacagcatccgggacctccagcgactcctggagatagactccgtagggagtgaggattctttggacaccagcctgagagctcacggggtccatgccactaagcatgtgcccgagaagcggcccctgcccattcggaggaagagaagcatcgaggaagctgtccccgctgtctgcaagaccaggacggtcatttacgagattcctcggagtcaggtcgaccccacgtccgccaacttcctgatctggcccccgtgcgtggaggtgaaacgctgcaccggctgctgcaacacgagcagtgtcaagtgccagccctcccgcgtccaccaccgcagcgtcaaggtggccaaggtggaatacgtcaggaagaagccaaaattaaaagaagtccaggtgaggttagaggagcatttggagtgcgcctgcgcgaccacaagcctgaatccggattatcgggaagaggacacgggaaggcctagggagtcaggtaaaaaacggaaaagaaaaaggttaaaacccacctaaagcagccaaccagatgtgaggtgaggatgagccacagccctttcctgggacatggatgtacatggcgtgttacattcctgaacctactatgtacggtgctttattgccagtgtgcggtctttgttctcctccgtgaaaaactgtgtccgagaacactcgggagaacaaagagacagtgcacatttgtttaatgtgacatcaaagcaagtattgtagcactcggtgaagcagtaagaagcttccttgtcaaaaagagagagagagagagagagagagaaaacaaaaccacaaatgacaaaaacaaaacggactcacaaaaatatctaa

SEQ ID NO: 1103 - DNA, 1903 bp, Homo sapiens
ggcacgagctcggagaggcggcgcccctgagtaggccaggagcctctcttgcaacttctgccaccgcgggccaccgcggccgcctgatcccgcagaggaaggtcgcggccgtggagcgatgacccgcggcggtccgggcgggcgcccggggctgccacagccgccgccgcttctgctgctgctgctgctgccgctgttgttagtcaccgcggagccgccgaaacctgcaggagtctactatgcaactgcatactggatgcctgctgaaaagacagtacaagtcaaaaatgtaatggacaagaatggggacgcctatggcttttacaataactctgtgaaaaccacaggctggggcatcctggagatcagagctggctatggctctcaaaccctgagcaatgagatcatcatgtttgtggctggctttttggagggttacctcattgccccacacatgaatgaccactacacaaacctctacccacagctgatcacgaaaccttccatcatggataaagtgcaggattttatggagaagcaagataaggtggacccggaaaaatatcaaagaatacaagactgattcattttggagacatacaggctatgtgatggcacaaatagatggcctctatgtaggagcaaagaagagggctatattagaagggacaaagccaatgaccctgttccagattcagttcctgaatagtgttggagatctattggatctgattccctcactctctcccacaaaaaacggcagcctaaaggtttttaagagatgggacatgggacattgctccgctcttatcaaggttcttcctggatttgagaacatcctttttgctcactcaagctggtacacgtatgcagccatgctcaggatatataaacactgggacttcaacatcatagataaagataccagcagtagtcgcctctctttcagcagttacccagggtttttggagtctctggatgatttttacattcttagcagtggattgatattgctgcagaccacaaacagtgtgtttaataaaaccctgctaaagcaggtaatacccgagactctcctgtcctggcaaagagtccgtgtggccaatatgatggcagatagtggcaagaggtgggcagacatcttttcaaaatacaactctggcacctataacaatcaatacatggttctggacctgaagaaagtaaagctgaaccacagtcttgacaaaggcactctgtacattgtggagcaaattcctacatatgtagaatattctgaacaaactgatgttctacggaaaggatattggccctcctacaatgttcctttccatgaaaaaatctacaactggagtggctatccactgttagttcagaagctgggcttggactactcttatgatttagctccacgagccaaaattttccggcgtgaccaagggaaagtgactgatacggcatccatgaaatatatcatgcgatacaacaattataagaaggatccttacagtagaggtgacccctgtaataccatctgctgccgtgaggaccctgaactcacctaacccaagtccttggaggttgttatgacacaaaaggtggcagatatytacctagcatctcagtacacatcctatgccataagtggtcccacagtacaaggtggcctccctgtttttcgctgggaccgtttcaacaaaactctacatcagggcatgccagaggtctacaactttgattttattaccatgaaaccaattttgaaacttgatataaaatgaaggagggagatgacggactagaagactgtaaataagataccaaaggcactattttagctatgtttttcccatcagaattatgcaataaaatatattaatttgtcaaaaaaaaaaaaaaaaaa

SEQ ID NO: 1104 - DNA, 754 bp, Homo sapiens
  misc_feature (309)..(309): n equals a,t,g, or c
  misc_feature (746)..(746): n equals a,t,g, or c
cccacgcgtccgattgagtgtgtttctgttcacccacactggaaggtgagactggaactggtagaacttgtggaggaccttcttttgaagtgcagtcaatcattggtcgaatgtgctggtccccttctgaaggccttagtgggactagtaaatgatgagagtcctgaaatccaagcccagtgcaataaagttctgagacattttgcagatcaaaaagtagtggtgggcaacaaagccctcgctgacatcttgtcagaaagcctgcattcccttgccacatctcttcctcgcctaatgaactcccaagangaccagggcaaattctctactctttccttgwtacttggttatctgaaactcttgggcccaaaaataaactttgtcctcaactctgtggcccatctccagcggctttccaaagcactcatccaagttctagagctagacgtggctgacatcaagattgttgaggaacggcgttggaactctgatgatctgaatgcttctccaaagacctcagccacacagccttggaaccgcatccagaggagatatttccgcttcttcactgatgagagaatcttcatgctcttgaggcaggtttgtcagctacttgggttattatgggaatctttatttgcttgtgggatcactttatggaactttaccatcaatctgtggttaccggaagcaagtgccatgatccytaatgaactggtacaggggctkctkggctkgaggttgangatcttcc

SEQ ID NO: 1105 - DNA, 1728 bp, Homo sapiens
  misc_feature (385)..(385): n equals a,t,g, or c
  misc_feature (405)..(405): n equals a,t,g, or c
acgaggggyagagagcctccgctccccactgctctataaaagagacccagcaaagggaccctaccagcttctagctctcagtctgcgcgagggtgtaggaaggaaagcccaggacctccggagcagagcacagcagctgcagaggcaaggccagcatgtcgcccaacttcaaacttcagtgtcacttcattctcatcttcctgacggctctaagaggggaaagccggtacctagagctgagggaagcggcggactacgatcctttcctgctcttcagcgccaacctgaagcgggagctggctggggagcagccgtaccgccgcgctctgcggtgcctggacatgctgagcctccagggccagttcaccttcaccgccgaccggcngcagctgcactgcgcagctntcttcatcagcgagcccgaggagttcattaccatccactacgaccaggtctccatcgactgtcagggcggcgacttcctgaaggtatttgatggttggattctcaagggggagaagttccccagttcccaggatcatcctctcccctcagctgagcggtacatagatttctgtgagagtggtcttagcaggaggagcatcagatcttcccagaatgtggccatgatcttcttccgagtccatgaaccaggaaatggattcacattaaccataaagacagaccccaacctctttccttgcaatgtcatttctcagactccaaatggaaagtttaccctggtagttccacaccagcatcgaaactgcagcttctccataatttatcctgtggtgatcaaaatatctgatcttaccctgggacacgtaaatggtcttcagttaaagaaatcctcagcaggttgcgagggaataggagactttgtggagctgctgggaggaactggattggacccttccaagatgacgcctttagctgatctctgctacccctttcatggcccggcccagatgaaagttggctgtgacaacactgtggtgcgcatggtctccagtggaaaacacgtaaatcgtgtgacttttgagtatcgtcagctggagccgtacgagctggaaaacccaaatggaaacagtatcggggaattctgtttgtctggtctttgaataaccaacccagtgatttacatgctgatagctaagtgagtttttaatggccattgtgtatgattttgatgcacaactagttaaaagcctttcataccagtcagtattcccagccttgagcgcacgcgcgcacacacacacacacatacacacacgcattaatttttgtactttgcttcttttatgtttgtaatctgtaaatgaacacatggcagaaaataacccctgattggtaggatcatagttctaaatggaaatgtttgtaattcttygatgtgctacaaacctgaaactggtaagacaagcacaaagcaacgtgcaatamaaaaatcgtatctcaagggaaaatactcaaagaaagaaaagtggcagcacttatattagttttataacaggataaagtcttgtgtatagcaaagtagttgcatctgtttattttctatttattattgttacaataggtaatagttatagcaattatttattgatttgtaacaacttgtttttaaccaaactttgtagcatggaaaaaattttccatccacaaatacaaacatgaataaatacattcagaatgttggcaccataaaaaaaaaaaaaaaaa

SEQ ID NO: 1106 - DNA, 546 bp, Homo sapiens
ggcacgaggaacgactcggcagcctcttctggccctgaggaagacgtcgatattttggcacgaggggagccactgaaggactaccctacccttgcgagggaccgcagaggtgacgcccctgggcctcggtgggcgcttctggcggttttcgatgtggcaacccccatcagccaggataatgatgaggcagatcttacaggtgaacaaggtgatgtccatcttgttttatgtgatatttctcgcttatctccgtggcatccaaggtaacaacatggatcaaaggagtttgccagaagactcgctcaattccctcattattaagctgatccaggcagatattttgaaaaacaagctctccaagcagatggtggacgttaaggaaaattaccagagcaccctgcccaaagctgaggctccccgagagccggagcggggagggcccgccaaktcagcattccagccggtgattgcaatggacaccgaactgctgcgacaacagagacgctacaactcaccgcgggtcctgctgagcgacacacccccttg

SEQ ID NO: 1107 - DNA, 4058 bp, Homo sapiens
gggcctcttagacgcatgctcaagcggccgccagtgtgatggatatctgcagaattcggcttggccacgcgtcgactagtacggggggggggggggggcattctggacagtcatggcggcaactgtggcaacggcggcagctgtggccccggcgccagcgcccggcacggacagcgcctcttcggtgcactggttccgcaaagggctgcgactccacgacaacccggcgttgctggcggccgtgcgcggggcgcgctgcgtgcgctgcgtttacattctcgacccgtggttcgcggcctcctcctcagtcgggatcaaccgatggaggttcctacttcagtctctggaagatttggacacaagtttaaggaaactgaactcccgcctgtttgtagtccggggacagccagccgacgtgttcccaaggctgttcaaggaatggggagtgacccgcttgacctttgaayatgactctgaaccctttgggaaagaacgggatgcagccatcatgaagatgrccaaggaggctggtgtggaagtagtgacggagaattctcataccctctatgacctggacaggatcattgagctgaatgggcagaagccaccccttacatacaagcgctttcaggccatcatcagccgcatggagctgcccaagaagccagtgggcttggtgaccagccrgcagatggagagctgcagggccgagatccaggagaaccacgacgagacctacggcgtgccctccctggaggagctggggttccccactgaaggacttggtccagctgtctggcagggaggagagacagaagctctggcccgcctggataagcacttggaacggaaggcctgggttgccaactatgagagaccccgaatgaacgccaactccctcctggccagccccacaggcctcagcccctacctgcgctttggttgtctctcctgccgcctcttctactaccgcctgtgggacctgtataaaaaggtgaagcggaacagcacacctcccctctccctatttgggcaactcctatggcgagagttcttctacacggcagctaccaacaaccccaggtttgaccgcatggaggggaaccccatctgcatccagatcccctgggaccgcaatcctgaggccctggccaagtgggctgagggcaagacaggcttcccttggattgatgccatcatgacccaactgaggcaggagggctggatccaccacctggcccggcatgccgtggcctgcttcctgacccgcggggacctctgggtcagctgggagagcggggtccgggtatttgatgagctgctcctggatgcagatttcagcgtgaacgcaggcagctggatgtggctgtcctgcagtgctttcttccagcagttcttccactgctactgccctgtgggctttggccgtcgcacggaccccagtggggactacatcaggcgatacctgcccaaattgaaagcgttcccctctcgatacatctatgagccctggaatgccccagagtcaattcagaaggcagccaagtgcatcattggtgtggactacccacggcccatcgtcaaccatgccgagaccagccggcttaacattgaacgaatgaagcagatttaccagcagctttcgcgctaccggggactctgtctactggcatctgtcccttcctgtgtggaagacctcagtcaccctgtggcagagcccagctcgagccaggctggcagcatgagcagtgcaggcccaagaccactacccagtggcccagcatcccccaaacgcaagctggaagcagccgaggaaccacctggtgaagaactcagcaaacgggcccgggtggcagagttgccaaccccagagctgccgagcaaggatgcctgagactgcagagcccttgctccgtgagcaaagcctgggtgcccaagcagccaccgcagcagcagagtacaacctgcagagaagctgatcaccgggcagagatagagcgagcatgtgtgtgtgtgtgcgcgtgtgcagaggagggagtggtgtgcctgtttgtgtgtgcatgcatctgttgacactcatgattctgaatgttgcctgggctgggggagtacctgtagcacgccagtgctgtttcccggcctccagacacaaggctcgaggttatggcagtgactttcagctgagacctgttcctgcaagccagctgccttgtctgaacagaacgtagtggtaggaccctagctgggattctggcatctgcctccctagacctccttccctccctcctcacgtcaggctgtggagcaggagcacagcagttctggctgttgtccaaagcatgggattctggaggcagccagagccctgctgagttcctgctttctgacctggaggctgagcaggccggagtggatggatgctgtccagacgtagccacctggcctctgtttcttattttaaaattctctgctactgggctcagtcccaggcccttccttgggcttctgggactgagcatgaggccatagacagatctaaaaagtttccaccaccctacagaagtacacacagatacctgactggtgtggggtatgcctggtactgtaataggagcctaagacagcacacctaccttttcaggatttagaacctaaaattagaaagagaatcccagctgtcattgttccttccccagaagctaagagccagcctcagagcctacccaggagctgtgaaggggcaagggtcaaactgactcactctaccaggaggagaccaggttgcagtggcgtaaggccccctggtttctctggccacactccaaggcaccacagtgctgccagtgaggacagctgacacccagccagggaaaccattctagtctttattctgttggcttccagggcctgtcctgracttgtcagcatccagactgccatgtcagctatcccagtagctgagctccaaggactcaggcagagggactcagggatggggactgccaggggcagttggcaaaagtccaagtagagattacacccagmacaccattccttccaggagcagtaggtgggaggtttgacccagagaagccaatccttgcattccaggagtggcctgtgcctcccacctcttccttcccactgccaaaggcctgtgttgagaaagatgtcatgcaaaaggacgacggtggccaactaaagcaagtcttccttccaccctgtggcctgcacttgagccacaaagtgtgtgtgtgtgtgtgtgcgtgtgtggtacgtgtgtgtgtgtgtggctatgaggctgattcctgtttggatttttgtcctcacgtgtatcattaagctggcctttgggccttttcctttctacctcccctgtgacctttcctagcctcagatctgttaattcttttggccccagccctgtccctcactgtcctctgtccttggaccagaaccctggggtcagacccatctcctgtagctgtccatcacactgacaggcttcttcctgagatatcctcaggttttctcagccagagagctgcctttagagtccaactgttgtacgtatgtcaccttcactagaaatgtcccatcatcgtgggaggggagcagggcacaggggatggtgtgcattcagagcattgggttgggggcttccctgttccctcagccccagtcgagaggaaagagaatcgggccactgccagaaagagagtcaagcaaacctggaagggcaaatctgagagtgggaaggccaaaggccgaggcccagatttagtattcactagcagcgccttcgggtagcaggatgattccttttcctgcctgtctgctgctggctctcttccctaaggtacaggttggcaggaccacctccgcctacttctccaccatccctagcatgccagcccgttcccagatcaacctgccagtggagtcaggcagtgcactcytggagccaagagggaagggcagggtwgagagggtatgtccagtagcctggagctccatggtggcttcatgcctcccttctcccagctcaggtggccctg

SEQ ID NO: 1108 - DNA, 1164 bp, Homo sapiens
gggctgcaggaattcggcacgagccgcggaccaacccttgacgggccgaaagtggtggatgggcgcggaggaaccctggcagacgctggcctgctgtatggaggtggcgaacgctgtgcgcgcctccgaccctgccgcctatgtctcccacctccccgtccatcaggacggctcttgcaacggcctgcagcattatgctgctctgggccgcgacagcgtgggcgccgcctccgtcaacctggagccctcggatgtgccgcaggacgtgtacagcggcgtggccgcgcaggtggaggtgttccgtaggcaggacgcccagcggggcatgcgggtggcacaggtgctggaaggtttcatcacccgcaaggtggtgaagcagacggtgatgacggtggtgtacggggtcacgcgctatggcgggcgcctgcagattgagaagcgcctccgggagctgagcgactttccccaggagttcgtgtgggaggcctctcactatctcgtacgccaggtcttcaagagtctacaggagatgttctcggggacccgggccatccagcactggctgaccgagagtgcccgcctcatctcccacatgggctctgtggtggagtgggtcacacccctgggcgtccccgtcatccagccctatcgcctggactccaaggtcaagcaaataggaggtggaattcagagcatcacctacacccacaacggagacatcagccgaaagcccaacacacgtaagcagaagaacggcttcccgcccaacttcatccactcgctggactcctcccacatgatgctcaccgccctgcactgctacaggaagggcctgaccttcgtctctgtgcacgactgttactggactcacgcagctgatgtctccgtcatgaaccaggtgtgccgggagcagtttgtccgcttgcacagcgagcccatcctgcaggacctgtccagattcctggtcaagcggttctgctctgagccccagaagatcttggaggccagccagctgaaggagacactgcaggcggtgcccaagccaggggccttcgacctggagcaggtgaagcgttccacctacttcttcagctgacaccccgtgagccttgtcagtgtgtaaataaagctcttttgccacccccaaaaaaaaaaaaaaaaaac

SEQ ID NO: 1109 - DNA, 590 bp, Homo sapiens
ccgggtcgacccacgcgtccggtctgtgcattagtgtccttgtctgtatctgaggataaaaacactgcctttctcatagggttgatgcaaggattaaatgagtgaacatttaaaatccttagaacacagcctgacacataaaaggtgcttgataacggttagccaagattatgttttataattatttcttggcattctcccctctgggctgtgagctgcttcctgtattgtgcctggctgtagctttttaataaccaattgctgaatcaatgaatgagagaaagaaaaaggggccgggtgtgttggctcacacctgtaatcccagtactgtgggaggctgagatgggtggatcacctgaggtcgggagtttgagaccagcctggtcaacatggtgaaactccatctctattaaaaatacaaaaattagctgggcatggtggtgggcacctgtaatcccagctacttgggtggctgaagcaagagaatcacttgaatctggcaggtggaggttgcagtgagctgagatcacgccattgcactccagcctgggcaacatgagtgaaactccgcctcaaaaaaaaaaaaaaaa

SEQ ID NO: 1110 - DNA, 692 bp, Homo sapiens
ccacgcgtccgcaaggaagtctggtggccgttgagcacttgggggttgttttgtgtttggaatcagtctgatttcagctagtcatggctgctggtgggtgcctccttcttcttgccttctttccattgtctagagggagccatttccacttgcagaagcgagcccttgcagaggcatcttttgaagcaactctgtgtgagttgtttgtcatagaaactgctagcaagggaactctgctaataataactattaggcacctagtaacctatattatagtaatatttaagtgccatatgcttaaaaatgaaatgaattcaagtataaaacctcatttccagtgatacatattttttatccagaagaattgaacttgataaacttgtctaaagtggaaggacaatctaactggacattgtttttaaggtcatagtctttaaggtcaaattaagtatgagactcaagttcagtgatttcttccttcctcactgcttccttctccctttcccatcttgacttctggaatagcccttgccaaataccagggatcatactgcataaactagattttcagtgtctgcatgttttctagataacatctcctttaaagcattggcttttctttaaggagatctgctgagattctgctccctcaagctagcacgctaactggtatctacaaaaaaaaaaaaaaa

SEQ ID NO: 1111 - DNA, 3112 bp, Homo sapiens
gcgtccggtgataatgaaagtggtggtggtgatggtggtaatactggtggtggtgacattggtggtggtggtgatggtggtgatactggtgatggtggtgatggtggtggcgctggtgaccctgacatggggtccagtagcagtgacagtggatgcaggctcctggtgactgaggagcatctcaggctgaggaggcacctctgatccccgccactgctccttaccccctacagtctctcagcaaacctgctgggcgacacggactcagatgccttctggaatgtctgccgcagtgcccatctccggtttgcttgatctgagtcacaacagcatttctcaggaaagtgccctgtacctgctggagacactgccctcctgcccacgtgtccgggaggcctcagtgaacctgggctctgagcagagcttccggattcacttctccagagaggaccaggctgggaagacactcaggctaagtgagtgcagcttccggccagagcacgtgtccaggctggccaccggcttgagcaagtccctgcagctgacggagctcacgctgacccagtgctgcctgggccagaagcagctggccatcctcctgagcttggtggggcgacccgcagggctgttcagcctcagggtgcaggagccgtgggcggacagagccagggttctctccctgttagaagtctgcgcccaggcctcaggcagtgtcactgaaatcagcatctccgagacccagcagcagctctgtgtccagctggaatttcctcgccaggaagagaatccagaagctgtggcactcaggttggctcactgtgaccttggagcccaccacagccttcttgtcgggcagctgatggagacatgtgccaggctgcagcagctcagcttgtctcaggttaacctctgtgaggacgatgatgccagttccctgctgctgcagagcctcctgctgtccctctctgagctgaagacatttcggctgacctccagctgtgtgagcaccgagggcctcgcccacctggcatctggtctgggccactgccaccacttggaggagctggacttgtctaacaatcaatttgatgaggagggcaccaaggcgctgatgagggcccttgaggggaaatggatgctaaagaggctggacctcagtcaccttctgctgaacagctccaccttggccttgcttactcacagactaagccagatgacctgcctgcagagcctcagactgaacaggaacagtatcggtgatgtcggttgctgccacctttctgaggctctcagggctgcaccagcctagaggagctggacttgagccacaaccagattggagacgctggtgtccagcacttagctaccatcctgcctgggctgccagagctcaggaagatagacctctcagggaatagcatcagctcagccgggggagtgcagttggcagagtctctcgttctttgcaggcgcctggaggagttgatgcttggctgcaatgccctgggggatcccacagccctggggctggctcagagctgcccagcacctgagggtcctacacctaccattcagccatctgggcccaggtggggccctgagcctggccaggccctggatggatccccccatttggaagagatcagcttggcggaaaacaacctggctggaggggtcctgcgtttctgtatggagctcccgctgctcagacagatagacctggtttcctgtaagattgacaaccagactgccaagctcctcacctccagcttcacgagctgccctgccctggaagtaatcttgctgtcctggaatctcctcggggatgaggcagctgccgagctggcccaggtgctgccgcagatgggccggctgaagagagtggacctggagaagaatcagatcacagctttgggggcctggctcctggctgaaggactggcccaggggtctagcatccaagtcatccgcctctggaataaccccattccctgcgacatggcccagcacctgaagagccaggagcccaggctggactttgccttctttgacaaccagccccaggccccttggggtacttgatggccccctcaagacctttggaatccagccaagtgatgcacccaaatgatccacctttcgcccactgggataattgactcaggaaagaagagcctcggcagggcgctctgcactccacccaggaggaaggatacgtgtgtcctgctgcagtcctcagggagaacttttttgggaaccaggagctgggtctggacaaaggagtaccctgcattacgtgggatatgtgtgatcaattggggacatgcgacacacaatgagggtgtcatgacaatgcatgacacgtacggttatatgtggcagtgtgaccccttgacatgtggcgttacatgaaagtcagtgtggcacgtgttctgtggcatgggtgctggcatcccaagtagcaggatacatgattgttggtctatatatgacacatgacaaatgtccatgtcacaggactcatggctggccagatgacctcaggctggcccaagatctaatttattaatttttaaagcaaatacatatttatagattgtgtgtatggagcagctaagtcaggaaaagtcttccgcccgagctgggaggggagagtgtccatgcactgaccagtccaggggctcaagggccagggctctggaacaagccagggactcagccattaagtcccctcctgcctcaatcctcagcctacccatctataaacttgatgactcctcccttacttacatactagcttccaaggacaggtggaggtagggccagcctggcgggagtggagaagcccagtctgtcctatgtaagggacaaagccaggtctaatggtactgggtagggggcactgccaagacaataagctaggctactgggtccagctactactttggtgggattcaggtgagtctccatgcacttcacatgttacccagtgttcttgttacttccaaggagaaccaagaatggctctgtcacactcgaagccaggcttgatcaataaacacaatggtattccaaaaaaaaaaaaaaaaaaaaaaaaaaaaaaaaaaaaaaa

SEQ ID NO: 1112 - DNA, 823 bp, Homo sapiens
  misc_feature (786)..(786): n equals a,t,g, or c
  misc_feature (800)..(800): n equals a,t,g, or c
  misc_feature (806)..(806): n equals a,t,g, or c
  misc_feature (820)..(820): n equals a,t,g, or c
ggcacgagctttaatcttgacagcccgaatgctacaggggtcacagcacatctgctccggaggaaagacaaagggcaagcacatctcaggatggggcaatatttggtgagaaccatattggattctaccaaattacaaatatattccaggttggcctgatcactcactcaccactccctgcaactccatggagaagatataagctgtcaaaaatgtatttgtgagtctgatgagctctttcacccaggtgacaggggtttctgccatattaatattcttcttcttctccaccttttgtgtttcaatgctgggcctggagaaggcagggaccttggctcttccacggtggctgttcatcagcactcacacatccaccacaccggtttagtcgcacgctggaargtaaatgtgtaccatggaagatatcgggctgtttttgtagcatctggattgccactgccccytcccctccactaccccaagtcctcttttctcctctttggagaagacacagttcaggctaagagctcatgtttgargcctcgctgagttgctgtttgatattgttcttgcttcttaccacattggtggcattgaatgtccttattgatttttgcctgattggtctaacttagaacaggatcagcttcataaatgggacatcttgtgggctgaaatatgagatttgttttaacaaaccactcctaaccatcatctcttttaagggaagccaggaaaggcaattgctgaattcttgccggacgcgtgggtcgacccgggaacgcngaccgtactgcagntgaccnttgcctgtgatgcntct

SEQ ID NO: 1113 - DNA, 216 bp, Homo sapiens
  misc_feature (110)..(110): n equals a,t,g, or c
  misc_feature (200)..(200): n equals a,t,g, or c
agccgcctgcccgtcctgctcctgctccaactcctggtccgccccgactgccaagctcccatgaacccaaacaacgcccttaaagacaagctgggttaactgctctkaanatgaatcgatgaaattatgaacacacttaaagcagccacctttgccctttgcctgggacttcaacaacctgcaatggggaagaccaaganattctgaatggaaaat

SEQ ID NO: 1114 - DNA, 1617 bp, Homo sapiens
caggttgagatgtgtataagagacaggcttggatgggttacgacctgacgagttcctaggccttacccacacttatagcgtgcgctggtctgagacttcagtggagcgtcggagtgacaggcgccgtggtgacgatggtggtttctttcctcgaacactggaaatccattggttgtccatcatcaactccatggtgcttgtgtttttactggtgggttttgtggctgtcattctaatgcgtgtgcttcggaatgacctggctcggtacaacttagatgaggagaccacctctgcaggttctggtgatgactttgaccagggtgacaatggctggaaaattatccatacagatgtcttccgcttccccccataccgtggtctgctctgtgctgtgcttggcgtgggtgcccagttcctggcccttggcactggcattattgtcatggcactgctgggcatgttcaatgtgcaccgtcatggggccattaactcagcagccatcttgttgtatgccctgacctgctgcatctctggctacgtgtccagccacttctaccggcagattggaggcgagcgttgggtgtggaacatcattctcaccaccagtctcttctctgtgcctttcttcctgacgtggagtgtggtgaactcagtgcattgggccaatggttcgacacaggctctgccagccacaaccatcctgctgcttctgacggtttggctgctggtgggctttcccctcactgtcattggaggcatctttgggaagaacaacgccagcccctttgatgcaccctgtcgcaccaagaacatcgcccgggagattccaccccagccctggtacaagtctactgtcatccacatgactgttggaggcttcctgcctttcagtgccatctctgtggagctgtactacatctttgccacagtatggggtcgggagcagtacactttgtacggcatcctcttctttgtcttcgccatcctgctgagtgtgggggcttgcatctccattgcactcacctacttccagttgtctggggaggattaccgctggtggtggcgatctgtgctgagtgttggctccaccggcctcttcatcttcctctactcagttttctattatgcccggcgctccaacatgtctggggcagtacagacagtagagttcttcggctactccttactcactggttatgtcttcttcctcatgctgggcaccatctcctttttttcttccctaaagttcatccggtatatctatgttaacctcaagatggactgagttctgtatggcagaactattgctgttctctccctttcttcatgccctgttgaactctcctaccagcttctcttctgattgactgaattgtgtgatggcattgttgccttcccttttgccctttgggcattccttccccagagagggcctggaaattataaatctctatcacataaggattatatatttgaactttttaagttgcctttagttttggtcctgatttttctttttacaattaccaaaataaaatttattaagaaaaagaaaaaaaaaactcgagggggggcccggtacccctgtctcttatacacatctcaacctgcaggggg

SEQ ID NO: 1115 - DNA, 679 bp, Homo sapiens
  misc_feature (570)..(570): n equals a,t,g, or c
ataaggctttccggagtgacagttcattcaatttcttcgttttcttcttcattttcttcgtccaggatgtgctctttgtcctccaggccattggtatcccagtggctggatctctgctctggtggtgccgaaggcaacacagcagtatccgtgctcatgctgctggtcgccctgctcttcactggcattgctgtgctaggaattgtcatgctgaaacggatccactccttataccgccgcacaggtgccagctttcagaaggcccagcaagaatttgctgctggtgtcttctccaaccctgcggtgcgaaccgcagctgccaatgcagccgctggggctgctgaaaatgccttccgggccccgtgacccctgactgggatgccctggccctgctacttgagggagctgacttagctcccgtccctaaggtctctgggacttggagagacatcactaactgatggctcctccgtagtgcccccaatcctatggccatgactgctgaacctgacaggcgtgtggggagttcactgtgacctagtccccccatcaggccacactgctgccacntctcacacgccccaacccagcttccctctgctgtgccacggctgttgcttcggttatttaaataaaaagaaagtggaactggaactgacaaaaaaaaaaaaaaaaaaaa

SEQ ID NO: 1116 - DNA, 3803 bp, Homo sapiens
  misc_feature (3795)..(3795): n equals a,t,g, or c
  misc_feature (3798)..(3799): n equals a,t,g, or c
  misc_feature (3801)..(3803): n equals a,t,g, or c
gcggccgctagkagactcatggcgctggccgccggcatctctccgcgcctgcagccgctgggtccccgcgctgctgggcgacagggtcgctcgcgcggcttctcttcaagctgcgcccaccccgaccacaccaaggaagccgccgaggccgagtcagggatggcccccggcgggcctggggaaggcgacggaagcttggtgaacgcttctagggacctattaaaagagttcccacagcccaaaaatcttctcaacagtgtgattggaagagccctcggcatctcacatgcaaaagacaaactagtctacgtgcacacaaatggaccgaagaaaaagaaagtcacactgcacataaaatggcccaagagcgtggaggtagaaggctatggcagcaagaagatcgatgctgagcggcaggctgcagctgcagcctgccagctgttcaagggttggggtctgctaggtccccggaatgagttgtttgacgcagccaaataccgagtgctagctgatcgctttggctcccctgccgacagctggtggcgtccggaacccaccatgccccctacttcctggcggcagctgaatccagagagtattcgaccaggggacctgggggcctatcccgctctttaggccgggaagaagaggaggacgaggaggaagagctagaagaagggaccatagatgttaccgacttcttgtccatgacccagcaggattcccacgctccactcagggactcaagggggagttcctttgagatgacagatgacgacagtgccattagggctctgacccagtttccacttcccaagaaccttctggccaaggtgattcagattgcaacgtcatcctccacagctaagaacctcatgcagttccatactgtgggcaccaagaccaagctgtctacactcaccctgctctggccctgccccatgacctttgttgccaaagggcgccgcaaagcagaggctgagaataaggcggcagccttggcctgcaagaaactgaagagcctgggcctggtggacaggaacaacgaaccgcttacacacgccatgtataacctggcctctttgcgtgagctgggtgagacccagcgccgaccatgcaccatccaggtgcccgagcccatcctccgcaagatagagaccttcctgaaccattaccctgtggagagttcatggatcgccccagaactccggctgcagagtgatgacatcttgcccttgggcaagractcagggcctctgagtgaccctatcacaggcaagccctatgtgcccctgttggaagcagaggaggtacgtctcagccagagtctgctagaactgtggcggcggcgagggccggtctggcaggaggccccccagctacctgtggacccacatcgggacaccatcctcaacgccattgagcagcacccggtggtggtcatctctggggacacgggctgtgggaagaccacgcgcatcccccagctgttgctggagcgctatgtgaccgagggccgaggtgcccgctgcaatgttatcatcacccaacctcgccgcatctctgctgtgtctgtggcacagcgggtcagccacgaactgggcccctccctgcgccggaatgtgggcttccaggtgcggttggaaagtaagcccccatcccgaggcggggccctgctcttctgcactgtgggtatcctgctgcgtaagctgcagagcaaccccagcctggagggcgtgagccacgtcatcgtggatgaggtgcatgagcgggacgtgaacacagactttctgctgatcctgctcaagggcctgcagcggctcaacccggccctgcggctggtgctcatgagtgccacaggggacaatgagcgcttctcccgatactttggtggctgccccgtcatcaaggtgcctggcttcatgtacccagtcaaggagcactacctagaggacatcctggccaagttgggcaagcaccagtacctgcaccggcaccggcaccatgagtctgaggatgaatgcgcactcgatttggaccttgtgactgatctggttctgcacatcgatgctcgcggggaaccaggtgggatcctgtgcttcctgcctgggtggcaggagatcaaaggagtgcagcagcgcctccaggaggccctgggcatgcacgagagcaagtacctcatcctgccagtgcactccaacatccccatgatggatcagaaggccatattccagcagcctccagttggggtgcgcaagattgtcttggccaccaacattgctgagacttccatcacaatcaatgacatcgtgcatgtggtggacagtgggctgcacaaggaagaacgctatgacctgaagaccaaggtgtcctgcctggagacagtgtgggtatcaagagccaatgtgatccagcgccggggccgggcgggccgctgccagtccggctttgcctaccacttgttccctcgaagccggctggagaaaatggtccctttccaagtgccagagatcctgcgcacacctcttgagaacctggtgctgcaagcgaaaatccacatgcctgagaagacggcggtggagttcctgtccaaggctgtggacagtccaaacatcaaggcagtggacgaggctgtgatcttgctccaggagatcggggtgctggaccagcgggagtacctgactaccctggggcagcgcctggctcacatctccaccgacccccggttggccaaggccattgtgttggctgccatcttccgttgcctgcacccactactggtggtcgtttcctgcctcacccgggaccccttcagcagcagcctacagaaccgggcagaggtggacaaggtgaaagcactgttgagccatgacagcggcagtgaccacctggcctttgtgcgggctgtcgccggctgggaggaggtgctgcgttggcaggaccgcagctcccgggagaattacctggaggaaaacctgctgtacgcacccagcctgcgcttcatccacggactcatcaagcagttctcagagaacatttatgaggccttcctggtggggaagccctcggactgcaccctggcctccgcccagtgcaacgagtacagtgaggaggaggagctggtgaagggcgtgctgatggccggcctctaccccaacctcatccaggtgaggcagggcaaggtcacccggcaggggaagttcaagcccaacagcgtcacatataggaccaaatcaggcaacatcctgctgcacaagtcgaccattaacagggaggccacacggttacggagccgatggctgacgtatttcatggcagtcaagtccaatggcagcgtcttcgtccgggactcctctcaggtgcacccgctagctgtgctgctgctgaccgacggggacgtgcacatccgtgatgacgggcgccgggccaccatctcactgagcgacagtgacctgctgcggctggagggtgactcgcgtaccgtgcggctgctgaaggagctgcggcgggccctgggccgcatggtggagcggagcctgcgcagcgagctggctgcacttccccccagcgtacaggaggagcacgggcagctgcttgcgctactggcagagctgctgcgaggaccctgtggcagctttgatgtgcgcaagacagctgacgactgagccctgcttctgctggggctgtgtacagagtgcaaatgtttatttaaaataaagttctatttatcccttgtgaaaaaaaaaaaaacacacarataacwcacacaacatgactaacacaaaaacggggggntanntnnn

SEQ ID NO: 1117 - DNA, 880 bp, Homo sapiens
ctgagaaagattaagctgcaggctccctgcccataaaacagggtgtgaaaggatctcagcggctgccccaccatggctacctgggccctcctgctccttgcagccatgctcctgggcaacccaggccttgaggtcagtgtgagccccaagggcaagaacacttctggaagggagagtggatttggctgggccatctggatggaaggtctggtcttctctcgtctgagccctgagtactacgacctggcaagagcccacctgcgtgatgaggagaaatcctgcccgtgcctggcccaggagggcccccagggtgacctgttgaccaaaacacaggagctgggccgtgactacaggacctgtctgacgatagtccaaaaactgaagaagatggtggataagcccacccagagaagtgtttccaatgctgcgacccgggtgtgtaggacggggaggtcacgatggcgcgacgtctgcagaaatttcatgaggaggtatcagtctagagttacccagggcctcgtggccggagaaactgcccagcagatctgtgaggacctcaggttgtgtataccttctacaggtcccctctgagccctctcaccttgtcctgtggaagaagcacaggctcctgtcctcagatcccgggaacctcagcaacctctgccggctcctcgcttcctcgatccagaatccactctccagtctccctcccctgactccctctgctgtcctcccctctcacgagaataaagtgtcaagcaagattttagccgcagctgcttcttctttggtggatttgaggggtgggtgtcagtggcatgctggggtgagctgtgtagtccttcaataaatgtctgtcgtgtgtcccataaaaaaaaaa

SEQ ID NO: 1118 - DNA, 2042 bp, Homo sapiens
  misc_feature (23)..(23): n equals a,t,g, or c
tcgacactagtggatccaaaganttcagcacagcacggatccgttgcggctgcagctctgcagtcgggccgttccttcgccgccgccaggggtagcggtgtagctgcgcagtcgcgcgcgctaccgcacccaggttcggcccgtagcgtctggcagcccggcgccatcttcatcgagcgccatggccgcagcctgcgggccgggagcggccgggtactgcttgctcctcggcttgcatttgtttctgctgaccgcgggccctgccctgggctggaacgaccctgacagaatgttgctgcgggatgtaaaagctcttaccctccactatgaccgctataccacctcccgcaggctggatcccatcccacagttgaaatgtgttggaggcacagctggttgtgattcttataccccaaaagtcatacagtgtcagaacaaaggctgggatgggtatgatgtacagtgggaatgtaagacggacttagatattgcatacaaatttggaaaaactgtggtgagctgtgaaggctatgagtcctctgaagaccagtatgtactaagaggttcttgtggcttggagtataatttagattatacagaacttggcctgcagaaactgaaggagtctggaaagcagcacggctttgcctctttctctgattattattataagtggtcctcggcggattcctgtaacatgagtggattgattaccatcgtggtactccttgggatcgcctttgtagtctataagctgttcctgagtgacgggcagtattctcctccaccgtactctgagtatcctccattttcccaccgttaccagagattcaccaactcagcaggacctcctcccccaggctttaagtctgagttcacaggaccacagaatactggccatggtgcaacttctggttttggcagtgcttttacaggacaacaaggatatgaaaattcaggaccagggttctggacaggcttgggaactggtgggatactaggatatttgtttkgcagcaatagagcggcaacacccttctcagactcgtggtactacccgtcctatcctccctcctaccctggcacgtggaatagggcttactcaccccttcatggaggctcgggcagctattcggtatgttcaaactcagacacgaaaaccagaactgcatcaggatatggtggtaccaggagacgattaagtagaaagttggagtcaaacactggatgcagaaattttggatttttcatcactttctctttagaaaaaaagtactacctgttaacaattgggaaaaggggatattcaaaagttctgtggtgttatgtccagtgtagctttttgtattctattatttgaggctaaaagttgatgtgtgacaaaatacttatgtgttgtatgtcagtgtaacatgcagatgtatattgcagtttttgaaagtgatcattactgtggaatgctaaaaatacattaatttctaaaacctgtgatgccctaagaagcattaagaatgaaggtgttgtactaatagaaactaagtacagaaaatttcagttttaggtggttgtagctgatgagttattacctcatagagactataatattctatttggtattatattatttgatgtttgctgttcttcaaacatttaaatcaagctttggactaattatgctaatttgtgagttctgatcacttttgagctctgaagctttgaatcattcagtggtggagatggccttctggtaactgaatattaccttctgtaggaaaaggtggaaaataagcatctagaaggttgttgtgaatgactctgtgctggcaaaaatgcttgaaacctctatatttctttcgttcataagaggtaaaggtcaaatttttcaacaaaagtcttttaataacaaaagcatgcagttctctgtgaaatctcaaatattgttgtaatagtctgtttcaatcttaaaaagaatcaataaaaacaaacaaggaaaaaaaaaaaaaaaaaaaaaaaaaaaaaaaaaaaaaaaaaaaaaaaaaaaa

SEQ ID NO: 1119 - DNA, 1401 bp, Homo sapiens
ttttttttttatcaggcctatctgtcaccaactttatttctggcttcagtttgatagtcaatgaaacaacttgttcaatgtcccctcccccagtgttcaaggtacccttctatatattaactctttgctaacatatttaatatttaaatacgaggaaaaacaataaattactcgttggctgagagctggctgctggctggcagacaggagcggctgttctgcccctctcctgaccctgcctcggatgaggctccgaggccccaggaccccagtgaggtagcagaattctgtacacagtacttattaccagggactcctggggtccactgctttagtgctggggccctgagtctctgaacccttggctccaagtgccagcagccacagtcttccccaatccccaacggtgacaaacacactcatttaaataacacacaataataaataagaccaagaagaagtgtgcctgagctgctgtctgcctcagttgcctgtgtgtgaagtgggtccctgtcccaccacatgtctggcaaggggggcacccactgtaatgctacagtgtgctctagggcaggggaggggtgtagggacatgtcatccctgggtccaccgagctcagggccctggacagaggaggcccaccaggctgagccctgggcaaggggaaggctgaggtcggctaggctgaagacgggcagcacaggctgaggtctaagctaaggaattttacccctccctaaccctccttcccgcctacccaagacatttttgacatcagaaagaaaaatgaatctgcaacttcaatagtcaggtcctgtctctgcaaataatgatgctttcgaagtttcagttgaaccgtccctcgcgaaaaagtttctttaaatgtaagagcaggtcctttacaaactgggccacctcgattttggtgtctcggacatgcaagctggaaaactgcccagctgagaccttgtgcgggcagaatccgctcagcatcctctgggtcttctcgatggcactgcagcctgacacgttgatcagggattccagggctgcacagtacatgccagctgtcaggttgatgctccataccatgctgccattgcagagcggagccttctggttctgggtgatgttgaccagctcctcaatgagctccctgagggctgtagagggaggcacagggcctggggaggcaaagccgccaaggcaagtgagagcaatgaccgtggtcaacaaaagcgccatgaggcccagtgccaacaggagaggattgaggagcctcgtgccgaattcctgcagcccgggggatccactagttctagagcggccgccaccgcggtggagctccagcttttgttccctttagtgagggttaatttcgagctggcgtaaaatggcgat

SEQ ID NO: 1120 - DNA, 576 bp, Homo sapiens
  misc_feature (567)..(567): n equals a,t,g, or c
  misc_feature (569)..(569): n equals a,t,g, or c
cacaaactcatccatccccagttgattggaagaaacaacgatgactcctgggaagacctcattggtgtcactgctactgctgctgagcctggaggccatagtgaaggcaggaatcacaatcccacgaaatccaggatgcccaaattctgaggacaagaacttcccccggactgtgatggtcaacctgaacatccataaccggaataccaataccaatcccaaaaggtcctcagattactacaaccgatccacctcaccttggaatctccaccgcaatgaggaccctgagagatatccctctgtgatctgggaggcaaagtgccgccacttgggctgcatcaacgctgatgggaacgtggactaccacatgaactctgtccccatccagcaagagatcctggtcctgcgcagggagcctccacactgccccaactccttccggctggagaagatactggtgtccgtgggctgsacctgtgtcaccccgattgtcaccatgtggcctaagagctctggggagccacactycccaaagcagttagactatggagagccgacccagccctnangaaccct

SEQ ID NO: 1121 - DNA, 1350 bp, Homo sapiens
ccacgcttccgctcgcaggggggccttgtktgccgggctctgctttctgtcatggatgatcacaacgtggattctttcatctccctctcctctccacagatgggacagtatggagacacggactacttgaagtggctgttccccacctccatgcggtctaacctctatcggatctgctatagcccctggggccaggaattctccatctgcaactactggcatgatccccaccacgatgacttgtacctcaatgccagcagcttcctggccctgatcaatggggaaagaggcacgagcaatgccacagtatggcggaagaactttctgcgtgtgggccacctggtgctgattgggggccctgatgatggtgttattactccctggcagtccagcttctttggtttctatgatgcaaatgagaccgtcctggagatggaggagcaactggtttatctgcgggattcttttgggttgaagactctattggcccggggggccatagtgaggtgtccaatggccggtatctcccacacagcctggcactccaaccgtaccctttatgagacctgcattgaaccttggctctcctgaggatatattcaggggtccccaggaactcctcggtccagagaccaagtggtggccttggaaagcagatgtcaggctttggtgtgcctgtgaccacctcattgctcccatattatcccccatttttagtagagacggggttttagtagagacttggcctcccagaacccccttcctctgctcctccatgaatgacaattccaggcctcccctacctcatgtcctctcatttgggggattgctccgtgctgtccctttctctcaaggccgaagttgggaagtgagaaaccatgtttttaacttgtgggctgcttttggctgctgctggctccttccgtaatctggctgtatgggtggagaacccaccccctgcccaccacaggggtctccttccaggccactcaggacatttttagcttctctcctccccatgttcccttttttctctaaagtcccctgacatcagccctcccaactcctaagagggactacccatgagagtggggttctgaggctcccctatggggacagttccgttcttgaagtgtcagtgttggggaatatctgtggcctatgaggcccatctcaggtttggggatcccccagtccctatgatcagtgttggagtacccccctgggagagcctagtttctttgaggccccaggccctcttttaactacctttgaataggtgttatccctgtatttatggaaataaagttccatttcctcagtgtgaaaaaaaaaaaaaaaaaaactcga

SEQ ID NO: 1122 - DNA, 1032 bp, Homo sapiens
  misc_feature (404)..(404): n equals a,t,g, or c
gaattcggcacgagtttgtctccttccttaaaaagatgagcaataacaaagaaacataataaaggctcaaatgtggtctcctaatgagagatcatggctttaggggaaggtaaacaccctggtgtggatgcacacccacgaacctagatagatggctctgtacttttagtctgtgatttgggtcatggcctttcagaattttgcacaaaagcattccaagagtgatatgccgttacttcttctgtattgtctgatagaatcatttgggagtgcatgttctgctgtattatgtatactgtatctttgtgtatgggtgatcttttccggaggtggccttgtggtgttatctgaagctgtgttttcatattttgaaaaaagatattttcaattttatttaatatgcnaaaaacttttttcttgattgagcttctgttttccccccattttgttggggtttwatttttttgtttgtttgtkttggttgttttttgcaatgctgcatctcccaaagcatgctgggagctaagtgatcattatgcgtcatgttttgtgggcaactttttttatagtgaatcaaaaggtgggtgcaaaggggggaaggagtgtgcatggcattgtcattcagtgtttactgtacttttctgacttgtgataccagcattgcaaagcctattgtctttttcgaacattgatcttgactttgatattcctaacatatcttatataatcactgtgttttcctttcagtgcaatgcatttttaagacactcacaaccccctacctgaaggcaagctcaggtgaaaatcgggcatgataggcgataatgagcaggatttggaatgtctaggaagctaatcttgtctgacacgcagttacacgtgtgatggcgttttgcttccctctttctcttactgaggccgctccattcctgtggattagcctgatytccagccacattttaatcttcaattcagtttgaagattaaaatgaaactgctgttaggggcaaaaaaaaaaaaaaaaaaactcga

SEQ ID NO: 1123 - DNA, 759 bp, Homo sapiens
aattcgcggccgcgtcgacacggctgcgagaagacgacagaargggacaggacacagctgggttctgaagcttctgagttctgcagcctcacctctgagaaaacctcttttccaccaataccatgaagctctgcgtgactgtcctgtctctcctcatgctagtagctgccttctgctctccagcgctctcagcaccaatgggctcagaccctcccaccgcctgctgcttttcttacaccgcgaggaagcttcctcgcaactttgtggtagattactatgagaccagcagcctctgctcccagccagctgtggtattccaaaccaaaagaagcaagcaagtctgtgctgatcccagtgartcctgggtccaggagtacgtgtatgacctggaactgaactgagctgctcagagacaggaagtcttcagggaaggtcacctgagcccggatgcttctccatgagacacatctcctccatactcaggactcctctccgcagttcctgtcccttctcttaatttaatcttttttatgtgccgtgttattgtattaggtgtcatttccattatttatattagtttagccaaaggataagtgtcccctatggggatggtccactgtcactgtttctctgctgttgcaaatacatggataacacatttgattctgtgtgttttcataataaaactttaaaataaaatgcaaaaaaaaaaaaaaaataatatgcggcccgattcgggctacttgccaattccccttg

SEQ ID NO: 1124 - DNA, 1995 bp, Homo sapiens
ggcacgaggcaatccctgctgccccttagccacccagggtcttgtgtgggtatgagtgtagaggatgggggtatgccaggcctgggccgtcccaggcaggcccgctggaccctgatgctactcctatccactgccatgtacggtgcccatgccccattgctggcactgtgccatgtggacggccgagtgcccttccggccctcctcagccgtgctgctgactgagctgaccaagctactgttatgcgccttctcccttctggtaggctggcaagcatggccccaggggcccccaccctggcgccaggctgctcccttcgcactatcagccctgctctatggcgctaacaacaacctggtgatctatcttcagcgttacatggaccccagcacctaccaggtgctgagtaatctcaagattggaagcacagctgtgctctactgcctctgcctccggcaccgcctctctgtgcgtcaggggttagcgctgctgctgctgatggctgcgggagcctgctatgcagcagggggccttcaagttcccgggaacacccttcccagtccccctccagcagctgctgccagccccatgcccctgcatatcactccgctaggcctgctgctcctcattctgtactgcctcatctcaggcttgtcgtcagtgtacacagagctgctcatgaagcgacagcggctgcccctggcacttcagaacctcttcctctacacttttggtgtgcttctgaatctaggtctgcatgctggcggcggctctggcccaggcctcctggaaggtttctcaggatgggcagcactcgtggtgctgagccaggcactaaatggactgctcatgtctgctgtcatgaagcatggcagcagcatcacacgcctctttgtggtgtcctgctcgctggtggtcaacgccgtgctctcagcagtcctgctacggctgcagctcacagccgccttcttcctggccacattgctcattggcctggccatgcgcctgtactatggcagccgctagtccctgacaacttccaccctgattccggaccctgtagattgggcgccaccaccagatccccctcccaggccttcctccctctcccatcagcagccctgtaacaagtgccttgtgagaaaagctggagaagtgagggcagccaggttattctctggaggttggtggatgaaggggtacccctaggagatgtgaagtgtgggtttggttaaggaaatgcttaccatcccccacccccaaccaagttcttccagactaaagaattaaggtaacatcaatacctaggcctgagaaataaccccatccttgttgggcagctccctgctttgtcctgcatgaacagagttgatgaaagtggggtgtgggcaacaagtggctttccttgcctactttagtcacccagcagagccactggagctggctagtccagcccagccatggtgcatgactcttccataagggatcctcacccttccactttcatgcaagaaggcccagttgccacagattatacaaccattacccaaaccactctgacagtctcctccagttccagcaatgcctagagacatgctccctgccctctccacagtgctgctccccacacctagcctttgttctggaaaccccagagagggctgggcttgactcatctcagggaatgtagcccctgggccctggcttaagccgacactcctgacctctctgttcaccctgagggctgtcttgaagcccgctacccactctgaggctcctaggaggtaccatgcttcccactctggggcctgcccctgcctagcagtctcccagctcccaacagcctggggaagctctgcacagagtgacctgagaccaggtacaggaaacctgtagctcaatcagtgtctctttaactgcataagcaataagatcttaataaagtcttctaggctgtagggtggttcctacaaccacaaaaaaaaaaaaaaaaaa

SEQ ID NO: 1125 - DNA, 933 bp, Homo sapiens
ggcacgaggaaaaatgatcacttcttcttttttggctttgtggtggcatgtgtgtgtgtgtatttgtatatacacacatatatatataaatacacagacacacatatatacaaacacacgcattcattttcgtccacagttcctggctcataactcccacagcccttgttacactcttttgttacaacattgggtgtgtcaggcctcaggagacaatcactctaacctcctgcccttccttttacctgcccaagacaggactctaatcttccctacctttctgatggtgggtcataaaactcattccagagacggtcccaccccatatcctgctagaaggaatgctgctgtcatgaagcttccataaaaaccaaggggactggattcagagagcttccagataactgaacatacagaggttctagaagggtggtgcgcccagggagggcacaggaagctccatgcccttccttcatacctcaccctatgcatctctttatctgtatcttttataatatcctttataataaaccagtaaatgtatttcccttagttttgtgagccactccagcaaattgaacctacagagggaattgtgggaacctcaacttgaagccagtcggtcagaagttccaaaggtcacccgggcgcggtggttcacgcctgtaatcccagcactttgggaggccgaggcgggtggatcaggagtttgagaccagcctagccaacatggtgaaaccctgtctttactgaaaatacgaaaaattagctgggcatcgtggtgggcgcctgtaatcccagctacttgggaggctgaagcaggagaattgcttgagcctgagaggcagaggctgcagtgagctgagatcgcgccactgcactccagcccgggcaacagagtgagactgtctcaaaaaaaaaaaaaaaaaaaaa

SEQ ID NO: 1126 - DNA, 1273 bp, Homo sapiens
  misc_feature (507)..(507): n equals a,t,g, or c
gtataagtatatatgtgtgtatatatgtatatatacacgtatatacacacacacccctaagtcatgactttggagcaattgtaagtggtgtagtgcttaattttggcattcacacattgattgttagcatatagaaatgggattgatttttatgtgatcttgctaaactttatgcatttttaaaattcctttggatttcctatgtagatatttatgtcctgaaaacaggaatgtatttatcctttcaaatcaatatgctttttattttgttatttatgaccacttcattaaaatataattcacatgccatacacttcacccatttaaaatgtataattaggccaggtgtggtggctcacgtctgtaatcccagcagtttgggaggccaaggccctcagatcttgagcccaggagttcaagaccaccctgggcaacaggcaaaaccctgkctctattttttaaaatmcmagaattamccgcagtggcacgcacctgtcgtcccarcancccaggaagctgargkaggaggatcacttaagcctgggaagtcmaagcctgcaagkgaaccatgatagcaccmctgcrgyccaagcctgggcgacagagtgagaccccatctcgaaaacaaaaatgtataattcagtggttttaagtctctttgcagatacatgcaaccatcaccacaatttgcacattttctaagcctcatatactgatgtgatattttggtgttttgtgactggcttcatttacttagcatattgttttcatgtttcattcatgtcgcatgtatgagtattcattcctttatttggctgaataatattccattatagtttgtgccacattttgtttatccattcatccattgatggacatgtggattgtttccaccttctggataatatgaactgatacagtttggatattttgtcccctccaaatctcatgaaataggatcaccagtgttggagaatggggcctgttaggaagtgtttggatcataggaacatctgtcataaatggcttggtgccatccttgtaatgagtgagttcttgctctatattagttcacttgaaagctggttgttgggaactcctgccctatctgttctgccctctctcgtcatgtgacatgcctgctccttgttcaccttctgtcatgagtaaaagcttcctaaggccttcccaggagccaagcagatgtcagtaccatgcttgtacagcctgcagaactgtgagccaaataaacttctttataaattaaaaaaaa

SEQ ID NO: 1127 - DNA, 1951 bp, Homo sapiens; identical to SEQ ID NO: 669

SEQ ID NO: 1128 - DNA, 1321 bp, Homo sapiens
  misc_feature (1307)..(1307): n equals a,t,g, or c
  misc_feature (1312)..(1313): n equals a,t,g, or c
  misc_feature (1317)..(1317): n equals a,t,g, or c
gaagtgctgggattataggcttgagccactgggcctggctgaggcagtttctttttgaaatatattttgtgaaggagaaaaagaggagttcagtttaaagaaacaaatgacataagaggtggtatgcagagatgccaaagcatcttgaaggtgctttttttttggaaacagagtcttgcttcattgcccagtctggtctgcagtggtgcaatcatggytccctgcagccttgaccttctgggctcaagtaatcctcccacctcagcctctcaagtagctgggactacagatgcatgccactatgtctggctaatctttaaattttttgtagaagccagctctcaccatattgcccaggctggtcttgacctcctgtcctcgagcaaaaataccgattttgattaagtctggggtargacctggggctgggattctaaccagctcccaggtggtgctaatgctgctggtctacagaccacacgtggagtagccagtgtagagttcatgtagcaatagtgatgtcatagaaatagccagtatctgtatacttgctttgytgtatgtcacgcactgtatagtgatgtacatgcatctcatttgaccctcaccccgcccctttgggggtagaaaggattgygctcatttcacactcaaggaaactgaggcacagacaggcaaagtagcttggcgaaacagaaaggaacttagaggcaggccctgattagctcagagactagaaggccttgtgcgtcatcctgaacagcttggacttgatcttgaaggyggagkkagaattawktttggtaattaaacaggaactgtaggaaattcaccttgcatagtgattgctttggccacgtgtgccctgycaccgyccccccacctcagtgaagtgtcatgcgaagttgggttygtaaatgaaggcccgaatgctttcctgacaagtttgttttaaatcaagctgctaattagtcccagtccccctcccccggtatgtatttttttgttgatgtcgtttcacttcatttagttgaagtgattgattcagttcagtgtttgaacttctttttgaacctcaccttaataacctgtctaaacatcaaggttaaaccttcttgctaacacagcagtattgcttggtaagactggctcacagtccaaggaaatgcttgcccagagagggcaaactgccttaactccttaacctgagctcattaaaaaaaattcaaatgactgattccttgtcacagttctacctacattgtttttatttttgtccaggtttcagctagttaaatgcttaagtntagcnnaagnaagc

SEQ ID NO: 1129 - DNA, 1449 bp, Homo sapiens
aattcggcacgagccagcagctgctgccagccccatgcccctgcatatcactccgctaggcctgctgctcctcattctgtactgcctcatctcaggcttgtcgtcagtgtacacagagctgctcatgaagcgacagcggctgcccctggcacttcagaacctcttcctctacacttttggtgtgcttctgaatctaggtctgcatgctggcggcggctctggcccaggcctcctggaaggtttctcaggatgggcagcactcgtggtgctgagccaggcactaaatggactgctcatgtctgctgtcatgaagcatggcagcagcatcacacgcctctttgtggtgtcctgctcgctggtggtcaacgccgtgctctcagcagtcctgctacggctgcagctcacagccgccttcttcctggccacattgctcattggcctggccatgcgcctgtactatggcagccgctagtccctgacaacttccaccctgattccggaccctgtagattgggcgccaccaccagatccccctcccaggccttcctccctctcccatcagcagccctgtaacaagtgccttgtgagaaaagctggagaagtgagggcagccaggttattctctggaggttggtggatgaaggggtacccctaggagatgtgaagtgtgggcttggttaaggaaatgcttaccatcccccacccccaaccaagttcttccagactaaagaattaaggtaacatcaatacctaggcctgagaaataaccccatccttgttgggcagctccctgctttgtcctgcatgaacagagttgatgaaaagtggggtgtgggctaacaaagtggctttccttgcctactttagtcacccagcagagccactggagctggctagtccagcccaagccatggtgcatgactcttccataagggatcctcacccttccactttcatgcaagaaggcccagttgccacagattatacaaccattacccaaaccactctgacagtctcctccagttccagcaatgcctagagacatgctccctgccctctccacagtgctgctccccacacctagcctttgttctggaaaccccagagagggctgggcttgactcatctcagggaatgtagcccctgggccctggcttaagccgacactcctgacctctctgttcaccctgagggctgtcttgaagcccgctacccactctgaggctcctaggaggtaccatgcttcccactctggggcctgcccctgcctagcagtctcccagctcccaacagcctggggaagctctgcacagagtgacctgagaccaggcacaggaaacctgtagctcaatcagtgtctctttaactgcataagcaataagatcttaataaagtcttctaggctgtagggtggttcctacaaccacagccaaaaaaaaaaaaaaaaaa

SEQ ID NO: 1130 - DNA, 2829 bp, Homo sapiens
gagatggcggatgacaaggaagcttttataggaaaaggtctttctggctcaccccatcccctcccaattcccagcttctgatggaattgagcaaggggtggggcttagtcagactgctggagccagcctctcgcttgtcctaggattctctgcctaagcttaaggacctggcatttctcaagaaccagctggaaagcctgcagcggcgtgtagaagacgaagtcaacagtggagtgggccaggatggctcgctgttgtcctccccgttcctcaagggattcctggctggctatgtggtggccaaactgagggcatcagcagtattgggctttgctgtgggcacctgcactggcatctatgcggctcaggcatatgctgtgcccaacgtggagaagacattaagggactatttgcagttgctacgcaaggggcccgactagctctaggtgccatggaagaggcaggatgagcagctcagccttcaggtggagacactttatctggattccccagctgtcatccatttgctatctccaactttcctgccaccttcatccttgcctcccttcctgcagattgtggacagtagttcctcagcctgcaccctggattccttcttccccttcctagctccatgggactcgccccaagactgtggcttcaaggaccaccagccccttactcttcaagccctgactgtggagttggtagatgcctctgatcctcagtattctctctggcaatgttccacggcttctccttcctgggagctggctccataacttgattttccccaaacgtgttgcaatccctgctgccccttagccacccagggtcttgtgtgggtatgagtgtagaggatgggggtatgccaggcctgggccgtcccaggcaggcccgctggaccctgatgctactcctatccactgccatgtacggtgcccatgccccattgctggcactgtgccatgtggacggccgagtgcccttccggccctcctcagccgtgctgctgactgagctgaccaagctactgttatgcgccttctcccttctggtaggctggcaagcatggccccaggggcccccaccctggcgccaggctgctcccttcgcactatcagccctgctctatggcgctaacaacaacctggtgatctatcttcagcgttacatggaccccagcacctaccaggtgctgagtaatctcaagattggaagcacagctgtgctctactgcctctgcctccggcaccgcctctctgtgcgtcaggggttagcgctgctgctgctgatggctgcgggagcctgctatgcagcagggggccttcaagttcccgggaacacccttcccagtccccctccagcagctgctgccagccccatgcccctgcatatcactccgctaggcctgctgctcctcattctgtactgcctcatctcaggcttgtcgtcagtgtacacagagctgctcatgaagcgacagcggctgcccctggcacttcagaacctcttcctctacacttttggtgtgcttctgaatctaggtctgcatgctggcggcggctctggcccaggcctcctggaaggtttctcaggatgggcagcactcgtggtgctgagccaggcactaaatggactgctcatgtctgctgtcatgaagcatggcagcagcatcacacgcctctttgtggtgtcctgctcgctggtggtcaacgccgtgctctcagcagtcctgctacggctgcagctcacagccgccttcttcctggccacattgctcattggcctggccatgcgcctgtactatggcagccgctagtccctgacaacttccaccctgattccggaccctgtagattgggcgccaccaccagatccccctcccaggccttcctccctctcccatcagcagccctgtaacaagtgccttgtgagaaaagctggagaagtgagggcagccaggttattctctggaggttggtggatgaaggggtacccctaggagatgtgaagtgtgggtttggttaaggaaatgcttaccatcccccacccccaaccaagttcttccagactaaagaattaaggtaacatcaatacctaggcctgagaaataaccccatccttgttgggcagctccctgctttgtcctgcatgaacagagttgatgaaagtggggtgtgggcaacaagtggctttccttgcctactttagtcacccagcagagccactggagctggctagtccagcccagccatggtgcatgactcttccataagggatcctcacccttccactttcatgcaagaaggcccagttgccacagattatacaaccattacccaaaccactctgacagtctcctccagttccagcaatgcctagagacatgctccctgccctctccacagtgctgctccccacacctagcctttgttctggaaaccccagagagggctgggcttgactcatctcagggaatgtagcccctgggccctggcttaagccgacactcctgacctctctgttcaccctgagggctgtcttgaagcccgctacccactctgaggctcctaggaggtaccatgcttcccactctggggcctgcccctgcctagcagtctcccagctcccaacagcctggggaagctctgcacagagtgacctgagaccaggtacaggaaacctgtagctcaatcagtgtctctttaactgcataagcaataagatcttaataaagtcttctaggctgtagggtggttcctacaaccacagccaaaaaaaaaaaaaaaaaactcgagggggggcccgtcccaatcsccmtatagt

SEQ ID NO: 1131 - DNA, 1914 bp, Homo sapiens
tcatctgccagagcagctcaggccacatgcatgccctggtccttccaggggtcacccgagaggatgctggcgaggtcacctttagcctgggcaactcccgtaccactacgcttctcagagtaaaatgtgtcaagcacagtcccccaggaccccccatattggcagagatgttcaagggccacaagaacacggtcctgttgacctggaagcctcccgagccagctcccgagaccccattcatctaccggctggagcggcaggaagtgggctctgaagactggattcagtgcttcagcatcgagaaagccggagccgtggaggtgccgggcgactgtgtgccctccgagggtgactaccgcttccgcatctgcacagtcagcggacatggccgtagtccccacgtggtgttccacggttctgctcaccttgtgcccacagctcgcctggtggcaggtctggaggatgtgcaggtatacgacggggaagatgccgtcttctccctcgatctctccaccatcatccagggtacctggttccttaatggggaagagctcaagagtaacgagccggagggccaggtggaacctggggccctgcggtaccgtatagagcagaagggtctgcagcacagactcatcctgcatgccgtcaagcaccaggacagcggtgccctggtcggcttcagctgccccggcgtgcaggactcagctgccctcacaatccaagagagcccggtgcacatcctagcccccaggacaaggtgtcgttgaccttcacaacctcagagcgggtggtgctgacttgtgagctctcaagggtggacttcccggcaacctggtacaaggatgggcagaaggtggaggagagcgagttgctggtggtgaagatggatgggcgcaaacaccgtctgatcctgcctgaggccaaagtccaggacagtggcgagtttgagtgcaggacagaaggggtctcggccttcttcggcgtcactgtccaagatcctcccgtgcacatcgtggacccccgagaacatgtgttcgtgcatgccataacttccgagtgtgtcatgctggcctgtgaggtggaccgagaggacgcccctgtgcgttggtacaaggacgggcaggaggtggaggagagtgacttcgtggtgctggagaatgaggggccccatcgccgcctggtgctgcccgccacccagccctcagacgggggcgagtttcagtgcgtcgctggagatgagtgtgcctacttcactgtcaccatcacagacgtctcctcgtggatcgtgtatcccagcggcaaggtgtatgtggcagccgtgcgcctggagcgtgtggtgctgacctgtgagctatgccggccctgggcagaggtgcgctggaccaaggatggagaggaggtggtggagagccccgcgctgctcctgcagaaggaagacactgtccgccgcctggtgctgcccgctgtccagctcgaggactccggcgagtacttgtgtgaaattgacgatgagtcggcctccttcactgtcaccgtcacagagtcttaccaaagtcaggacagttcaaataacaatccggagttatgcgtcctcttgaaaaagccgaagacccggcggctctggtcccgcttccccccatggcgacgaacagctggcactgagtagcagctgcccccatagtttggggcccacattcctctgtcccacctccctgccattgctttttgcctctccccagactgcttcagccgctaacctaacctggcccctgtgggcatttgagtttgcgacccctgtgttaaaccaataaacatgcaaataaatgtaaaaaaaaaaaaaaaaaaaaaaaaaaaaaaaaaaaaaaaaaaaaaaaaaaaaaaaaaaaaaaaaaaaaaaaaaaaaaaaaaaaa

SEQ ID NO: 1132 - DNA, 1981 bp, Homo sapiens
ccacgcgtccggcgcgggggtttttctgctgccgcttcctttctgcccttttaatttccccgaaatcagactgctgccttggaccgggacagctcgcggcccccgagagctctagccgtcgaggagctgcctggggacgtttgccctggggccccagcctggcccgggtcaccctggcatgaggagatgggcctgttgctcctggtcccattgctcctgctgcccggctcctacggactgcccttctacaacggcttctactactccaacagcgccaacgaccagaacctaggcaacggtcatggcaaagacctccttaatggagtgaagctggtggtggagacacccgaggagaccctgttcacctaccaaggggccagtgtgatcctgccctgccgctaccgctacgagccggccctggtctccccgcggcgtgtgcgtgtcaaatggtggaagctgtcggagaacggggccccagagaaggacgtgctggtggccatcgggctgaggcaccgctcctttggggactaccaaggccgcgtgcacctgcggcaggacaaagagcatgacgtctcgctggagatccaggatctgcggctggaggactatgggcgttaccgctgtgaggtcattgacgggctggaggatgaaagcggtctggtggagctggagctgcggggtgtggtctttccttaccagtcccccaacgggcgctaccagttcaacttccacgagggccagcaggtctgtgcagagcagctgcggtggtggcctcctttgagcagctcttccgggcctgggaggagggcctggactggtgcaacgcgggctggctgcaggatgccacggtgcagtaccccatcatgttgccccggcagccctgcggtggcccaggcctggcacctggcgtgcgaagctacggcccccgccaccgccgcctgcaccgctatgatgtattctgcttcgctactgccctcaaggggcgggtgtactacctggagcaccctgagaagctgacgctgacagaggcaagggaggcctgccaggaagatgatgccacgattgccaaggtgggacagctctttgccgcctggaagttccatggcctggaccgctgcgacgctggctggctggcagatggcagcgtccgctaccctgtggttcacccgcatcctaactgtgggcccccagagcctggggtccgaagctttggcttccccgacccgcagagccgcttgtacggtgtttactgctaccgccagcactaggacctggggccctcccctgccgcattccctcactggctgtgtatttattgagtggttcgttttcccttgtgggttggagccattttaactgtttttatacttctcaatttaaattttctttaaacatttttttactattttttgtaaagcaaacagaacccaatgcctccctttgctcctggatgccccactccaggaatcatgcttgctcccctgggccatttgcggttttgtgggcttctggagggttccccgccatccaggctggtctccctcccttaaggaggttggtgcccagagtgggcggtggcctgtctagaatgccgccgggagtccgggcatggtgggcacagttctccctgcccctcagcctgggggaagaagagggcctcgggggcctccggagctgggctttgggcctctcctgcccacctctacttctctgtgaagccgctgaccccagtctgcccactgaggggctagggctggaagccagttctaggcttccaggcgaaagctgagggaaggaagaaactcccctccccgttccccttcccctctcggttccaaagaatctgttttgttgtcatttgtttctcctgtttccctgtgtggggaggggccctcaggtgtgtgtactttggacaataaatggtgctatgactgccttccgccaaaaaaaaaaaaaaaaaaaaaaaaaaaaaaaaaaaaaa

SEQ ID NO: 1133 - DNA, 1718 bp, Homo sapiens
tcgacccacgcgtccgaaggaactggtctgctcacacttgctggcttgcgcatcaggactggctttatctcctgactcacggtgcaaaggtgcactctgcgaacgttaagtccgtccccagcgcttggaatcctacggcccccacagccagatcccctcagccttccaggtcctcaactcccgcggacgctgaacaatggcctccatggggctacaggtaatgggcatcgcgctggccgtcctgggctggctggccgtcatgctgtgctgcgcgctgcccatgtggcgcgtgacggccttcatcggcagcaacattgtcacctcgcagaccatctgggagggcctatggatgaactgcgtggtgcagagcaccggccagatgcagtgcaaggtgtacgactcgctgctggcactgccgcaggacctgcaggcggcccgcgccctcgtcatcatcagcatcatcgtggctgctctgggcgtgctgctgtccgtggtggggggcaagtgtaccaactgcctggaggatgaaagcgccaaggccaagaccatgatcgtggcgggcgtggtgttcctgttggccggccttatggtgatagtgccggtgtcctggacggcccacaacatcatccaagacttctacaatccgctggtggcctccgggcagaagcgggagatgggtgcctcgctctacgtcggctgggccgcctccggcctgctgctccttggcggggggctgctttgctgcaactgtccaccccgcacagacaagccttactccgccaagtattctgctgcccgctctgctgctgccagcaactacgtgtaaggtgccacggctccactctgttcctctctgctttgttcttccctggactgagctcagcgcaggctgtgaccccaggagggccctgccacgggccactggctgctggggactggggactgggcagagactgagccaggcaggaaggcagcagccttcagcctctctggcccactcggacaacttcccaaggccgcctcctgctagcaagaacagagtccaccctcctctggatattggggagggacggaagtgacagggtgtggtggtggagtggggagctggcttctgctggccaggatggcttaaccctgactttgggatctgcctgcatcggtgttggccactgtccccatttacattttccccactctgtctgcctgcatctcctctgttgcgggtaggccttgatatcacctctgggactgtgccttgctcaccgaaacccgcgcccaggagtatggctgaggccttgcccacccacctgcctgggaagtgcagagtggatggacgggtttagaggggaggggcgaaggtgctgtaaacaggtttgggcagtggtgggggagggggccagagaggcggctcaggttgcccagctctgtggcctcaggactctctgcctcacccgcttcagcccagggcccctggagactgatcccctctgagtcctctgccccttccaaggacactaatgagcctgggagggtggcagggaggaggggacagcttcacccttggaagtcctggggtttttcctcttccttctttgtggtttctgttttgtaatttaagaagagctattcatcactgtaattattattattttctacaataaatgggacctgtgcacaggaaaaaaaaaaaaaaaaaaaaaaaaaaaaaaaaaaaaaaa

SEQ ID NO: 1134 - DNA, 569 bp, Homo sapiens
ccacgcgtccgaaattatatttaagatattaacttttatgtgaaatggtgattaggttatgggtgggggtggggggctggagtggggaaattggaagaaaagtataatgtccaaaaccgttaagaataaatttttatgctttttagtttgaattattttttgttcattatagtgttttcattttgtgagtttttctatgcacatacaaaatgtttctcctcaggcccccttgtatttgctggtcctatttttatgaaccatcgagaacaggctctagccagactcagatcccatccagcacagctaaagcataaacgggacaagcacaaaggtatttggtcttccttatcacctaggtgggatactttcccaatttcttccactcatttgaattttgtctctgggaaaatgcacaaacctgattcttctactttgcttctatcatgatgtagcctgaggagaaagaacattctgaaagtgataccgtttgtcagtgactgtcatgcttcttgtttttttgttgtcgttagctttcataaaggagatattttaccataaaaaaaaaaaaa

SEQ ID NO: 1135 - DNA, 1944 bp, Homo sapiens
ccacgcgtccgggctgaggatggcattattgcttatgatgactgtggggtgaaactgactattgcttttcaagccaaggatgtggaaggatctacttctcctcaaataggagataaggttgaatttagtattagtgacaaacagaggcctggacagcaggttgcaacttgtgtgcgacttttaggtcgtaattctaactccaagaggctcttgggttatgtggcaactctgaaggataattttggatttattgaaacagccaatcatgataaggaaatctttttccattacagtgagttctctggtgatgttgatagcctggaactgggggacatggtcgagtatagcttgtccaaaggcaaaggcaacaaagtcagtgcagaaaaagtgaacaaaacacactcagtgaatggcattactgaggaagctgatcccaccatttactctggcaaagtaattcgccccctgaggagtgttgatccaacacagactgagtaccaaggaatgattgagattgtggaggagggcgatatgaaaggtgaggtctatccatttggcatcgttgggatggccaacaaaggggattgcctgcagaaaggggagagcgtcaagttccaattgtgtgtcctgggccaaaatgcacaaactatggcttacaacatcacacccctgcgcagggccacagtggaatgtgtgaaagatcagtttggcttcattaactatgaagtaggagatagcaagaagctctttttccatgtgaaagaagttcaggatggcattgagctacaggcaggagatgaggtggagttctcagtgattcttaatcagcgcactggcaagtgcagcgcctgtaatgtttggcgagtctgtgagggccccaaggctgttgcagctcctcgacctgatcggttggtcaatcgcttgaagaatatcactctggatgatgccagtgctcctcgcctaatggtcttcgtcagccaaggggaccagataactcaatggggtttggtgcagaaagaaagatccgtcaagctggtgtcattgactaaccacatccacaaagcacaccattaatccactatgatcaagttgggggaatctggtgaagggttctgaatatctccctcttcatccctcccgaaatctggaatacttattctattgagctattacaccagttttaacaccttcctcgtgttatgtttaaaaaaataaataaatttaagaaaaccattttaaataatgcacagttgcagcctggaaaaacttaaggtggcgccttatagtatcaattttaggagctttatttggtgcatttaacgcaactggtaattgcagaatccactttgcctgtgtaagtgaaaaatatagactgttatcttgttggccctatgaaattctgcacttttcattatatactctaccttcattaattacttctggcaagatgttctgccttagcactcagttgcattcttttcctttttcttcctgttcattatgctttaattctgaggaccatatgagggtagaatatattatcttttaaaaattacaaaaatttgtataggcaaaccatttcttaaagttgatggccaaattttaaaatgttatttttcatatcatttataatcttgtcacaatccacttaaagaagtttggttatatttcagtgaaaattttcttccagagtaggttttttttcgtgggttggggggtaactttactacaattagtaagtatggtgcagaatttcatgcaaatgaggagtgccagcagtgtgataatttaaacatatttaaacaaaaacaaaaaaaatgaatgcacaaacttgctgctgcttagatcactgcagcttctaggacccggtttcttttactgatttaaaaacaaaacaaaaaaaaataaaaaagttgtgcctgaaaaaaaaaaaaaaaaaaaaaa

SEQ ID NO: 1136 - DNA, 761 bp, Homo sapiens
  misc_feature (616)..(616): n equals a,t,g, or c
  misc_feature (628)..(628): n equals a,t,g, or c
gcaaggcaagtagcggcggcgcttcaagatgcgctgcctgaccacgcctatgctgctgcgggccctggcccaggctgcacgtgcaggacctcctggtggccggagcctccacagcagtgcagtggcagccacctacaagtatgtgaacatgcaggatcccgagatggacatgaagtcagtgactgaccgggcagcccgcaccctgctgtggactgagctcttccgaggcctgggcatgaccctgagctacctgttccgggaaccggccaccatcaactacccgttcgagaagggcccgctgagccctcgcttccgtggggagcatgcgctgcgccggtacccatccggggaggagcgttgcattgcctgcaagctctgcgaggccatctgccccgcccaggccatcaccatcgaggctgagccaagagctgatggcagccgccggaccacccgctatgacatcgacatgaccaagtgcatctactgcggcttctgccaggaggcctgtcccgtggatgccatcgtcgagggccccaactttgagttctccacggagacccatgaggagctgctgtacaacaaggagaagttgctyaacaacggggacaagtggganggccgagatcgnccgccmacatycaggctgactacttgkatcggtgacgccccamcggcccscagcccctgctgcccaataaaaccactccgaccccaaaaaaaaaaaaaaaaaaaaaaaaaaaaaaaaaaaaaaaagcggccgc

SEQ ID NO: 1137 - DNA, 824 bp, Homo sapiens
ccacgcgtccggctgcgagaagacgacagaagggtacggctgcgagaagacgacagaaggggaaaaccgcgccatgatagggtcgggattggctggctctggaggcgcaggtggtccttcttctactgtcacatggtgcgcgctgttttctaatcacgtggctgccacccaggcctctctgctcctgtcttttgttaggatgccggcgctgctgcctgtggcctcccgccttttgttgctaccccgagtcttgctgaccatggcctctggaagccctccgacccagccctcgccggcctcggattccggctctggctacgttccgggctcggtctctgcagcctttgttacttgccccaacgagaaggtcgccaaggagatcgccagggccgtggtggagaagcgcctagcagcctgcgtcaacctcatccctcagattacatccatctatgagtggaaagggaagatcgaggaagacagtgaggtgctgatgatgattaaaacccaaagttccttggtcccagctttgacagattttgttcgttctgtgcacccttacgaagtggccgaggtaattgcattgcctgtggaacaggggaactttccgtacctgcagtgggtgcgccaggtcacagagtcagtttctgactctatcacagtcctgccatgatgagccctgttcctgctcatcatgaagatccccgcgatacttcaacgccttctgacttccaggtgatgactgggcccccaataaatcccgtctttgggtcaaaaaaaaaaaaaaaaaaaaaaaaaaaaaaaaaaaaaaaaaaaaaaaaaaaaaa

SEQ ID NO: 1138 - DNA, 1082 bp, Homo sapiens
  misc_feature (564)..(564): n equals a,t,g, or c
  misc_feature (942)..(942): n equals a,t,g, or c
ggggcctcgaggactctctgcgtctctggagacaagggcactacacgcacttcagaatgaagagttcacctagggcgcaatggaatattccattgcccctcctgtcctgggtctgtgttgcggggaacgctcgcgcggttgccagagaaagccccggacgtgacggatttgcgcgaccccaagcagcccgcccttccccctcccatccgtcattcccctgcgctctctttcctcacccttccccccgccaccgtgggttccagacttgggataagtaaacagcgggtggagcgaggcctacggacccaggccaggtgggagtctgcactcttcaaggggcctgggctgctgctcacgggtattaaagaactccgcgttgttcatggctgaggcgatgcattaggaagatcctggacctagagaacaagtcccccgaacgctgagttggaggcgggacttcgggtgcgcgttggcgggagcatgctggggctctgggggcagcggctccccgcggcgtgggtcctgcttctgttgcctttcctgccgctgctgctgcttgcarcncccgcgccccaccgcgcgtcctacaagccggtcatcgtggtgcatgggctcttcgacagctcgtacagcttccgccacctgctggaatacatcaatgagacacaccccgggactgtggtgacagtgctcgatctcttcgatgggagagagagcttgcgacccctgtgggaacaggtgcaagggttccgagaggctgtggtccccatcatggcaaaggcccctcarggggtgcatctcatctgctactcgcagggggccttgtgtgccgggctctgctttctgtcatggatgatcacaacgtggattctttcatctccctytctctcmaggcmgaagttgggaagtgagaaaccatgtttttaacttgtggctgctttngctgctgctgctcctccgtatctggctgtatgggtggagaacccaccccctgcccaccacaggggtctccttccaggccactcaggacatttttagcttctctcctccccatgttcccttttttctctaaagtcccctga

SEQ ID NO: 1139 - DNA, 2429 bp, Homo sapiens
  misc_feature (366)..(366): n equals a,t,g, or c
  misc_feature (2423)..(2423): n equals a,t,g, or c
  misc_feature (2426)..(2426): n equals a,t,g, or c
ggtgtgcaaccttctttatccctccttcacagacgtccttgagcccttgagacggatgtgagtgagtttttcagtcctcatgcaaaacaaccatctaaacataacagatgacatcagcttgggcttttcaattcctggatggcagcagcgtgttaatccagccttcatcctggatttcataaaccaaaacaagagagcctggcasgaggacagcgctgctctgggttgaggaaattgatgacgggaaagcatgcgggcaacccagtgtataaaactcataaacgtgtaggcagaggctcagctaccagtttggacggctgcttcccaccagcaaagaccacgactggagagccgagccggagcagnctgggaaacatgaagagcgtcttgctgctgaccacgctcctcgtgcctgcacacctggtggccgcctggagcaataattatgcggtggactgccctcaacactgtgacagcagtgagtgcaaaagcagcccgcgctgcaagaggacagtgctcgacgactgtggctgctgccgagtgtgcgctgcagggcggggagaaacttgctaccgcacagtctcaggcatggatggcatgaagtgtggcccggggctgaggtgtcagccttctaatggggaggatccttttggtgaagagtttggtatctgcaaagactgtccctacggcaccttcgggatggattgcagagagacctgcaactgccagtcaggcatctgtgacagggggacgggaaaatgcctgaaattccccttcttccaatattcagtaaccaagtcttccaacagatttgtttctctcacggagcatgacatggcatctggagatggcaatattgtgagagaagaagttgtgaaagagaatgctgccgggtctcccgtaatgaggaaatggttaaatccacgctgatcccggctgtgatttctgagagaaggctctattttcgtgactgttcaacacacagccaacattttaggaactttctagattatagcataaggacatgtaatttttgaagaccaaatgtgatgcatggtggatccagaaaacaaaaagtaggatacttacaatccataacatccatatgactgaacacttgtatgtgtttgttaaatattcgaatgcatgtagatttgttaaatgtgtgtgtatagtaacactgaagaactaaaaatgcaatttaggtaatcttacatggagacaggtcaaccaaagagggagctaggcaaagctgaagaccgcagtgagtcaaattagttctttgactttgatgtacattaatgttgggatatggaatgaagacttaagagcaggagaagatggggagggggtgggagtgggaaataaaatatttagcccttccttggtaggtagcttctctagaatttaattatgcttttttttttttttttggctttgggaaaagtcaaaataaaacaaccagaaaacccctgaaggaagtaagatgtttgaagcttatggaaatttgagtaacaaacagctttgaactgagagcaatttcaaaaggctgctgatgtagttcccgggttacctgtatctgaaggacggttctggggcataggaaacacatacacttccataaatagctttaacgtatgccacctcagagataaatctaagaagtattttacccactggtggtttgtgtgtgtatgaaggtaaatatttatatatttttataaataaatgtgttagtgcaagtcatcttccctacccatatttatcatcctcttgaggaaagaaatctagtattatttgttgaaaatggttagaataaaactatgactctataaggttttcaaacatctgaggcatgataaatttattatccataattatagtaataataaccttaataagcataagaaaaacagagtcactctggatttcaaaaatatcaaaaaatgagcaacagagggtccttatttaaacataagtgctgtgacttaggtgaattttcaatttaaggtagaaaataagtttttaggaggtttgtaaaagaagaatcaattttcagcagaaaacatgtcaactttaaaatatagtttattttcatatttttttcttttaaacttggttgataagtggaattaggagtatatttgaaagaatcttagcacaaacaggactgttgtactagatgttcttaggaaatatctcagaagtattttatttgaagtgaagaacttatttaagaattatttcagtatttacctgtattttattcttgaagttggccaacagagttgtgaatgtgtgtgggaaggcctttgaatgtaaagctgcataagctgttaggttttgttttaaaaggacatgtttattattgttcaataaaaaagaacaagatacaaaaaaaaaaaaaaaaaaaaaaggggggnccnccc

SEQ ID NO: 1140 - DNA, 2776 bp, Homo sapiens
cggacgcgtgggtgacaagtcagaagcttgaaagcagggaaatccggatgtctcggttatgaagtggagcagtgagtgtgagcctcaacatagttccagaactctccatccggactagttattgagcatctgcctctcatatcaccagtggccatctgaggtgtttccctggctctgaaggggtaggcacgatggccaggtgcttcagcctggtgttgcttctcacttccatctggaccacgaggctcctggtccaaggctctttgcgtgcagaagagctttccatccaggtgtcatgcagaattatggggatcacccttgtgagcaaaaaggcgaaccagcagctgaatttcacagaagctaaggaggcctgtaggctgctgggactaagtttggccggcaaggaccaagttgaaacagccttgaaagctagctttgaaacttgcagctatggctgggttggagatggattcgtggtcatctctaggattagcccaaaccccaagtgtgggaaaaatggggtgggtgtcctgatttggaaggttccagtgagccgacagtttgcagcctattgttacaactcatctgatacttggactaactcgtgcattccagaaattatcaccaccaaagatcccatattcaacactcaaactgcaacacaaacaacagaatttattgtcagtgacagtacctactcggtggcatccccttactctacaatacctgcccctactactactcctcctgctccagcttccacttctattccacggagaaaaaaattgatttgtgtcacagaagtttttatggaaactagcaccatgtctacagaaactgaaccatttgttgaaaataaagcagcattcaagaatgaagctgctgggtttggaggtgtccccacggctctgctagtgcttgctctcctcttctttggtgctgcagctggtcttggattttgctatgtcaaaaggtatgtgaaggccttcccttttacaaacaagaatcagcagaaggaaatgatcgaaaccaaagtagtaaaggaggagaaggccaatgatagcaaccctaatgaggaatcaaagaaaactgataaaaacccagaagagtccaagagtccaagcaaaactaccgtgcgatgcctggaagctgaagtttagatgagacagaaatgaggagacacacctgaggctggtttctttcatgctccttaccctgccccagctggggaaatcaaaagggccaaagaaccaaagaagaaagtccacccttggttcctaactggaatcagctcaggactgccattggactatggagtgcaccaaagagaatgcccttctccttattgtaaccctgtctggatcctatcctcctacctccaaagcttcccacggcctttctagcctggctatgtcctaataatatcccactgggagaaaggagttttgcaaagtgcaaggacctaaaacatctcatcagtatccagtggtaaaaaggcctcctggctgtctgaggctaggtgggttgaaagccaaggagtcactgagaccaaggctttctctactgattccgcagctcagaccctttcttcagctctgaaagagaaacacgtatcccacctgacatgtccttctgagcccggtaagagcaaaagaatggcagaaaagtttagcccctgaaagccatggagattctcataacttgagacctaatctctgtaaagctaaaataaagaaatagaacaaggctgaggatacgacagtacactgtcagcagggactgtaaacacagacagggtcaaagtgttttctctgaacacattgagttggaatcactgtttagaacacacacacttactttttctggtctctaccactgctgatattttctctaggaaatatacttttacaagtaacaaaaataaaaactcttataaatttctatttttatctgagttacagaaatgattactaaggaagattactcagtaatttgtttaaaaagtaataaaattcaacaaacatttgctgaatagctactatatgtcaagtgctgtgcaaggtattacactctgtaattgaatattattcctcaaaaaattgcacatagtagaacgctatctgggaagctatttttttcagttttgatatttctagcttatctacttccaaactaatttttatttttgctgagactaatcttattcattttctctaatatggcaaccattataaccttaatttattattaacatacctaagaagtacattgttacctctatataccaaagcacattttaaaagtgccattaacaaatgtatcactagccctcctttttccaacaagaagggactgagagatgcagaaatatttgtgacaaaaaattaaagcatttagaaaacttctttgctttcttatttacgtagatgcattatacctttcatgtaaaattaaagtgaggaccagatcatatcatattgtttgcaaaaataaaagggacaatgttggttgttaaaatacaagcatatgtcaaccaaacagcatatatcatatggggctattcatgctccaaacattttattttgagttggccaagtacatacacattaaacagtcctttactagagatgctggccctccatttccatccatttcagaattcaccagggagccagagatccaggatggctcattcgtctcacttttgaccgccctgcttctctagttttctctttccctcccgcttagactgctaattgtcttcttcccctcacca

SEQ ID NO: 1141 - DNA, 3261 bp, Homo sapiens
  misc_feature (3225)..(3225): n equals a,t,g, or c
gaattcgtgctcttagggtggttgggtggtaagatggcggctgtgagtctgcggctcggcgacttggtgtgggggaaactcggccgatatcctccttggccaggaaagattgttaatccaccaaaggacttgaagaaacctcgcggaaagaaatgcttctttgtgaaattttttggaacagaagatcatgcctggatcaaagtggaacagctgaagccatatcatgctcataaagaggaaatgataaaaattaacaagggtaaacgattccagcaagcggtagatgctgtcgaagagttcctcaggagagccaaagggaaagaccagacgtcatcccacaattcttctgatgacaagaatcgacgtaattccagtgaggagagaagtaggccaaactcaggtgatgagaagcgcaaacttagcctgtctgaagggaaggtgaagaagaacatgggagaaggaaagaagagggtgtcttcaggctcttcagagagaggctccaaatcccctctgaaaagagcccaagagcaaagtccccggaagcggggtcggcccccaaaggatgagaaggatctcaccatcccggagtctagtaccgtgaaggggatgatggccggaccgatggccgcgtttaaatggcagccaaccgcaagcgagcctgttaaagatgcagatcctcatttccatcatttcctgctaagccaaacagagaagccagctgtctgttaccaggcaatcacgaagaagttgaaaatatgtgaagacctccttcttcctaggtgaagtgggcaatgcagccaagatgatgctgatcgtgaacatggtccaagggagcttcatggccactattgccgaggggctgaccctggcccaggtgacaggccagtcccagcagacactcttggacatcctcaatcagggacagttggccagcatcttcctggaccagaagtgccaaaatatcctgcaaggaaactttaagcctgatttctacctgaaatacattcagaaggatctccgcttagccattgcgctgggtgatgcggtcaaccatccgactcccatggcagctgcagcaaatgaggtgtacaaaagagccaaggcgctggaccagtctgacaacgatatgtccgccgtgtaccgagcctacatacactaagctgtcgacaccccgccctcacccctccaatcccccctctgaccccctcttcctcacatggggtcgggggcctgggagttcattctggaccagcccacctatctccatttccttttatacagactttgagacttgccatcagcacagcacacagcagcacccttcccctgaggccggtggggaggggacaagtgtcagcaggattggcgtgtgggaaagctcttgagctgggcactggccccccggacgaggtggctgtgtgttcacacacacacacacacacacacacacacacacacacacaggctctcgccccaggatagaagctgcccagaaactgctgcctggctttttttcttccgagcttgtcttatctcaaaccccttccagtcaaggaactagaatcagcaacgagagttggaagccttcccacagcttcccccagagcgaagaggctgtagtcatgtccccatcccccactggattccctacaaggagaggccttgggcccagatgagccagtacagactccagacagaggggcccttggggccctccaacctcaggtgatgagctgagaaagatgttcacgtctaagcgtccagtgtgcacccagcgctccatagacgcctttgtgaactgaaaagagactggcagagtcccgagaagatggggccctggctttccagggagtgcagcaagcagccggcctgcaggtgagcatggaggcccggccctcaccgcctcgaagccatgccccagatgccactgccacagcgggcgctcgctcctccctaggctgttttagtatttggatttgcattccatcccttgggagggagtcctcagggccactagtgatgagccaagaggagtgggggttgggggcgctcctttctgtttccgttaggccacagactcttcacctggctctgagcactcttacctcggtcccctcccagtggtcccaccttctccaccctgccctgccaagtcccctgcatgcccaccgctctccatcctccctcctctccctcttcctcccgtggagacagtatttctttctgtctgtccctttggcccagacccagcctgaccaacgatgagcatttcttaggctcagctcttgatacggaaacgagtgtcttcactccagccagcatcatggtcttcggtgcttcccgggcccggggtctgtcgggagggaagagaactgggcctgacctacctgaactgactggccctccgaggtgggtctgggacatcctagaggccctacatttgtccttggataggggaccggggggggcttggaatgttgcaaaaaaaaaagttacccaagggatgtcagttttttatccctctgcatgggttggattttccaaaatcataatttgcagaaggaaggccagcatttacgatgcaatatgtaattatatatagggtggccacactagggcggggtccttcccccctcacagctttggcccctttcagagattagaaactgggttagaggattgcagaagacgagtggggggagggcagggaagatgcctgtcgggtttttagcacagttcatttcactgggattttgaagcatttctgtctgaacacaaagcctgttctagtcctggcggaacacactgggggtgggggcgggggaagatgcggtaatgaaaccggttagtcaattttgtcttaatattgttgacaattctgtaaagttcctttttatgaatatttctgtttaagctatttcacctttcttttgaaatccttcccttttaaggagaaaatgtgacacttgtgaaaaagcttgtaagaaagcccctcccttttttctttaaacctttaaatgacaaatctaggtaattaaggttgtgaatttttatttttgctttgtttttaatgaacatttgtctttcagaataggattgtgtgataatgtttaaatggcaaaaacaaaacatgattttgtgcaattaacaaagctactgcaagaaaaataaaacacttcttggtaacamaaaaaaaaaaaaaaagggggggcccggacccattcncccaaagggggcgtttaaatccatgccggcgttaaa

SEQ ID NO: 1142 - DNA, 1907 bp, Homo sapiens
atgcttgaaaagtagtatgtggttgggaattgtttttgttcaagtccctggaagtcctcttggcttagctcccttgttcctgttcccacttcatttccttacttaacattcccctattttgagcatgtcaataagtgcatgatgaatggcacagttgaatgatcatgttaactttaattgcttcctttgttgctgtaaacagtttcttgttaagtttcagccaagtctgtgacaatctcaccaaaatgaatgaaatgggcggggtgtggtggctcacacttggaatcccagcactctgggaggctgtgttgggccgatcgcttgagctcatgagttcaagaccaacctgggcaacatggcaaaaccttgtctctacaaaaaatacaaaaattagccaggcatggtggtgcacacctgtagtcccagctacttgggaggcttaggtgggaggatggcttgagcacgggaggcagaggttgcactaagccaagatcgtgtcactgcactccagcccaggcaatagagccagaccctgtctcaaaaaaacaaaacaaacaaaacatgaatgaatgaaatggctcaccttccctattatgaactagaagaaaggatgaaggaaggttggcaggaccccagccttactctgtagtgacaacccagaggtacctttcccggaatgcagggtcaagtttatgtgtgaagggactctagaatagctggtaaaaatggctacatggtaaccattcttgacttagtccagtattcccataatttgtaattccataaatttattctcagctgtcccccagccatttctaatagaaggatgtgtaccccagttttgacaatgttcttgaaatcaagttagtgttacctgcattgcattataatggaactatatgtacatgttaaagggatccgtttgattcctttcggcaaggaattgcaaaaatagtttttaccaataccagttaaaataggataggttagactttgggggcagggtgagacagtgcagccttttcactctgaaatggcaaatcagctgtactctttgagtctaccagagattcctatttgagtgtgaatggggtgtgtgtgtgtgtgtgtgtgctcattcatcttcatgctttcttccatggtgttaattcaagctctcctaataaaggtatccaaagagtactgagaagtgaccataggtatttggcatgagtaaatgtagttccttttgccaaaaaaactctcaaaagttacaactggagttcttcgcgataaaaggttggggaaatcagccatggctttagccttgttcccaagtacacatcttcttatccacaaggatgaaactctgtagggctcaccctgagggctcatgtgtggcattgagagggtagcagtgaccagaacaccacaaggcccacaagatgttttgaatgagggaacatttaatgtcatttgttaggagatagaaaccaaataataaaggacaaggaccacgctcattccgtggagaagaggtgaactccctctgctgactatttggaatggactgaatgaggaggtctctccagccagaaggagtattgaggtcatcaggcctcagaaaacaatgtacacataatctcgggctgtgaacaagagaaaggagggggggaaacatgaaagtcaatcttaacaatttttgcaatacctcttatttgcagaccattggatttatgttattgcactctcggtgtgatttatcgtatgtatctgataggttttatgaattgttttgagttgtaaactcctataccctttattaaaatggacctaattaagtgaaaaaaaaaaaaaaaaaaaaaaaaaaaaaaaaaaaaaaaaaaaaaaaaaaaaaaaaaaaaaaaaaaaaaaaaaaaaaaaggggg

SEQ ID NO: 1143 - DNA, 1056 bp, Homo sapiens
gttgatgcaggtgttccttgggatcctcctcatcctagtattctgtgaacgtgggggtctgggtagttcacagactgggacaccctctcccagattttccagagtaaatattactcccctgatgcagcctcagccaatagcatgatccttcccatctcaggaaatgtgtccaatcagaaaacatagagggtggatccatcggtgagagatcttgccgagcggtgtcaagacttccccgtggccctatgtttaccatgcattcgattctcggtgtggtccgggcctttctcacctcatccatttcacctaccaagaaaggaaatgacattcatccgggctggggcactattgcgcaacaaaacaagccaacctgtaattaaggagaactgaacgctgatgctgagcccagcatcttggggaaagactgctgagagtttcgcttggctttggaattcatttatcagataacatgcgctggattgacctaaactgcaacatggcccttgtaattataccgtgcttttgctttggagcctgagggaaatgtggaaggcgctggagtctgagctctgggtcacctgaacgtcctgtgattatgcccggtctcacattcaaaaggagagatgggagtgtttgtattttacccacagcagcagactcagctctaggatatgtggggtgcatgtgtcttctgtctctcctggaactcagtatctgttcattcattcattgagtacctactgtgatcaaggcactggatggggcactatgacaatttctcttttggtattttttcaagatttgtttacttgatcttctagcccaggggtcagcaaaccacaggccatgggctagatccaggcctttgcctgtttctgtgcagcctcaatagttaagaatttttacatttttaaatgattaagaaggaaatcaaaagaagaacactattctgttacacaagaacattgtattcaatttgaattttggtgtcaataaataaagctctattagaacccaaaaaaaaaaaaaaaaaaaaaaaaaaaaaaaaaaaaaaaa

SEQ ID NO: 1144 - DNA, 1401 bp, Homo sapiens
gctctggagccaccagcagaacctcttcaatatcttgcatgttacagatttcactgctcccaccagcttggagacaacatgtggttcttgacaactctgctcctttgggttccagttgatgggcaagtggacaccacaaaggcagtgatcactttgcagcctccatgggtcagcgtgttccaagaggaaaccgtaaccttgcactgtgaggtgctccatctgcctgggagcagctcyacacagtggtttctcaatggcacagccactcagacctcgacccccagctacagaatcacctctgccagtgtcaatgacagtggtgaatacaggtgccagagaggtctctcagggcgaagtgaccccatacagctggaaatccacagaggctggctactactgcaggtctccagcagagtcttcacggaaggagaacctctggccttgaggtgtcatgcgtggaaggataagctggtgtacaatgtgctttactatcgaaatggcaaagcctttaagtttttccactggaattctaacctcaccattctgaaaaccaacataagtcacaatggcacctaccattgctcaggcawgggaaagcatcgctacacatcagcaggaatatcwstcactgtgaaagagctatttccagctccagtgctgaatgcatctgtgacatccccactcctggaggggaatctggtcaccctgagctgtgaaacaaagttgctcttgcagaggcctggtttgcagctttacttctccttctacatgggcagcaagaccctgcgaggcaggaacacatcctctgaatacyaaatactaactgctagaagagaagactctgggttatactggtgcgaggctgccacagaggatggaaatgtccttaagcgcagccctgagttggagcttcaagtgcttggcctccagttaccaactcctgtctggtttcatgtccttttctatctggcagtgggaataatgtttttagtgaacactgttctctgggtgacaatacgtaaagaactgaaaagaaagaaaaagtggratttagaaatctctttggattctggtcatgagaagaaggtaatttccagccttcaagaagacagacatttagaagaagagctgaaatgtcaggaacaaaaagaagaacagctgcaggaaggggtgcaccggaaggagccccagggggccacgtagcagcggctcagtgggtggccatcgatctggaccgtcccctgcccacttgctccccgtgagcactgcgtacaaacatccaaaagttcaacaacaccagaactgtgtgtctcatggtatrtaactcttaaagcaaataaatgaactgacttcaactgggaaaaaaaaaaaaaaaaaaaaaaaaaaaaaaaaaaaaaaaaa

SEQ ID NO: 1145 - DNA, 1007 bp, Homo sapiens
  misc_feature (978)..(978): n equals a,t,g, or c
  misc_feature (988)..(988): n equals a,t,g, or c
aattcggcacagctggcattgggctataagaggagcttgaccgtgggtgcaccctggaccccaccatggctcaccggccccccagccctgccctggcgtccgtgctgctggccttgctgctgagcggtgctgcccgagctgcggagatcgtgggcgggcacgaggcgcagcacactcccggccctacatggcctccctgcagatgcgggggaaccsgggcagccacttctgcggaggcaccttgatccaccccagcttcgtgctgacggccgcgcactgcctgcgggacataccccagcgcctggtgaacgtggtgctcggagcccacaacgtgcggacgcaggagcccacccagcagcacttctcggtggctcaggtgtttctgaacaactacgacgcggagaacaaactgaacgacrttctcctcatccagctgagcagcccagccaacctcagtgcctccgtcgccacagtccagctgccacagcaggaccagccagtgccccacggcacccagtgcctggccatgggctggggccgcgtgggtgcccacgaccccccagcccaggtcctgcaggagctcaatgtcaccgtggtcaccttcttctgccggccacataacatttgcactttcgtccctcgccgcaaggcsggcatctgcttcggagactcaggtggccccctgatctgtgatggcatcatccaaggaatagactccttcgtgatctggggatgtgccacccgccttttccctgacttcttcacgcgggtagccctctacgtggactggatccgttccacgctgcgccgtgtggaggccaagggcsgcccctggaaccgsccctcccacagcgctggccggggaccccgagcctgggytccaaaccctcgaggcggatytttgggacagaagcagytytttccccgaamaatgttggcgttccgggagggccccaaccgttcccccaaaattccttnccaagggggnttcggggaaaaaaggccgg

SEQ ID NO: 1146 - DNA, 1340 bp, Homo sapiens
  misc_feature (1253)..(1253): n equals a,t,g, or c
gcccacagtcctccacttcctggggaggtagctgcagaataaaaccagcagagactccttttctcctaaccgtcccggccaccgctgcctcagcctctgcctcccagcctctttctgagggaaaggacaagatgaagtggaaggcgcttttcaccgcggccatcctgcaggcacagttgccgattacagaggcacagagctttggcctgctggatcccaaactctgctacctgctggatggaatcctcttcatctatggtgtcattctcactgccttgttcctgagagtgaagttcagcaggagcgcagacgcccccgcgtaccagcagggccagaaccagctctataacgagctcaatctaggacgaagagaggagtacgatgttttggacaagagacgtggccgggaccctgagatggggggaaagccgagaaggaagaaccctcaggaaggcctgtacaatgaactgcagaaagataagatggcggaggcctacagtgagattgggatgaaaggcgagcgccggaggggcaaggggcacgatggcctttaccagggtctcagtacagccaccaaggacacctacgacgcccttcacatgcaggccctgccccctcgctaacagccaggggatttcaccactcaaaggccagacctgcagacgcccagattatgagacacaggatgaagcatttacaacccggttcactcttctcagccactgaagtattcccctttatgtacaggatgctttggttatatttagctccaaaccttcacacacagactgttgtccctgcactctttaagggagtgtactcccagggcttacggccctggccttgggccctctggtttgccggtggtgcaggtagacctgtctcctggcggttcctcgttctccctgggaggcgggcgcactgcctctcacagctgagttgttgagtctgttttgtaaagtccccagagaaagcgcagatgctagcacatgccctaatgtctgtatcactctgtgtgctgagtggcttcactcctgctgtaaatttggcttctgttgtcaccttcacctcctttcaaggtaactgtactgggccatgttgtgcctccctggtgagagggccgggcagaggggcagatggaaaggagcctaggccaggtgcaaccagggagctgcaggggcatgggaaggtggscgggcarggrarggtcarscagggcctgcraggcarcgggarcctcctgcttaagcctntgtccgaccattaactgaccatgtgtaagggccaaagataacagatgaccttatactgtcacaaagtgcataaaaaatgggtaccag

SEQ ID NO: 1147 - DNA, 685 bp, Homo sapiens
  misc_feature (614)..(614): n equals a,t,g, or c
  misc_feature (673)..(673): n equals a,t,g, or c
  misc_feature (675)..(675): n equals a,t,g, or c
ctataggccgaattgggtaccgggcccccctcgrgttttttttttttttttttttttttttcttgtaacaaggcatttatttgggatgaggaaaggaaattgagcagaaggtacaggagtaatagcaattccctgtagctctcaaagcaaattttgagctcatttttctttttctgcaagctcagcagcagaatgcccagagtcttccctggtagatgcaggttccatagcgacgttctcctgcaatgcacgctggtattctgcaatagcaggccatgtttttccttgagcctggatgctttggagccaagctttcgtcccatgcaagggaaacaaccacttctgggatgtccgctgcaatctgctccggggctgcagcaacctcatcagctcttgcctggagtggctcagcctgggcctgcagggccaccaggagaatggcagcaaggatggcgagggtcctcatggctggggtcacagatcctctagctaggcagggtgaccagagagggcagacagcagtcctctgtcccaggtcttctatagcaaggagcagccgtgcacaagtggacttcccctatttaaaggtctttctcgtgccgaattcctgcagnacgggggatccactagttctagagcggccgccaccgcggtggagctccggcttttgttncnattagtaggg

SEQ ID NO: 1148 - DNA, 2745 bp, Homo sapiens
  misc_feature (554)..(554): n equals a,t,g, or c
ggccagcatcctcgcggagctggccaggcgagcctcgggacccatttgcctgctgttggccagcctgctgtcgctggtctcagctgtcagtgcctgccgagtgttcaagctctggcccctgtccttcctcgggagcaaactctccacgtgcgaacagctccggcaccggctggagcacctcacgctaatcttcagtacacggaaggcggagaaccctgcccagctgatgaggaaggccaacacggtggcctctgtgctgctggacgtggccctgggcctcatgctgctgtcctggctccacgggagaagccgcatcgggcatctggccgacgccctcgttcctgtggctgaccacgtggccgaggagctccagcatctgctgcagtggctgatgggtgctcccgccgggctcaagatgaaccgtgcactggaccaggtgctgggccgcttcttcctctaccacatccacctgtggatcagtgagtgcagggcaggcgggggccccagggaccccagagcttgctgaagagggtagggacccagycagaccccgncccctgtgcccccaactctgctccccagcgtcctgtgtgtgtgaggcctgctgtgctcagctgagggctggggcctgggcacctcccgagggctgaccccaccctgccaggctacacgcacctcatgtcctgtgtgtgtgagggttgtgctgggycgagggctggggtctgagcgcctyctgagggcctaccccaccctgccaggctacatycacctcatgtcccccttcgtggagcacatcctttggcacgtgggcctctyggcctgcctgggcctgacggtggccctgtccctcytytcggacattatcgcccttctcaccttccacatctactgcttttacgtctatggagccaggtgggcgtgggcttccccctccccaccgccccctgggaggtgcagaggctccggctgggcgggcgttcgagtggggcgggggcggggcggggcggggcggggccgggcccgacagcactgcgtcctgtaggctgtactgcctgaagatccatggcctgtcctcactgtggcgtctgttccgggggaagaagtggaacgttctgcgccagcgcgtggactcctgttcctatgacctggaccagctgttcatcgggactctgctcttcaccatcctgctcttcctcctgcctaccacagccctgtactacctggtgttcaccctgctccggctcctggtggtcgccgtgcagggcctgatccatctgctcgtggacctcatcaactccctgccgctgtactcactgggtcttcggctctgccggccctacaggctggcggctggcgtgaagttccgtgtcctccggcacgaggccggcaggcccctccgcctcctgatgcagataaacccactgccctacagccgcgtggtgcacacctaccgcctccccagctgtggctgccaccccaagcactcctggggcgccctgtgccgcaagctgttccttggggagctcatctacccctggaggcagagaggggacaagcaggactgagggaactgctggctcgcctggcaccaccacacggccacagccagccatctgctctgccagggtggcaccagctcagctggcgcatgtcctgtgctttgtggacgctgctgtgtgctcctgaacacggcaggccctgctatcacaccttgggcttggaggtcattgggagtgagcagatgtgggggtggccagccaggctggccgcactccatcactggcactgcctgccttgggacccgcttcccacctgctgcggtcaccatggtggcgagcacagcaaccccaggtgtccagagcactgccccatgcccaccctgtgtacccaggtccagagggtccgtccaccacagcagccccaggtggagggctggtctccctgggggctccccagtggctctgccctggctgtgggggtggagggaccttgccaggatgaaccccccagtcccaggcaccctctagctccctcagccgaacagcaccctgcatctgggggattgaagcagtcgctgacccccgtccccagcgggcccgggccctcactccctgaaccacacggggtttatttgcggatgttccctggagaggtcgctttgtgaagaaaccatcagcaggctgtgagcatcgccaggctgctgtgggggcgggagcagcctcagtgtcaagggcccgcccactgacccagccgtacctattcgtccacggtgccccgtagcagcaggtcctgcggccaaatctgtctcccttcatgggcctcccagggaaggaggaagccctgctgtgcagacacctctgtggccccccaggrgtgtgagyggcctggggagggggccgtggcactgaggccgaaagtgcctgccagacggcacggtctgggtgcgggtgttccctgtgagcccgagtccgcttcaggaggggagcctgcaggtgccggctggtgaggggatgacgcgctgtgggtgggaggaggcagcgcccatctcagcagcaccaggactgcctgggactccctggcaacccagcaccggggaagccgtcagctgctgtgacaataaaacctgccccgtgtctggagcgcaaaaaaaaaaaaaaaaaaaaaaagggcggccgctctagaggatccctcgaggggcccaagcttacgcgtgcatgcgacgtcatagctctctccctgggtttg

SEQ ID NO: 1149 - DNA, 2446 bp, Homo sapiens
ccacgcgtccggagcagcccgcgagggggaagtgggagctgcgaccgcgctccctgtgaggtgggcaagcggcgaaatggcgccctccgggagtcttgcagttcccctggcagtcctggtgctgttgctttggggtgctccctggacgcacgggcggcggagcaacgttcgcgtcatcacggacgagaactggagagaactgctggaaggagactggatgatagaattttatgccccgtggtgccctgcttgtcaaaatcttcaaccggaatgggaaagttttgctgaatggggagaagatcttgaggttaatattgcgaaagtagatgtcacagagcagccaggactgagtggacggtttatcataactgctcttcctactatttatcattgtgaagatggtgaatttaggcgctatcagggtccaaggactaagaaggacttcataaactttataagtgataaagagtggaagagtattgagcccgtttcatcatggtttggtccaggttctgttctgatgagtagtatgtcagcactctttcagctatctatgtggatcaggacgtgccataactactttattgaagaccttggattgccagtgtggggatcatatactgtttttgctttagcaactctgttttccggactgttattaggactctgtatgatatttgtggcagattgcctttgtccttcaaaaaggcgcagaccacagccatacccatacccttcaaaaaaattattatcagaatctgcacaacctttgaaaaaagtggaggaggaacaagaggcggatgaagaagatgtttcagaagaagaagctgaaagtaaagaaggaacaaacaaagactttccacagaatgccataagacaacgctctctgggtccatcattggccacagataaatcctagttaaattttatagttatcttaatattatgattttgataaaaacagaagattgatcattttgtttggtttgaagtgaactgtgacttttttgaatattgcagggttcagtctagattgtcattaaattgaagagtctacattcagaacataaaagcactaggtatacaagtttgaaatatgatttaagcacagtatgatggtttaaatagttctctaatttttgaaaaatcgtgccaagcaataagatttatgtatatttgtttaataataacctatttcaagtctgagttttgaaaatttacatttcccaagtattgcattattgaggtatttaagaagattattttagagaaaaatatttctcatttgatataatttttctctgtttcactgtgtgaaaaaaagaagatatttcccataaatgggaagtttgcccattgtctcaagaaatgtgtatttcagtgacaatttcgtggtctttttagaggtatattccaaaatttccttgtatttttaggttatgcaactaataaaaactaccttacattaattaattacagttttctacacatggtaatacaggatatgctactgatttaggaagtttttaagttcatggtattctcttgattccaacaaagtttgattttctcttgtatttttcttacttactatgggttacattttttatttttcaaattggatgataatttcttggaaacattttttatgttttagtaaacagtatttttttgttgtttcaaactgaagtttactgagagatccatcaaattgaacaatctgttgtaatttaaaattttggccacttttttcagattttacatcattcttgctgaacttcaacttgaaattgttttttttttctttttggatgtgaaggtgaacattcctgatttttgtctgatgtgaaaaagccttggtattttacattttgaaaattcaaagaagcttaatataaaagtttgcattctactcaggaaaaagcatcttcttgtatatgtcttaaatgtatttttgtcctcatatacagaaagttcttaattgattttacagtctgtaatgcttgatgttttaaaataataacatttttatattttttaaaagacaaacttcatattatcctgtgttctttcctgactggtaatattgtgtgggatttcacaggtaaaagtcagtaggatggaacattttagtgtatttttactccttaaagagctagaatacatagttttcaccttaaaagaagggggaaaatcataaatacaatgaatcaactgaccattacgtagtagacaatttctgtaatgtccccttctttctaggctctgttgctgtgtgaatccattagatttacagtatcgtaatatacaagttttctttaaagccctctcctttagaatttaaaatattgtaccattaaagagtttggatgtgtaacttgtgatgccttagaaaaatatcctaagcacaaaataaacctttctaaccacttcaaaaaaaaaaaaa

SEQ ID NO: 1150 - DNA, 1230 bp, Homo sapiens
acgcgtccggaaaacccatgagcattttaattctgacttttttacttttctccctacatttagaatactgtggcactttctgttatccaaatgtgtctcagtctccatatttaaggactgtgggtgaaaagcttctacctggaattgaagtgctttggacaggtcccaaagttgtttctaaagaaattccagtagagtccatcgaagaggtttctaagattattaagagagctccagtaatctgggataacattcatgctaatgattatgatcagaagagactgtttctgggcccgtacaaaggaagatccacagaactcatcccacggttaaaaggagtcctcactaatccaaattgtgaatttgaagccaactacgttgctatccacacccttgccacctggtacaaatcaaacatgaatggagtgagaaaagatgtagtgatgactgacagtgaagatagtactgtgtccatccagataaaattagaaaatgaaggcagtgatgaagatattgaaactgatgtactctatagtccacagatggctctaaagctagcattaacagaatggttgcaagagtttggtgtgcctcatcaatacagcagtaggcaagttgcacacagtggagctaaagcaagtgtagttgatgggactcctttagttgcagcaccctctttaaatgccacaaccgtagtaacaacagtttatcaggagcccattatgagccagggagcagccttgagtggtgagcctactactctgaccaaggaagaagaaaagaaacagcctgatgaagaacccatggacatggtggtggaaaaacaagaagaaacggaccacaagaatgacaatcaaatactgagtgaaattgttgaagcgaaaatggcagaggaattgaaaccaatggacactgataaagagagcatagctgaatcaaaatccccagagatgtccatgcaagaagattgtattagtgacattgcccccatgcaaactgatgaacagacaaacaaggagcagtttgtgccaggtccaaatgaaaagcctttgtacactgcggaaccagtgaccctggaggatttgcagttacttgctgatctattctaccttccttacgagcatggacccaaaggagcacagatgttacgggaatttcaatggcttcgagcaaatagtagtgttgtcagtgtcaattgcaaaggaaaagactctgaaaaaaaaaaaaaaa

SEQ ID NO: 1151 - DNA, 1282 bp, Homo sapiens
ccacgcgtccgcttcaattggaaactccagcaggacccagaaatcagtatttggtaaaacttcccaggtgattctattgccaccaaatccattgttttaaaggaatagatggtaagcttttcttttcttttttttttcttttctttttttgagacaaggtctcactctgtcacccaggctggaatgcagtggcacaatcacagctcactgcagccttaccctcctggcctcaaacaatcctcccacctcagcctcccaagtagatgggactacaggtgtgtaccaccacaactgcttactttttgtattttttgtagagacagggtttcaccatgttgcccaggctggtctaaaactcctgggctcaagtgatccacctgttttaacctcccaaagtggtgggattacaggcatgagccactgcgcctggtcagatggtaaagcttttaaaaaaccagattagtgttagtgatggttgcacaatatgaatgtacttaacactactgaactgtatacttacaaatggttaagatggtaaatttttatgttaggtgtactttatcacaatacaaaaatttgggaaaaaacagattaggacactctagatttgtgctgtccaatacagtagccattagccacatgtgactatcaaatgcttgaaatatggctagttcaaattgagataataaatcaagataagtgaaaaatacgcaccagattttgaaggcttattgtgaataaaagaataaaatatttcactagtaatttttatattgcttacatggagacagtattttttatcttttaggataaacaaaatatattaaaaataatttcactttttctttacttttttaatgtggttaccacaatatataaaatgacatatgtggcccccattgtttctactagacagcattgctctaaatttaaaactaaactagcagtcaattaattaaaaaggatgataaggggccgggcacagtggctcacacctgtaatcccagcactttgggaggccgaggtaagtggatcacgaggtcaggagatcgagaccatcctggctaacgcggcgaaaccccgtctctactaaaaatacaaaaaagtagccgggcgcggtggcgggcgcctgtagtcccagctactcgggaggctgaagcaggagaatggcgtgaacccgggaagtggagcttgcggtgagccaagattgcgccactgcactctgcactccagcctgggcgacagagggagactccgtctcaaaaaaaaaaaaaaaaaaaaa

SEQ ID NO: 1152 - DNA, 1209 bp, Homo sapiens
  misc_feature (820)..(820): n equals a,t,g, or c
  misc_feature (1007)..(1007): n equals a,t,g, or c
  misc_feature (1173)..(1173): n equals a,t,g, or c
  misc_feature (1175)..(1175): n equals a,t,g, or c
gacagtggcagccaaatatatcatgggctacatctccaaggtgtctggcggaggcgagaaggtccaggtgagacgaggaaaacagaaggataagctgggtcgccctcacctgcatggtagtgcagccccacccatctgcactcctgcctcagtctgacttcttcccactccacctgcctctgccccagcacgtcaaagaatcatcctgcagtccaacccgctgctcgaggccttcggcaacgccaagactgtgcgcaacaacaattccagccgctttgtaagtctctgcagacctgcttggagcagctgctccctccgtgstgacctttctacacacacacccacacatacacacacccgtattgccaagacaagagtccattgaaaacccagcaggaaatacctactcctgaaggggagactcacttcctgctcatggtccctttcaaaagagagtcccccattggcagaactgtggaggccatgacacccctgtgtaacattcttaaatgctcccccggctgcagccatgctacattgttcccattcacatttcaggtccaatttattccctcatccattccttctttcgacaatagttctgggactcgttctttgtgtgggtgctgcgctgggcccagtgaaagtcaggataggtaaacagatatggattcagggtttgattctatcactgtgagctgtgtagcctgggggggaaaaaaatctatgcaacttcctgagtttcctctgtttgctcatccataaaatggtgacgatgttaatatccatctcatagacttcagtattacacctgcacatnggacatggkttaataaattccataccctkgggctgggtgtggggggctcamatctgaaatcccagcactttgggargctgagacaggcggatcacttgaggtctggagttcaagaccagcctggccaacatgatgaaaaatacaaaaattagctctgccaaaaatacaaaaattagctgggcatggnggcgggtgcctgtagtcccagctactcaggaggctaaggcaggagaatcacttgaacccaggaggtggacgttgcagtgagccgacattgcgccactgaatcccagcctgagcaacagagtcagattctgtctcaaaaaaaaaaggaagaagggaagagaggcaangntcataagacccatccccaacccttcccccacctg

SEQ ID NO: 1153 - DNA, 1376 bp, Homo sapiens
  misc_feature (9)..(9): n equals a,t,g, or c
  misc_feature (23)..(23): n equals a,t,g, or c
  misc_feature (35)..(35): n equals a,t,g, or c
  misc_feature (37)..(37): n equals a,t,g, or c
  misc_feature (1360)..(1360): n equals a,t,g, or c
  misc_feature (1374)..(1374): n equals a,t,g, or c
ttctcaaanccattcagtgacangacacaagtcancngacagtcacggtcggaattcccgggtcgacccacgcgtccggccaccgcatcctcctcggctcaggagatggagcagcagctggctgaacgggagtgtccccctcacgctgagcagaggcagcccaccaagaagatgtccaaagtgaaaggtctggtctccagccgccactagggccggctggggcagctggcactcaccaggcctgggtcaggtggggaggggacaccaagggcccatttcctcccctctctacctgcagtgagttccagacctgcccgtcccctcaccagcgcctccccaccctgttggtactgttccagaaaaactgttactccccctcacccactccctccttccccagttgttcccttcagactcaggggctccaccaatgccatcccaaaacagggtcagacactgcccagcttccctccaggaggttcttgtctctgtgtaagggcttgtctccctcccagtttttcttttgctccacgtcattttgtcaggctggttataagccggaggcagctttaaccagcccccagggatgattgtgaaggaggcccctccccttgtgaggagggggcactcctctccagcccctggtaccacagtcctcacgatggtgcagtgatttctagccaggcgtcaagatgcgctgctttccctctcctgcctcatcccttgttggcagctccagttcaggccgtggagggacgtgatgctgggctgtgtttactaaacccacgggttttcagcctcttaagcccagctccgatctccaattagttgagagcgctgggttgactaacctctggtatctgagcacagacagagggtgctgtgggtctgctgggtggcagaaatggttccttccggcttggcgttctctcctggccactcttcctgctgcctctgactactcagccttgttttcggtgtgtaggccccagctgcccactggaactgccggctaatgcttgctctcccaagatctttaactcctcctggctgcacctgggtagggatggtggcatcgatgcccctctgtctgctgaaggacctgttgctgcttctgtcttttcacccctccttggctgatgacccagagccctctgatgatggcattctcctggcaagagaaaaagacttaactagacttctgaacttgaacagtttcaggttatattttaatttttttttttttgtacaggttctgattctaatacatttcaacatgcttttgtcaaaaaaaaaaaaaaaaaagggcggccgctctagaggatccctcgaggggcccaagcttacgcgtgcatgcgangtcatagctctacncc

SEQ ID NO: 1154 - DNA, 1341 bp, Homo sapiens
ccacgcgtccggacctgcacacagggcaggggcactcggcagttcccagaggccacccctcccaccccagacatccagacatctggaactttgggtgccaagagtccagcttaatgcaggcagcctggcttttgggggctttggtggtcccccagctcttgggctttggccatggggctcggggagcagagagggagtgggagggaggctggggaggtgcccaggaggaggagcgggagagggaggccctgatgctgaagcatctgcaggaagccctaggactgcctgctgggaggggggatgagaatcctgccggaactgttgagggaaaagaggactgggagatggaggaggaccagggggaggaagaggaggaggaagcaacgccaaccccatcctccggccccagcccctctcccacccctgaggacatcgtcacttacatcctgggccgcctggccggcctggacgcaggcctgcaccagctgcacgtccgtctgcacgcgttggacacccgcgtggtcgagctgacccaggggctgcggcagctgcggaacgcggcaggcgacacccgcgatgccgtgcaagccctgcaggaggcgcagggtcgcgccgagcgcgagcacggccgcttggagggctgcctgaaggggctgcgcctgggccacaagtgcttcctgctctcgcgcgacttcgaagctcaggcggcggcgcaggcgcggtgcacggcgcggggcgggagcctggcgcagccggcagaccgccagcagatggaggcgctcactcggtacctgcgcgcggcgctcgctccctacaactggcccgtgtggctgggcgtgcacgatcggcgcgccgagggcctctacctcttcgaaaacggccagcgcgtgtccttcttcgcctggcatcgctcaccccgccccgagctcggcgcccagcccagcgcctcgccgcatccgctcagcccggaccagcccaacggtggcacgctcgagaactgcgtggcgcaggcctctgacgacggctcctggtgggaccacgactgccagcggcgtctctactacgtctgcgagttccccttctagcggggccggtaccccgcctccttgcccatcccaccacccggcctttccctgcgccgtgcccaccctcctccggaatcgcccttcccttcctggccacgaatggcagcgtcctccccgacccccagtctgggcgcttctgggagggctcttgcggtgccggcactcctccttgttagtgtctttccttgaaggggcgggcaccaggctaggtccggtgccaataaatccttgtggaatctgaaaaaaaaaaaaaaaa

SEQ ID NO: 1155 - DNA, 3207 bp, Homo sapiens
  misc_feature (46)..(46): n equals a,t,g, or c
ggttcgtcagaagccacatggtggaaactctagcagagggtttttngaaagcaggttgcacttcattcttactgagtgagtgcacgtgtgtgtgtgtgtgtgtgtgtgtgtgtgtgtgtgtgtgtatgcagcgcccctgggtctgtgtttttattgcactttcctgctggcttccagctgcaccgccagttccggggagggccctgggccagcggctgtccgccccccctccttcataaagtcctggcctcgggacagcctgcacagctgcccagcctgcggagacgggacagccctgtcccactcactctttcccctgccgctcctgccggcagctccaaccatgggaggccgcgtctttctcgcattctgtgtctggctgactctgccgggagctgaaacccaggactccaggggctgtgcccggtggtgccctcagaactcctcgtgtgtcaatgccaccgcctgtcgctgcaatccagggttcagctctttttctgagatcatcaccaccccgacggagacttgtgacgacatcaacgagtgtgcaacaccgtcgaaagtgtcatgcggaaaattctcggactgctggaacacagaggggagctacgactgcgtgtgcagcccgggatatgagcctgtttctggggcaaaaacattcaagaatgagagcgagaacacctgtcaagatgtggacgagtgcagctccgggcagcatcagtgtgacagctccaccgtctgcttcaacaccgtgggttcatacagctgccgctgccgcccaggctggaagcccagacacggaatcccgaataaccaaaaggacactgtctgtgaagatatgactttctccacctggaccccgccccctggagtccacagccagacgctttcccgattcttcgacaaagtccaggacctgggcagagactccaagacaagctcagccgaggtcaccatccagaatgtcatcaaattggtggatgaactgatggaagctcctggagacgtagaggccctggcgccacctgtccggcacctcatagccacccagctgctctcaaaccttgaagatatcatgaggatcctggccaagagcctgcctaaaggccccttcacctacatttccccttcgaacacagagctgaccctgatgatccaggagcggggggacaagaacgtcactatgggtcagagcagcgcacgcatgaagctgaattgggctgtggcagctggagccgaggatccaggccccgccgtggcgggcatcctctccatccagaacatgacgacattgctggccaatgcctccttgaacctgcattccaagaagcaagccgaactggaggagatatatgaaagcagcatccgtggtgtccaactcagacgcctctctgccgtcaactccatctttctgagccacaacaacaccaaggaactcaactcccccatccttttcgccttctcccaccttgagtcctccgatggggaggcgggaagagaccctcctgccaaggacgtgatgcctgggccacggcaggagctgctctgtgccttctggaagagtgacagcgacaggggagggcactgggccaccgagggctgccaggtgctgggcagcaagaacggcagcaccacctgccaatgcagccacctgagcagctttgcgatccttatggctcattatgacgtggaggactggaagctgaccctgatcaccagggtgggactggcgctgtcactcttctgcctgctgctgtgcatcctcactttcctgctggtgcggcccatccagggctcgcgcaccaccatacacctgcacctctgcatctgcctcttcgtgggctccaccatcttcctggccggcatcgagaacgaaggcggccaggtggggctgcgctgccgcctggtggccgggctgctgcactactgtttcctggccgccttctgctggatgagcctcgaaggcctggagctctactttcttgtggtgcgcgtgttccaaggccagggcctgagtacgcgctggctctgcctgatcggctatggcgtgcccctgctcatcgtgggcgtctcggctgccatctacagcaagggctacggccgccccagatactgctggttggactttgagcagggcttcctctggagcttcttgggacctgtgaccttcatcattttgtgcaatgctgtcattttcgtgactaccgtctggaagctcactcagaagttttctgaaatcaatccagacatgaagaaattaaagaaggcgagggcgctgaccatcacggccatcgcgcagctcttcctgttgggctgcacctgggtctttggcctgttcatcttcgacgatcggagcttggtgctgacctatgtgtttaccatcctcaactgcctgcagggcgccttcctctacctgctgcactgcctgctcaacaagaaggttcgggaagaataccggaagtgggcctgcctagttgctggggggagcaagtactcagaattcacctccaccacgtctggcactggccacaatcagacccgggccctcagggcatcagagtccggcatatgaaggcgcatggttctggacggcccagcagctcctgtggccacagcagctttgtacacgaagaccatccatcctcccttcgtccaccactctactccctccaccctccctccctgatcccgtgtgccaccaggagggagtggcagctatagtctggcaccaaagtccaggacacccagtggggtggagtcggagccactggtcctgctgctggctgcctctctgctccaccttgtgacccagggtggggacaggggctggcccagggctgcaatgcagcatgttgccctggcacctgtggccagtactcgggacagactaagggcgcttgtcccatcctggacttttcctctcatgtctttgctgcagaactgaagagactaggcgctggggctcagcttccctcttaagctaagactgatgtcagaggccccatggcgaggccccttggggccactgcctgaggctcacggtacagaggcctgccctgcctggccgggcaggaggttctcactgttgtgaaggttgtagacgttgtgtaatgtgtttttatctgttaaaatttttcagtgttgacacttaaaattaaacacatgcatacagaaaaaaaaaaaaaaaaaaaaaaaaagggcggccgc

SEQ ID NO: 1156 - DNA, 2233 bp, Homo sapiens
ccacgcgtccgattatcatagaagcatgctgccctccaaggcttttgaatttgccaccgtgaagagcatgcatggaatcttcggctgtggccttgcattgccccctgtcttcgcagcggagcttctttatctgacccgtgcatgtgcctctgatgagcagcccttcatcacagctctgcggcctcctcctaggcccccgccttcagctctccagttcatttcccgccttgttcccattgccacctgcgggcttggagggccacctgacattctgtcctttgggtcccctgtgactccagagctccttcccttctggggcgcccacatctgcgacacgcttgtttgcccagtgcattttctacacttagagttcctctcgtgctctcatatttccatttaaagccctctcgagaggtctgtctcctgccagcagcattccttctagtttactagaactccatttctcatcctgccaggaatccagccgtggagtgagcttcagcaagcctctctgcagtctcttgtctgctccaaaactgtggcctctggttgtgagaaatgggcatcctgagtcagtgagagcagtagttagcttgcagcagcttcccctctccccctgagtgagcctttcttcctcttcctcctctttcattcagcctcatcctgccttgggtccatttgacagataatggcaccttgaggccttgtcttttgcatggcatctgtgcctgactggtcagaaattacttgtgaagcaacatagggggttgttggttgggtccacttttaggatgaagtcagaagggatcgtgagtgatgcttggccaataagaatgtattgatttgatttactaattaatttcatttccagacaccaatatatgcatagccttgtttgaagaaaattaaggagaaccattttgtaaatggcaatgagtgtaagacacttaactatcttcctgctctccctggcgtgggcttccgcgctccctgactctgcttttatttaaggtgtctgggaaggcatttgtccttcggcttcccagctggcttcttgccttctcactcactgcctcccgtagcctgtgggcagaatccctcaccgtgcccaccttgccctgctctcgtctgacctcacctctgtttccaggatttgctatggctgtcccctgccagtcatgctctgtgcttgctactctgagtgtgtccctggtcccactctcttgcagcctctgtgtcttagcacatgctgccctgatggcccaagggcccttcccctttgtttctgtctggggaatgttctgtctcctctttcttgaacctccttatattccctcaagaagacttaaggcaaaaacaaacctgaacttactatgtgtggtatttttgtgttataagtgtaggacctagtcatagtaacacatttcaaaaatatggaaccgtataaagaaaatgagcatcactcataaatcactatttagacacaagcattgtttacgtttctaatattctttctttagtggtgcttttcatgattttatgtgcatttgcattttactgactaaatattactatataaacattttcatatcttgccacttcacctaacaatacagcacaagcagcttctcatggcattaagaattgtttgtacatgtaattttgaatggctgtatgctgtttcatcttcagaatataccataattctaatttttcatcattataaatagcactgtgacgaacatccttcttaacaaaattctttgtctgcacctatgattattttctaaggtagattattagaatttgaaatgccttgcacaaaggacagtaactttttcacccttagtttcagagagaacatgttgtctctggagaaacacagaaacatgaaaaagcacaaagaagaaaataggcctggcacggtggctcatgcctgtaatctcagcacttttggaggccgaggtgggcggatcacgaggtcagggattcgagaccagcctggccaatatggtgaaaccccgtctctactaaaaatacaaaaactagctggacttggtagcgcatgcctgtaatcccagctactcaggaggctgagacaggagaattgcttgaatccgggaggcagaggttgcagtgagctgagattgtatcactgcactccagcctgggtgacaaagtgaaattccgtctccaaaaaaaaaaaaaaaaaaaaaaaaaaaaaaaaaaaaaa

SEQ ID NO: 1157 - DNA, 2412 bp, Homo sapiens
caaagtagccctccattgtgtatatgtactacactttctttatccactcatctgttgagggacacttaggttgcttccaaatcttgtctattgtgaacagtgctgcaaccaacatgggagtgcagatatctcatccatataccgatttcctttctttacagtatataccccccagtgagattgctgggtcaaatcgtagttctgtttttagttttttgaggaacctccaaactgttcttcatagtgtttgtactaatttacattcccaccaacagtgtacaagtattgccttttctccacatcctcaaaaacatttcttattgcctgttttttggttaaaagccattttgactgagatgagctgttatctcattgtagttttgatttgcatttctctgatgatcagtgatgttgagcaccttttcatatgcacacttgccatttgtatgtctgcctttgagacatgtctattcaaatattttgaccattttttgaatggtttattagatttttttcctctagagttgtctgagctcctgatatattctggctatcaatcctttgtcagatgggtagtttgcaaatattttctgtcattctgtgggttgtctcttcacttcgytgcctgtttcctttgctgtgcaaaagctttttaccttgatgtgatcacatttgcttatttttgctttggttgtctgtgcttatagggtattgctcaagaaatttttggccagaccaatgtcttgtagattttccccaatattttcttacagtcataatgtgattttaattaccaccgttcattccacaaattattgattgaacacctgacaatatgatggtgaagtaagttcttgcccccctggaacatatagttgggtggcaatagttgacagagtgattttacacactttatatataaaacatgtgtatacatatgtatttaaagatatatacactgtataatgtatatgtacattattcacatataagcatatggcatgcattatacacttatatatacatattttatacatgatctaaatctaaactatgctttaagatggaattattatctctctcttagcaaacaaaaagccatggctcagaaatattaaacattttacccaaagacatgtacaactaataagtggttgacatgaggctcaaatgtaggttcgagttttgaccccaaatcatagcatacattgaagtatcctaaatacttcaagcatcattggatgacatgtcatacaataatggaggaggcctgcaagtctgaggcaggccggattcttcacaatcccaaaccttattccaccagaagagaaaccaaagggaagtgtgtttcctcacaaatacattcatgcagatcctcagggccttcagctttcccattcattactccacatggcaactggctaaatatttttgactcttcctcattgggatgatactgataccagttcattgtcatttttccaagaatagagaggatgaaaactcaaagcatggaagacattcatacatggccatctgtcaagatacttaataatacaacctctcatttgtagagcacattcgaacttataaaatcttatccaaattatttcatttcatatgttctagaaatctctgaggtagtcattcttatcattttagtgctgggaactgagccttagagagggcaagtggcttacacaagtgtgggcagtaagaaagtcatagaaccagctgggcgcgatggctcacacctgtaatcccagcactctgggaggctgaggcagaaggaacacgagatcaggagttcaagaccagcctggccaacacggtgaaaccccgtctttactgaaaaaaataacataaatattagctgggtgtggttgtgcacacctgtaatcccagctacctgggaggctgaggtgggagaattgcttgaacctgacaggcggagcttgcagtgagctgagatcatgcaattgcactccagcctgggtgacagagggagaacctgtctcaaaaaaataaaaataaaaataaaatttaaaaaaagagacagagagagagtgcttgagctagatcatctaagattcagccaaccatctcagcagtgttaccagagcttgtaagtgaaggcagatttggggtaaaascagcttttatttatatgtgtcttcagtgagtcagattagttggtttgcaggccatattttgaaaaccmctaggctttagaatatttaattctttctccaattctgactaaccctcccaagaattgaaatgttctaaaaccctgaaaaatgaaaacccttccaaccgaacaccaataattatcatttttgtatttttctcctcaaaataggcaattaaacatgtaaaaataaataaagacttcaaaaaaaaaaaaaaagg

SEQ ID NO: 1158 - DNA, 1648 bp, Homo sapiens
gggtaaacggaagagctgggtgctgacggcgctgggcgggtcaggggcggagagcgtgctaaccaatgacttgagggagtagggggccgggtttgggccctcagttgctaagggctacccgagtgggaagcggttcaagagatggggtgaagggtggttcaccggttcttcaagtcctcagccttctggcccgcggaagttaagcaaccaagaggcgggcctaagaccggaagcaggaaggagggcgcaggaagcagggcgccgcagcctgtcgtacggtccttctgtgggtctgtcggtgccgagggcaggatggagaagctgcggctcctgggcctccgctaccaggagtacgtgactcgtcacccggccgccacggcccagctggagacagcagtgcggggcttcagttacctgctggcaggtcgattcgccgattcgcacgagctgtcagagctggtgtactctgcctctaacctgcttgtgctgctcaatgacgggatcctacggaaggagcttcggaaaaagttgcctgtgtcgctgtcccagcagaagctgctgacatggctgagcgtgctggagtgcgtggaggtgttcatggagatgggagctgccaaggtgtggggtgaagtgggccgctggcttgtcatcgccctcatccagctggccaaggctgtactgcggatgctcctgctgctctggttcaaggctggcctccagacttcaccccctatcgttccactggacagagagacccaggcacagcccccggatggtgaccacagccctggcaaccatgagcagtcctacgtggggaagcggtcaaaccgggtggtgcgaaccctccagaacacgccgtccctgcactccaggcactggggagctccccagcagcgggagggacggcagcagcagcatcacgaggagctgagtgcgacccccacccccctggggctgcaggagaccatcgcagagtttttgtacattgcccggccgctgctgcacttgctcagcctgggcctgtggggtcagaggtcgtggaaaccctggctcttggctggtgttgtggacgtgaccagstgagcctkggcctgcctggggcttcactctccactgggctttctgctataatcctggcctcacataggcggggtggcagcggcccctgctcctcctgttgctgcccctctggacacccagcccatggctcctccccttccgtgggcctagatcatgcccctggccctgaccatgtcctccctgcctcccagcctgagcctcctgagtgacagaaagggcctgacccggagggagcggcgggagctgcggcgccggaccatcctgctgctctactacctgctgcgctctcctttctacgaccgcttctccgaggccaggatcctcttcctgctccagttgctggccgaccacgtccctggcgttggcctggtcacaaggccgctcatggattacttgcccacctggcagaaaatctacttctacagttggggctgacagacctcccggaaggagggtgtggggaggggtggggcagggagcccctcttccctaataaaactgactccggcagcgwmaaaaaaaaaaaaaaaaaaaaaaaaaaaaaaaaaaaaaaaaaaaaagggcggcc

SEQ ID NO: 1159 - DNA, 865 bp, Homo sapiens
gtgtccagagggattccaggaagggccacactcctcttgccaaggctggaacctcctgtagagaggagtgtggcccttcctggaatccctctggacacaccctcctagcatcctctaggaaagatgcggcagctcaaagggaagcccaagaaggagacctccaaggacaagaaggagcggaagcaagccatgcaggaggcccggcagcagatcactacagtggtactgcccacgctggccgtggtcgtgctcttgatcgtggtgtttgtgtacgtggccacgcgccccaccatcaccgagtgagccccgcagccggccgcggaccccatcggcagggagaggaggcgcgggagggggacgcaaacaaaaaatggctttcatattcagagatgttcatgttgctgagctgtaagcaggagcaccctgtcttctctggtctttgacttgattaaagtatctccgctttcttgggagggaataggggatgttttatcagtgaatgtgccatacaccttatggtccacttcatgtgcctttcagacttcaaarcgcgcgcgcatgtgtgtgtgtgtgtgtgtgtgtgtgtgtgtgtgcttctttttctctcctaaaaatcgataagtagctccacctgaagagggatggaacctctgggtcaggaaacagctggaatccacactcacctcattcccattgtttggatcatgcctctttccaacacgtgttcacaatctccaaagggactgtatttcttctctgtgcttaatgtgatttgaaatatgttgaatcaaagtgaaatatttattttttgaataaaggagataatagccttaaaaaaaaaaaaaaaaaaaaaaagggcggccgc

SEQ ID NO: 1160 - DNA, 4978 bp, Homo sapiens
ccacgcgtccgggcagcctcctccaggagcggggccctgcacaccatggcccccgggtgggcaggggtcggcgccgccgtgcgcgcccgcctggcgctggccttggcgctggcgagcgtcctgagtgggcctccagccgtcgcctgccccaccaagtgtacctgctccgctgccagcgtggactgccacgggctgggcctccgcgcggttcctcggggcatcccccgcaacgctgagcgccttgacctggacagaaataatatcaccaggatcaccaagatggacttcgctgggctcaagaacctccgagtcttgcatctggaagacaaccaggtcagcgtcatcgagagaggcgccttccaggacctgaagcagctagagcgactgcgcctgaacaagaataagctgcaagtccttccagaattgcttttccagagcacgccgaagctcaccagactagatttgagtgaaaaccagatccaggggatcccgaggaaggcgttccgcggcatcaccgatgtgaagaacctgcaactggacaacaaccacatcagctgcattgaagatggagccttccgagcgctgcgcgatttggagatccttaccctcaacaacaacaacatcagtcgcatcctggtcaccagcttcaaccacatgccgaagatccgaactctgcgcctccactccaaccacctgtactgcgactgccacctggcctggctctcggattggctgcgacagcgacggacagttggccagttcacactctgcatggctcctgtgcatttgaggggcttcaacgtggcggatgtgcagaagaaggagtacgtgtgcccagccccccactcggagcccccatcctgcaatgccaactccatctcctgcccttcgccctgcacgtgcagcaataacatcgtggactgtcgaggaaagggcttgatggagattcctgccaacttgccggagggcatcgtcgaaatacgcctagaacagaactccatcaaagccatccctgcaggagccttcacccagtacaagaaactgaagcgaatagacatcagcaagaatcagatatcggatattgctccagatgccttccagggcctgaaatcactcacatcgctggtcctgtatgggaacaagatcaccgagattgccaagggactgtttgatgggctggtgtccctacagctgctcctcctcaatgccaacaagatcaactgcctgcgggtgaacacgtttcaggacctgcagaacctcaacttgctctccctgtatgacaacaagctgcagaccatcagcaaggggctcttcgcccctctgcagtccatccagacactccacttagcccaaaacccatttgtgtgcgactgccacttgaagtggctggccgactacctccaggacaaccccatcgagacaagcggggcccgctgcagcagcccgcgccgactcgccaacaagcgcatcagccagatcaagagcaagaagttccgctgctcaggctccgaggattaccgcagcaggttcagcagcgagtgcttcatggacctcgtgtgccccgagaagtgtcgctgtgagggcacgattgtggactgctccaaccagaagctggtccgcatcccaagccacctccctgaatatgtcaccgacctgcgactgaatgacaatgaggtatctgttctggaggccactggcatcttcaagaagttgcccaacctgcggaaaataaatctgagtaacaataagatcaaggaggtgcgagagggagctttcgatggagcagccagcgtgcaggagctgatgctgacagggaaccagctggagaccgtgcacgggcgcgtgttccgtggcctcagtggcctcaaaaccttgatgctgaggagtaacttgatcggctgtgtgagtaatgacacctttgccggcctgagttcggtgagactgctgtccctctatgacaatcggatcaccaccatcacccctggggccttcaccacgcttgtctccctgtccaccataaacctcctgtccaaccccttcaactgcaactgccacctggcctggctcggcaagtggttgaggaagaggcggatcgtcagtgggaaccctaggtgccagaagccatttttcctcaaggagatccccatccaggatgtggccatccaggacttcacctgtgatggcaacgaggagagtagctgccagctgagcccgcgctgcccggagcagtgcacctgtatggagacagtggtgcgatgcagcaacaaggggctccgcgccctccccagaggcatgcccaaggatgtgaccgagctgtacctggaaggaaaccacctaacagccgtgcccagagagctgtccgccctccgacacctgacgcttattgacctgagcaacaacagcatcagcatgctgaccaattacaccttcagtaacatgtctcacctctccactctgatcctgagctacaaccggctgaggtgcatccccgtccacgccttcaacgggctgcggtccctgcgagtgctaaccctccatggcaatgacatttccagcgttcctgaaggctccttcaacgacctcacatctctttcccatctggcgctgggaaccaacccactccactgtgactgcagtcttcggtggctgtcggagtgggtgaaggcggggtacaaggagcctggcatcgcccgctgcagtagccctgagcccatggctgacaggctcctgctcaccaccccaacccaccgcttccagtgcaaagggccagtggacatcaacattgtggccaaatgcaatgcctgcctctccagcccgtgcaagaataacgggacatgcacccaggaccctgtggagctgtaccgctgtgcctgcccctacagctacaagggcaaggactgcactgtgcccatcaacacctgcatccagaacccctgtcagcatggaggcacctgccacctgagtgacagccacaaggatgggttcagctgctcctgccctctgggctttgaggggcagcggtgtgagatcaacccagatgactgtgaggacaacgactgcgaaaacaatgccacctgcgtggacgggatcaacaactacgtgtgtatctgtccgcctaactacacaggtgagctatgcgacgaggtgattgaccactgtgtgcctgagctgaacctctgtcagcatgaggccaagtgcatccccctggacaaaggattcagctgcgagtgtgtccctggctacagcgggaagctctgtgagacagacaatgatgactgtgtggcccacaagtgccgccacggggcccagtgcgtggacacaatcaatggctacacatgcacctgcccccagggcttcagtggacccttctgtgaacaccccccacccatggtcctactgcagaccagcccatgcgaccagtacgagtgccagaacggggcccagtgcatcgtggtgcagcaggagcccacctgccgctgcccaccaggcttcgccggccccagatgcgagaagctcatcactgtcaacttcgtgggcaaagactcctacgtggaactggcctccgccaaggtccgaccccaggccaacatctccctgcaggtggccactgacaaggacaacggcatccttctctacaaaggagacaatgaccccctggcactggagctgtaccagggccacgtgcggctggtctatgacagcctgagttcccctccaaccacagtgtacagtgtggagacagtgaatgatgggcagtttcacagtgtggagctggtgacgctaaaccagaccctgaacctagtagtggacaaaggaactccaaagagcctggggaagctccagaagcagccagcagtgggcatcaacagccccctctaccttggaggcatccccacctccaccggcctctccgccttgcgccagggcacggaccggcctctaggcggcttccacggatgcatccatgaggtgcgcatcaacaacgagctgcaggacttcaaggccctcccaccacagtccctgggggtgtcaccaggctgcaagtcctgcaccgtgtgcaagcacggcctgtgccgctccgtggagaaggacagcgtggtgtgcgagtgccgcccaggctggaccggcccactctgcgatcaggaggcccgggacccctgcctcggccacagatgccaccatggaaaatgtgtggcaactgggacctcatacatgtgcaagtgtgccgagggctatggaggggacttgtgtgacaacaagaatgactctgccaatgcctgctcagccttcaagtgtcaccatgggcagtgccacatctcagaccaaggggagccctactgcctgtgccagcccggctttagcggcgagcactgccaacaagagaatccgtgcctgggacaagtagtccgagaggtgatccgccgccagaaaggttatgcatcatgtgccacagcctccaaggtgcccatcatggaatgtcgtgggggctgtgggccccagtgctgccagcccacccgcagcaagcggcggaaatacgtcttccagtgcacggatggctcctcgtttgtagaagaggtggagagacacttagagtgcggctgcctcgcgtgttcctaagcccctgcccgcctgcctgccacctctcggactccagcttgatggagttgggacagccatgtgggaccccctggtgattcagcatgaaggaaatgaagctggagaggaaggtaaagaagaagagaatattaagtatattgtaaaataaacaaaaaatagaacttatttttattatggaaagtgactattttcttcttttattatataaatatattacaccatctgcgtatatgtaccatatagtgagttatttttaccaagttttgtgttgtgtatttgttgtgtttttaaaaatagctgtttaaaaatttaagaaaaaaatagactaataaaaatgctttaaaacaaaaaaaaaaaaaaa

SEQ ID NO: 1161 - DNA, 1458 bp, Homo sapiens
cctgctctatcttgtctcggtctctcactctgccttatacccctcagttgaattatttcttctgaggaggcaagaactgaggctgctgcagactgatatggattcaccactgctaacacctcctggttggaactacaggaatagaactggaaagggaaaaaaggcagcattcaccacatcccaatcctgaatccaagagtctaagatagtcccccactcctatctcaggcttagaggattagattaatctcctgggagggaagactcttccttgaaacatttttttttatctgcctgtagctattgggataattcgggaaatccacagggacagttcaagtcatctttgtcctctactttctgttgcactctcagccttgttctctttttagaaactgcatggtaactattatatagctaaagaagagcattctgacctctgccctgggacttcctggatcctcctcttcttataaatacaagggcagagctggtatcccggggagccaggaagcagtgagcccaggagtcctcggccagccctgcctgcccaccaggaggatgaaggtctccgtggctgccctctcctgcctcatgcttgttgctgtccttggatcccaggcccagttcacaaatgatgcagagacagagttaatgatgtcaaagcttccactggaaaatccagtagttctgaacagctttcactttgctgctgactgctgcacctcctacatctcacaaagcatcccgtgttcactcatgaaaagttattttgaaacgagcagcgagtgctccaagccaggtgtcatattcctcaccaagaaggggcggcaagtctgtgccaaacccagtggtccgggagttcaggattgcatgaaaaagctgaagccctactcaatataataataaagagacaaaagaggccagccacccacctccaacacckcckgagcctctgaagctcccaccaggccagctctcctcccacaacagcttcccacagcatgaagatctccgtggctgccattcccttcttcctcctcatcaccatcgccctagggaccaagactgaatcctcctcacggggaccttaccacccctcagagtgctgcttcacctacactacctacaagatcccgcgtcagcggattatggattactatgagaccaacagccagtgctccaagcccggaattgtcttcatcaccaaaaggggccattccgtctgtaccaaccccagtgacaagtgggtccaggactatatcaaggacatgaaggagaactgagtgacccagaaggggtggcgaaggcacagctcagagacataaagagaagatgccaaggccccctcctccacccaccgctaactctcagccccagtcaccctcttggagcttccctgctttgaattaaagaccactcatgctcttaaaaaaaaaaaaaaaaaatgaccctcga

SEQ ID NO: 1162 - DNA, 1503 bp, Homo sapiens
ccacgcgtccggtcattggtaagggggtgcattctcctcacaaaggggttttatggacttcctcaggcggagagcttctgagaacacaggcaggatggaaaaagactactagccacttttgctttcccaaccccccttaatgccatccttcattgtctttctggcttctcttcttctggcacagtaccattttgggtctgtgccccagtgtggagcaaaacattgcctgtcccattctgatatacttcagaatttgagagcagaagttaatgtggaacaaaagttttcaccatctctcaagccccaaggactggagccacctctggaataatgtgttaaatatctgtatattatatatatgtagagaaaaatctaattttttggtttgatttccttcccattaagaatcttggtttttgatacccttgtctccctgagactctttcttggacacgtgttgatgtggatggcactcctgctctccatcttttatgggcagagagatttcaaaacctgagcaggatcatgtctggcagttactaaacagggactttgtccatggtttgtatcatggggtgcctactgctgtctaaactctgctctcctaattagctgactcttgaaaatgaaatcctaacctctttcctgcctcttttctttctcttttcaggaagagtgtgggtagaaagtccggagggcaacttccaatttaattctgctctgtccggcgcataggctgaattccaaaagaactttcttcctaggatgtggggcttaaagcaccgtcatgtggggtggatcagataattgctcctgtggggccctggcttccttctctgtttgtgcagtatttgtttttgttgtcttgttgagaaatatcccctgtgcaacccacccttggttgaggatcacaaattgaggtgccttccttgtatgctttttgttagtattttttgtttttgttccttaactgctgagcctcagccagcgtgggtcctgggggaaataccattccaaaggaagccatccctatggggaaattggttttactgggtaaattaatacttttatttcttcccctatcccttccttcctagttgtgataaacatgggagaggagtgactttgactgctggggaatttcctcctaagaaccttattcccaaaataagccagggattatgtcaaggcttctttcaaggaggctcataaaagcagtgacctcatccggggctttggatagagtgagaattccccaactaaattggacttctctgctttatccccttctcttccttcaccatctgcactacatttctggctgatcccaatcagattcccgctaatggaagaagtttagaatctttcaggtggaataaagtcacatgaaaacaaaacacaactatatatattttcagtttttttgccttattgatttttttccaaaaaaaaaaaactactaaattaaataattttttaaaagtcaaaaaaaaaaaaaaaaaa

SEQ ID NO: 1163 - DNA, 1009 bp, Homo sapiens
ccacgcgtccgcatgagggtggagaagagggcgagagggagagaggataaatagcagcgtggcttccctggctcctctctgcatccttcccgaccttcccagcaatatgcatcttgcacgtctggtcggctcctgctccctccttctgctactgggggccctgtctggatgggcggccagcgatgaccccattgagaaggtcattgaagggatcaaccgagggctgagcaatgcagagagagaggtgggcaaggccctggatggcatcaacagtggaatcacgcatgccggaagggaagtggagaaggttttcaacggacttagcaacatggggagccacaccggcaaggagttggacaaaggcgtccaggggctcaaccacggcatggacaaggttgcccatgagatcaaccatggtattggacaagcaggaaaggaggcagggcagcttggccagggagttcaccatacccttgaacaggccgggaaggaagcagacaaagcggtccaagggttccacactggggtccaccaggctgggaaggaagcagagaaacttggccaaggggtcaaccatgctgctgaccaggctggaaaggaagtggagaagcttggccaaggtgcccaccatgctgctggccaggccgggaaggagctgcagaatgctcataatggggtcaaccaagccagcaaggaggccaaccagctgctgaatggcaaccatcaaagcggatcttccagccatcaaggaggggccacaaccacgccgttagcctctggggcctcggtcaacacgcctttcatcaaccttcccgccctgtggaggagcgtcgccaacatcatgccctaaactggcatccggccttgctgggagaataatgtcgccgttgtcacatcagctgacatgacctggaggggttgggggtgggggacaggtttctgaaatccctgaagggggttgtactgggatttgtgaataaacttgatacactaaaaaaaaaaaaaaaaa

SEQ ID NO: 1164 - DNA, 1278 bp, Homo sapiens
  misc_feature (998)..(998): n equals a,t,g, or c
tcgacccacgcgtccgccatcacctgcccatacacgccagctcattgtattggccttactcttccaagaggccatggaagtataaataataaagcaagaaaggcagatgcatttggctggctcagtggacttctgaatgtactgtctactactcaacaggatattcttcaaggaaaatgaaccccacactaggcctggccatttttctggctgttctcctcacggtgaaaggtcttctaaagccgagcttctcaccaaggaattataaagctttgagcgaggtccaaggatggaagcaaaggatggcagccaaggagcttgcaaggcagaacatggacttaggctttaagctgctcaagaagctggccttttacaaccctggcaggaacatcttcctatcccccttgagcatctctacagctttctccatgctgtgcctgggtgcccaggacagcaccctggacgagatcaagcaggggttcaacttcagaaagatgccagaaaaagatcttcatgagggcttccattacatcatccacgagctgacccagaagacccaggacctcaaactgagcattgggaacacgctgttcattgaccagaggctgcagccacagcgtaagtttttggaagatgccaagaacttttacagtgccgaaaccatccttaccaactttcagaatttggaaatggctcagaagcagatcaatgactttatcagtcaaaaaacccatgggaaaattaacaacctgatcgagaatatagaccccggcactgtgatgcttcttgcaaattatattttctttcgagccaggtggaaacatgagtttgatccaaatgtaactaaagaggaagactctctcctacataggtgtctccaaaatctttgaggaacatggtgatctcaccaagatcgcccctcatcgcagcctgaaagtgggcgaggctgtgcacaaggctgagctgaagatggatgagaggggtacggaaggggccgntggcaccggagcacagactctgcccatggagacaccactcgtcgtcaagatagacaaaccctatctgctgctgatttacagcgagaaaataccttccgtgctcttcctgggaaagattgttaaccctattggaaaataaaggagaattcctgcttgccacagaccccgaaaaaaaaaaaaaaaaaaaaaaaaaaaaaaaaaaaaaaaaaaaaaaaaaaaaaaaaaaaaaaaaaaaaaaaaaaaaaaaaaaaaaaaaaaaaaaaaaaaaaaaaaaaaaaaa

SEQ ID NO: 1165 - DNA, 1835 bp, Homo sapiens
ggcacgagagccgccctgggtgtcagcggctcggctcccgcgcacgctccggccgtcgcgcagcctcggcacctgcaggtccgtgcgtcccgcggctggcgcccctgactccgtcccggccagggagggccatgatttccctcccggggcccctggtgaccaacttgctgcggtttttgttcctggggctgagtgccctcgcgcccccctcgcgggcccagctgcaactgcacttgcccgccaaccggttgcaggcggtggagggaggggaagtggtgcttccagcgtggtacaccttgcacggggaggtgtcttcatcccagccatgggaggtgccctttgtgatgtggttcttcaaacagaaagaaaaggaggatcaggtgttgtcctacatcaatggggtcacaacaagcaaacctggagtatccttggtctactccatgccctcccggaacctgtccctgcggctggagggtctccaggagaaagactctggcccctacagctgctccgtgaatgtgcaagacaaacaaggcaaatctaggggccacagcatcaaaaccttagaactcaatgtactggttcctccagctcctccatcctgccgtctccagggtgtgccccatgtgggggcaaacgtgaccctgagctgccagtctccaaggagtaagcccgctgtccaataccagtgggatcggcagcttccatccttccagactttctttgcaccagcattagatgtcatccgtgggtctttaagcctcaccaacctttcgtcttccatggctggagtctatgtctgcaaggcccacaatgaggtgggcactgcccaatgtaatgtgacgctggaagtgagcacagggcctggagctgcagtggttgctggagctgttgtgggtaccctggttggactggggttgctggctgggctggtcctcttgtaccaccgccggggcaaggccctggaggagccagccaatgatatcaaggaggatgccattgctccccggaccctgccctggcccaagagctcagacacaatctccaagaatgggaccctttcctctgtcacctccgcacgagccctccggccaccccatggccctcccaggcctggtgcattgacccccacgcccagtctctccagccaggccctgccctcaccaagactgcccacgacagatggggcccaccctcaaccaatatcccccatccctggtggggtttcttcctctggcttgagccgcatgggtgctgtgcctgtgatggtgcctgcccagagtcaagctggctctctggtatgatgaccccaccactcattggctaaaggatttggggtctctccttcctataagggtcacctctagcacagaggcctgagtcatgggaaagagtcacactcctgacccttagtactctgcccccacctctctttactgtgggaaaaccatctcagtaagacctaagtgtccaggagacagaaggagaagaggaagtggatctggaattgggaggagcctccacccacccctgactcctccttatgaagccagctgctgaaattagctactcaccaagagtgaggggcagagacttccagtcactgagtctcccaggcccccttgatctgtaccccacccctatctaacaccacccttggctcccactccagctccctgtattgatataacctgtcaggctggcttggttaggttttactggggcagaggatagggaatctcttattaaaactaacatgaaatatgtgttgttttcatttgcaaatttaaataaagatacataatgtttgtatgaaaaaaaaaaaaaaaaaaaaa

SEQ ID NO: 1166 - DNA, 1622 bp, Homo sapiens
ccacgcgtccgcgagtgcgttcgcggctgctttgacctggtgggcgccgcctccggcactgcaccgaggcggggcgccagcgcccaggttgctgggctggccttggcgcccccttcccctacccagagcgcaggcaggcaggggggtcccgccgcgccccttcagcatatgccggtgcagctgacgacagccctgcgtgtggtgggcaccagcctgtttgccctggcagtgctgggtggcatcctggcagcctatgtgacgggctaccagttcatccacacggaaaagcactacctgtccttcggcctgtacggcgccatcctgggcctgcacctgctcattcagagcctttttgccttcctggagcaccggcgcatgcaacgtgccggccaggccctgaagctgccctccccgcggcggggctcggtggcactgtgcattgccgcataccaggaggaccctgactacttgcgcaagtgcctgcgctcggcccagcgcatctccttccctgacctcaaggtggtcatggtggtggatggcaaccgccaggaggacgcctacatgctggacatcttccacgaggtgctgggcggcaccgagcaggccggcttctttgtgtggcgcagcaacttccatgaggcaggcgagggtgagacggaggccagcctgcaggagggcatggaccgtgtgcgggatgtggtgcgggccagcaccttctcgtgcatcatgcagaagtggggaggcaagcgcgaggtcatgtacacggccttcaaggccctcggcgattcggtggactacatccaggtgtgcgactctgacactgtgctggatccagcctgcaccatcgagatgcttcgagtcctggaggaggatccccaagtagggggagtcgggggagatgtccagatcctcaacaagtacgactcatggatttccttcctgagcagcgtgcggtactggatggccttcaacgtggagcgggcctgccagtcctactttggctgtgtgcagtgtattagtgggcccttgggcatgtaccgcaacagcctcctccagcagttcctggaggactggtaccatcagaagttcctaggcagcaagtgcagcttcggggatgaccggcacctcaccaaccgagtcctgagccttggctaccgaactaagtataccgcgcgctccaagtgcctcacagagacccccattaagtacctccggtggctcaaccagcaaacccgctggagcaagtcttacttccgggagtggctctacaactctctgtggttccataagcaccacctctggatgacctacgagtcagtggtcacgggtttcttccccttcttcctcattgccacggttatacagcttttctaccggggccgcatctggaacattctcctcttcctgctgacggtgcagctggtgggcattatcaaggccacctacgcctgcttccttcggggcaatgcagagatgatcttcatgtccctctactccctcctctatatgtccagccttctgccggccaagatctttgccattgctaccatcaacaaatctggctggggcacctctggccgaaaaacaaaaaaaaaaaaaaaaaaaaaaaaaaaaaaaaaaaa

SEQ ID NO: 1167 - DNA, 1715 bp, Homo sapiens
tcgacccacgcgtccgctcggagcaggcggagtaaagggacttgagcgagccagttgccggattattctatttcccctccctctctcccgccccgtatctcttttcacccttctcccaccctcgctcgcgtagccatggcggagccgtcggcggccactcagtcccattccatctcctcgtcgtccttcggagccgagccgtccgcgcccggcggcggcgggagcccaggagcctgccccgccctggggacgaagagctgcagctcctcctgtgcggtgcacgatctgattttctggagagatgtgaagaagactgggtttgtctttggcaccacgctgatcatgctgctttccctggcagctttcagtgtcatcagtgtggtttcttacctcatcctggctcttctctctgtcaccatcagcttcaggatctacaagtccgtcatccaagctgtacagaagtcagaagaaggccatccattcaaagcctacctggacgtagacattactctgtcctcagaagctttccataattacatgaatgctgccatggtgcacatcaacagggccctgaaactcattattcgtctctttctggtagaagatctggttgactccttgaagctggctgtcttcatgtggctgatgacctatgttggtgctgtttttaacggaatcacccttctaattcttgctgaactgctcattttcagtgtcccgattgtctatgagaagtacaagacccagattgatcactatgttggcatcgcccgagatcagaccaagtcaattgttgaaaagatccaagcaaaactccctggaatcgccaaaaaaaaggcagaataagtacatggaaaccagaaatgcaacagttactaaaacaccatttaatagttataacgtcgttacttgtactatgaaggaaaatactcagtgtcagcttgagcctgcattccaagctttttttttaatttggtgttttctcccatcctttccctttaaccctcagtatcaagcacaaaaattgatggactgataaaagaactatcttagaactcagaagaagaaagaatcaaattcataggataagtcaataccttaatggtggtagagcctttacctgtagcttgaaaggggaaagattggaggtaagagagaaaatgaaagaacacctctgggtccttctgtccagttttcagcactagtcttactcagctatccattatagttttgcccttaagaagtcatgattaacttatgaaaaaattatttggggacaggagtgtgataccttccttggtttttttttgcagccctcaaatcctatcttcctgccccacaatgtgagcagctacccctgatactccttttctttaatgatttaactatcaacttgataaataacttataggtgatagtgataattcctgattccaagaatgccatctgataaaaaagaatagaaatggaaagtgggactgagagggagtcagcaggcatgctgcggtggcggtcactccctctgccactatccccagggaaggaaaggctccgccatttgggaaagtggtttctacgtcactggacaccggttctgagcattagtttgagaactcgttcccgaatgtgctttcctccctctcccctgcccacctcaagtttaataaataaggttgtacttttcttactataaaaaaaaaaaaaaaaaaaaaaaa

SEQ ID NO: 1168 - DNA, 537 bp, Homo sapiens
ccacgcgtccgaagatctccaaggatttggtggcatacccactccagcacacagaagcatgaggttcatgactctcctcttcctgacagctctggcaggagccctggtctgtgcctatgatccagaggccgcctctgccccaggatcggggaacccttgccatgaagcatcagcagctcaaaaggaaaatgcaggtgaagacccagggttagccagacaggcaccaaagccaaggaagcagagatccagccttctggaaaaaggcctagacggagcaaaaaaagctgtggggggactcggaaaactaggaaaagatgcagtcgaagatctagaaagcgtgggtaaaggagccgtccatgacgttaaagacgtccttgactcagtactatagctgtaaggagaagctgagaaatgatacccaggagcagcaggctttacgtcttcagcctaaaacctaaaaaaaaaaaaaaaaaaaaaatttaaaacagctattaaactgaaagcatctgtaaaaaaaaaaaaaaaaaaaaaaaaaaa

SEQ ID NO: 1169 - DNA, 3027 bp, Homo sapiens
  misc_feature (9)..(9): n equals a,t,g, or c
  misc_feature (59)..(59): n equals a,t,g, or c
  misc_feature (65)..(65): n equals a,t,g, or c
  misc_feature (3004)..(3004): n equals a,t,g, or c
  misc_feature (3015)..(3015): n equals a,t,g, or c
  misc_feature (3024)..(3025): n equals a,t,g, or c
acagcatcnttaggaaacctaaggtagagaatccccccagagagcctggcaagggaatntcgagncacgaagagtttctccaacccaaggaggccagacagagggacgtggtcactctctgaaaagttcaacttgagagacaaaatgcagtggacctccctcctgctgctggcagggctcttctccctctcccaggcccagtatgaagatgaccctcattggtggttccactacctccgcagccagcagtccacctactacgatccctatgacccttacccgtatgagacctacgagccttacccctatggggtggatgaagggccagcctacacctacggctctccatcccctccagatccccgcgactgcccccaggaatgcgactgcccacccaacttccccacggccatgtactgtgacaatcgcaacctcaagtacctgcccttcgttccctcccgcatgaagtatgtgtacttccagaacaaccagatcacctccatccaggaaggcgtctttgacaatgccacagggctgctctggattgctctccacggcaaccagatcaccagtgataaggtgggcaggaaggtcttctccaagctgaggcacctggagaggctgtacctggaccacaacaacctgacccggatgcccggtcccctgcctcgatccctgagagagctccatctcgaccacaaccagatctcacgggtccccaacaatgctctggaggggctggagaacctcacggccttgtacctccaacacaatgagatccaggaagtgggcagttccatgaggggcctccggtcactgatcttgctggacctgagttataaccaccttcggaaggtgcctgatgggctgccctcagctcttgagcagctgtacatggagcacaacaatgtctacaccgtccccgatagctacttccggggggcgcccaagctgctgtatgtgcggctgtcccacaacagtctaaccaacaatggcctggcctccaacaccttcaattccagcagcctccttgagctagacctctcctacaaccagctgcagaagatccccccagtcaacaccaacctggagaacctctacctccaaggcaataggatcaatgagttctccatcagcagcttctgcaccgtggtggacgtcgtgaacttctccaagctgcaggtgctgcgcctggacgggaacgagatcaagcgcagcgccatgcctgccgacgcgcccctctgcctgcgccttgccagcctcatcgagatctgagcagccctggcaccgggtactgggcggaragcccccgtggcatttggcttgatggtttggtttggcttttgctggaaggtccaggatggaccatgtgacagaagtccacgggcaccctctgtagtcttctttcctgtaggtggggttagggggggcgatcagggacaggcagccttctgctgaggacataggcagaagctcactcttttccagggacagaagtggtggtagatggaaggatccctggatgttccaaccccataaatctcacggctcttaagttcttcccaatgatctgaggtcatggaacttcaaaagtggcatgggcaatagtatataaccatacttttctaacaatccctggctgtctgtgagcagcacttgacagctctccctctgtgctgggctggtcgtgcagttactctgggctcccatttgttgcttctcaaaatatacctcttgcccagctgcctcttctgaaatccacttcacccactccactttcctccacagatgcctcttctgtgccttaagcagagtcaggagaccccaaggcatgtgagcatctgcccagcaacctgtggagacaacccacactgtgtctgagggtgaaaggacaccaggagtcacttctatacctccctaacctcacccctggaaagccaccagattggaggtcaccagcatgatgataatattcatgacctgatgtgggaggagacagccaacctcaggcttagatcaatgtatagggctatattttggcagctgggtagctctttgaaggtggataagacttcagaagaggaaaggccagactttgcttaccatcagcatctgcaatgggccaaacacacctcaaattggctgagttgagaaagcagccccagtagttccattcttgcccagcactttctgcattccaaacagcatcctacctgggtttttatccacaaaggtagcggccacatggtttttaaagtatgagaaacacagtttgtcctctccttttatccaagcaggaagattctatatcctgatggtagagacagactccaggcagccctggacttgctagcccaaagaaggaggatgtggttaatctgtttcacctggtttgtcctaaggccatagttaaaaagtaccagctctggctggggtccgtgaagcccaggccaggcagccaaatcttgcctgtgctgggcatacaaccctctgctttcacatctctgagctatatcctcattagtgaaggtggcttttgctttatagtttggctggggagcacttaattcttcccatttcaaaaggtaatgttgcctggggcttaacccacctgccctttgggcaaggttgggacaaagccatctgggcagtcaggggcaaggactgttggaggagagttagcccaagtataggctctgcccagatgccatcacatccctgatactgtgtatgctttgaagcaccttccctgagaagggaagaggggatctttggactasgttcttggctccagacctggaatccacaaaagccaaaccagctcatttcaacaaaggagctccgatgtgaggggcaaggctgccccctgccccagggctcttcagaaagcatctgcatgtgaacaccatcatgcctttataaaggatccttattacaggaaaagcatgagtggtggctaacctgaccaataaagttattttatgattgcaaaaaaaaaaaaaanggggggcccgntttaaaggnncc

SEQ ID NO: 1170 - DNA, 437 bp, Homo sapiens
ccacgcgtccggacgccatgaagatcccggtccttcctgccgtggtgctcctctccctcctggtgctccactctgcccagggagccaccctgggtggtcctgaggaagaaagcaccattgagaattatgcgtcacgacccgaggcgtttaaggctgatgagttcctgaactggcacgccctctttgagtctatcaaaaggaaacttcctttcctcaactgggatgcctttcctaagctgaaaggactgaggagcgcaactcctgatgcccagtgaccatgacctccactggaagagggggctagcatgagcgctgattctcaacctaccataactctttcctgcctcaggaactccaataaaacattttccatccaaaaaaaaaaaaaaaaaaaaaaaaaaaaaaaaaaaaaaaaaaaaaaaaaaaaaaaaaaaaaa

SEQ ID NO: 1171 - DNA, 1195 bp, Homo sapiens
ggcacgagccttgagaagctgcgaagatggcggagtaaggcgtgccgctgcaaactggcctctgggccgggggcgagcagcccccgggaggccgagtgcatctgttggaccgtgcgaggagaagaaaaaaaatatcggccagaggagaggaactaaccgaacattcttcctccctaccttatagaggggagtggtcatctacactaaagcaaagtgttaggcgcgtccgtgcgaagagaccaccaaacaggctttgtgttccttatcacaggaagaaaattttccttgacctttaggtgcttttatattcatctcaaaaacaaattctgaactcaggagtaatccacctggcctgctcttttcatgtcttaacatggcatgtcttttagtttcattattttcctactccttgtatgtcaagaaattacattttgcatgtcttatggagatgctgttaattgcttcagtgagtgcttttctaatctgcagaccatttacatttcctgtttgcagcatgctgtgtgcaaacactcagtaatttggagtattcaattatttgttagggctcttcctatttccaaatgtgctgaattgtctattgatgggattttcagatcttttcatgagaactggaaatgtagctgggtggcacctacctaggttgctacgtagtgagtagactttctcttgggtatagtaagcctcagacagctttcacttttatctactttacttgtggaaataaaacagtcattttgttctgaaagaataagatagctttctgtagagaaggaattcctacctctaaaagctgccttgagaactcagaactggcagttttctgaggtgatttttaaatttcagtattagggagagtccagcatttgctgacacagattctacataactaatgtatgatagcaaatgcaaaactattataatgtggtgtatcttgcgcatacacaggttagaacaagtagactctggcagcagatctccagagacccaagtttaggttctcatagtgtatttgaagtagttatactcctggcttaagtagtttagtgcctgggagaatccattactgaaaagcatttaacttaaaaaaaaaaaaaaaaaaagggcggccgctctagaggatccaagcttacgtacgcgtgcatgcgacgtcatagctcttctatagtgtcaccta

SEQ ID NO: 1172 - DNA, 1715 bp, Homo sapiens
gcgtccgaagaatgcaattgccccggtggtgggagctgggagacccctgtgcttggacgggacagggtcgggggacacgcaggatgagccccgcgaccactggcacattcttgctgacagcttttttattaagctgtgctgatggcataaatggaacagttaactggaagaccagacaggccaacaattttattatcagcagaaaaatggctgctgggatgaaagatgtgtacagtattttctccaaggtacactccgatcggaatgtatacccatcagcaggtgtcctctttgttcatgttttggaaagagaatattttaagggggaatttccaccttacccaaaacctggcgagattagtaatgatcccataacatttaatacaaatttaatgggttacccagaccgacctggatggcttcgatatatccaaaggacaccatatagtgatggagtcctatatgggtccccaacagctgaaaatgtggggaagccaacaatcattgagataactgcctacaacaggcgcacctttgagactgcaaggcataatttgataattaatataatgtctgcagaagacttcccgttgccatatcaagcagaattcttcattaagaatatgaatgtagaagaaatgttggccagtgaggttcttggagactttcttggcgcagtgaaaaatgtgtggcagccagagcgcctgaacgccataaacatcacatcggccctagacaggggtggcagggtgccacttcccattaatgacctgaaggagggcgtttatgtcatggttggtgcagatgtcccgttttcttcttgtttacgagaagttgaaaatccacagaatcaattgagatgtagtcaagaaatggagcctgtaataacatgtgataaaaaatttcgtactcaattttacattgactggtgcaaaatttcattggttgataaaacaaagcaagtgtccacctatcaggaagtgattcgtggagaggggattttacctgatggtggagaatacaaacccccttctgattctttgaaaagcagagactattacacggatttcctaattacactggctgtgccctcggcagtggcactggtcctttttctaatacttgcttatatcatgtgctgccgacgggaaggcgtggaaaagagaaacatgcaaacaccagacatccaactggtccatcacagtgctattcagaaatctaccaaggagcttcgagacatgtccaagaatagagagatagcatggcccctgtcaacgcttcctgtgttccaccctgtgactggggaaatcatacctcctttacacacagacaactatgatagcacaaacatgccattgatgcaaacgcagcagaacttgccacatcagactcagattccccaacagcagactacaggtaaatggtatccctgaagaaagaaaactgactgaagcaatgaatttataatcagacaatatagcagttacatcacatttcttttctcttccaataatgcatgagcttttctggcatatgttatgcatgttggcagtattaagtgtataccaaataatacaacataactttcattttactaatgtatttttttgtacttaaagcatttttgacaatttgtaaaacattgatgactttatatttgttacaataaaagttgatctttaaaataaatattattaatgaaaaaaaaaaaaaaa

SEQ ID NO: 1173 - DNA, 902 bp, Homo sapiens
  misc_feature (10)..(10): n equals a,t,g, or c
  misc_feature (14)..(14): n equals a,t,g, or c
tttttttttngggncccccccccctttttttttttttttttttttttttttttttttttttttttttttttttttttttttttgatcccggaacatttatttccagaggcttttgatagaagagcacaatcttgaataaaattacaccactgtacttaagggcaacactacatagtaagcaaaatctgctctgaaccctttcacagaagagacacttcagaaaggaattttacatctcctgacagttttacaacattcatacctctgatgcacttcaagccccaacccatctctcattttctaacttctttaacagaaatgtgtgttcacaagttgtgtgtgcrtgcacatgtgcctctgtgtgtacacaaaaggctcattttacctacttgataaatgagctgagacgatgttttgggaaaaaaaaaattggaaaaaaaatgttaccccaacacgatggagaagccaatccaaaaaagcttcatgctagagctagctttctcctcagaaacttacatcctaaaaacatccctatgggtgcctaaaaatggaaatccagtgagttcatggccttgagttcactcctgtcctgaatttctcccagtgcaggtccagaagggcgagatgtggcagaaaggagaatgtgggaatgtgtgagtatcccacagccagctcacagtgcagcttgcactcagaaaggagactcagggacacaaggtctcaggatgcacagttcaccttggcctcatgtacctgggctggggagagggagaccattcaaaagcctgtgcttggccgggtgtggtggctcacgcctatcatcccagcactttgggaggctgaggcgggcagatcacttgaggtcaggaggttgagaccagcctgaccaacatggtgaaacc

SEQ ID NO: 1174 - DNA, 599 bp, Homo sapiens
cgggtcgacccacgcgtccgaataactagagaggaacaatggggttattcagaggttttgttttcctcttagttctgtgcctgctgcaccagtcaaatacttccttcattaagctgaataataatggctttgaagatattgtcattgttatagatcctagtgtgccagaagatgaaaaaataattgaacaaatagaggatatggtgactacagcttctacgtacctgtttgaagccacagaaaaaagattttttttcaaaaatgtatctatattaattcctgagaattggaaggaaaatcctcagtacaaaaggccaaaacatgaaaaccataaacatgctgatgttatagttgcaccacctacactcccaggtagagatgaaccatacaccaagcagttcacagaatgtggagagaaaggcgaatacattcacttcacccctgaccttctacttggaaaaaaacaaaatgaatatggaccaccaggcaaactgtttgtccatgagtgggctcacctccggtggggagtgtttgatgagtacaatgaagatcagcctttctaccgtgctaagtcaaraaaaaaaaaaaagggcggccgc

SEQ ID NO: 1175 - DNA, 711 bp, Homo sapiens
ccacgcgtccgcccacgcgtccgcccacgcgtccggaaactgtcagccccagaatgttgacagtcgctctcctagcccttctctgtgcctcagcctctggcaatgccattcaggccaggtcttcctcctatagtggagagtatggaagtggtggtggaaagcgattctctcattctggcaaccagttggacggccccatcaccgccctccgggtccgagtcaacacatactacatcgtaggtcttcaggtgcgctatggcaaggtgtggagcgactatgtgggtggtcgcaacggagacctggaggagatctttctgcaccctggggaatcagtgatccaggtttctgggaagtacaagtggtacctgaagaagctggtatttgtgacagacaagggccgctatctgtcttttgggaaagacagtggcacaagtttcaatgccgtccccttgcaccccaacaccgtgctccgcttcatcagtggccggtctggttctctcatcgatgccattggcctgcactgggatgtttaccccactagctgcagcagatgctgagcctcctctccttggcaggggcactgtgatgaggagtaagaactcccttatcactaacccccatccaaatggctcaataaaaaaatatggttaaggctaaaaaaaaaaaaaaaaaaaaaaaaaaaaaaaaaaaaaaaaaaaaaaaaaaaaaaaa

SEQ ID NO: 1176 - DNA, 1254 bp, Homo sapiens
cccacgcgtccgcccacgcgtccgcccacgcgtccgcccacgcgtccgggtctgtggtccgcaaggccccagtggagcccttgggttcccgcagaaccgactgggtctccagtagtctctgaggagccgctcgaccttctcccgaccctggatctgaggcaggagatgcctcccccgcgggtgttcaagagctttctgagcctgctcttccaggggctgagcgtgttgttatccctggcaggagacgtgctggtcagcatgtacagggaggtctgttccatccgcttcctgttcacggctgtgtcgctgctgagcctctttctgtcagcattctggctggggcttctgtacctggtctctcctttggagaatgaacctaaggagatgctgactctaagtgagtaccacgagcgcgtgcgctcccaggggcagcagctgcagcagctccaggccgagctggataaactccacaaggaggtgtccactgttcgggcagccaacagcgagagagtggccaagctcgtgttccagaggctgaatgaggattttgtgcggaagcccgactatgctttgagctctgtgggagcctccatcgacctgcagaagacatcccacgattacgcagacaggaacactgcctacttctggaatcgcttcagcttctggaactacgcacggccgcccacggttatcctggagccccacgtgttccctgggaattgctgggcttttgaaggcgaccaaggccaggtggtgatccaactgccgggccgagtgcagctgagcgacatcactctgcagcatccaccgcccagcgtggagcacaccggaggagccaacagcgccccccgcgatttcgcggtctttggcctccaggtttatgatgaaactgaagtttccttggggaaattcaccttcgatgttgagaaatcggagattcagactttccacctgcagaatgaccccccagctgcctttcccaaggtgaagatccagattctaagcaactggggccacccccgtttcacgtgcttgtatcgagtccgtgcccacggtgtgcgaacctcagagggggcagagggcagtgcacaggggccccattaaacatgctgatttttggagtagaaaaaaaaaaaaaaaaaaaaaaaaaaaaaaaaaaaaaaaaaaaaaaaaaaaaaaaaaaaaaaaaaaaaaaaaaaaaaaaaaaaaaaaaaaaaaaaaaaaaaaaaaaaaaaaaaaaaaaaaaaaaaaaaa

SEQ ID NO: 1177 - DNA, 1017 bp, Homo sapiens
gcgtccgccaccttctgtaggacagtcaccaggccagatccagaaggcttgaggccctgtggtccccatccttgggagaagtcagctccagcaccatgaagggcatcctcgttgctggtatcactgcagtgcttgttgcagctgtagaatctctgagctgcgtgcagtgtaattcatgggaaaaatcctgtgtcaacagcattgcctctgaatgtccctcacatgccaacaccagctgtatcagctcctcagccagctcctctctagagacaccagtcagattataccagaatatgttctgctcagcggagaactgcagtgaggagacacacattacagccttcactgtccacgtgtctgctgaagaacactttcattttgtaagccagtgctgccaaggaaaggaatgcagcaacaccagcgatgccctggaccctcccctgaagaacgtgtccagcaacgcagagtgccctgcttgttatgaatctaatggaacttcctgtcgtgggaagccctggaaatgctatgaagaagaacagtgtgtctttctagttgcagaacttaagaatgacattgagtctaagagtctcgtgctgaaaggctgttccaacgtcagtaacgccacctgtcagttcctgtctggtgaaaacaagactcttggaggagtcatctttcgaaagtttgagtgtgcaaatgtaaacagcttaacccccacgtctgcaccaaccacttcccacaacgtgggctccaaagcttccctctacctcttggcccttgccagcctccttcttcggggactgctgccctgaggtcctggggctgcactttgcccagcaccccatttctgcttctctgaggtccagagcaccccctgcggtgctgacaccctctttccctgctctgccccgtttaactgcccagtaagtgggagtcacaggtctccaggcaatgccgacagctgccttgttcttcattattaaagcactggttcattcactgcccaaaaaaaaaaaaaaa

SEQ ID NO: 1178 - DNA, 1503 bp, Homo sapiens
gaattcccgggtcgacccacgcgtccggttgggaaaccctcattggccaggacatctaccggctccttctgatggattttgtgttctctttagtcaattccttcctgggggagtttctgaggagaatcattgggatgcaactgatcacaagtcttggccttcaggagtttgacattgccaggaacgttctagaactgatctatgcacaaactctggtgtggattggcatcttcttctgccccctgctgccctttatccaaatgattatgcttttcatcatgttctactccaaaaatatcagcctgatgatgaatttccagcctccgagcaaagcctggcgggcctcacagatgatgactttcttcatcttcttgctctttttcccatccttcaccggggtcttgtgcaccctggccatcaccatctggagattgaagccttcagctgactgtggcccttttcgaggtctgcctctcttcattcactccatctacagctggatcgacaccctaagtacacggcctggctacctgtgggttgtttggatctatcggaacctcattggaagtgtgcacttctttttcatcctcaccctcattgtgctaatcatcacctatctttactggcagatcacagagggaaggaagattatgataaggctgctccatgagcagatcattaatgagggcaaagataaaatgttcctgatagaaaaattgatcaagctgcaggatatggagaagaaagcaaaccccagctcacttgttctggaaaggagagaggtggagcaacaaggctttttgcatttgggggaacatgatggcagtcttgacttgcgatctagaagatcagttcaagaaggtaatccaagggcctgatgactcttttggtaaccagacaccaatcaaataaggggaggagatgaaaatggaatgatttcttccatgccacctgtgcctttaggaactgcccagaagaaaatccaaggctttagccaggagcggaaactgactaccatgtaattatcaaagtaaaattgggcattccatgctatttttaatacctggattgctgatttttcaagacaaaatacttggggttttccaataaagattgttgtaatattgaaatgagcctacaaaaacctaggaagagataactagggaataatgtatattatcttcaagaaatgtgtgcaggaatgattggttcttagaaatctctcctgccagacttcccagacctggcaaaggtttagaaactgttgctaagaaaagtggtccatcctgaataaacatgtaatactccagcagggatatgaagcctctgaattgtagaacctgcatttatttgtgactttgaactaaagacatcccccatgtcccaaaggtggaatacaaccagaggtctcatctctgaaaaaaaaaaaaaaaaaaaaaaaaaaaaaaaaaaaaaaaaaaaaaaaaaaaaaaaaaaaaaaaaaaaaaaaaaaaaaaaaaaaaa

SEQ ID NO: 1179 - DNA, 999 bp, Homo sapiens
agtcggtggaggtcggtccggctgcggagccggcgtgcgcaaaggccgctgggagccttcggagcccggggcagtgcgatggcgccggcggaggctcgcggcgcgctcccgggctggatctccgtgctgggctggggtctggcgctgtgctctctgtgcggggcgggcccactgtggagtggcagccatgagtggaaaaaactaattttgacccagcactggcccccaacagtatgcaaggaggttaacagctgccaagactctctggattactggacaatacatggactatggcccgatagagcagaagattgtaaccagtcctggcactttaacttagatgagattaaggaccttttgcgagacatgaagatctactggcccgatgtgattcaccggtcttctaatcgcagccaattctggaaacatgagtgggttaaacacggcacctgtgctgcccaggtagacgccctcaattccgagaagaagtactttgggaagagcctggatctgtacaagcagattgacctcaacagtgtgctacaaaaatttgggatcaagccatccatcaactactaccagcttgcagatttcaaagatgcacttaccagaatctatggtgtggtgcctaaaatccagtgccttatgccagaacagggagagagcgtgcagaccgttggccagatagagctgtgcttcaccaaggaggacttacatttgcggaactgcactgagccaggrgagcagctgtcctccaggcaggaagcctggctggccatggaggcttctacacatgggatgatggtctgtgaagacggtccaatcttctaccctccacctacaaagacccaacattgatgttcacattttggaaatattttgtgtcccacaaagtaagaaaagttcacaaatcattgctttctaaaattttactaaaaagtttcttaaaatgtgaaaaaaaaaaaaaaaaaaaaaaaaaaaaaaaaaaaaaaaaaaagg

SEQ ID NO: 1180 - DNA, 748 bp, Homo sapiens
gaattcccgggtcgacccacgcgtccgcaactcagagtcttgttggagctttatccctttgtcctagccaaccatggccagcccgctgcgctccttgctgttcctgctggccgtcctggccgtggcctgggcggcgaccccaaaacaaggcccgcgaatgttgggagccccggaggaggcagatgccaatgaggaaggcgtgcggcgagcgttggacttcgctgtgagcgagtacaacaagggcagcaacgatgcgtaccacagccgcgccatacaggtggtgagagctcgtaagcagctcgtggctggagtgaactattttttggatgtggagatgggccgaactacatgtaccaagtcccagacaaatttgactgactgtcctttccatgaccagccccatctgatgaggaaggcactctgctccttccagatctacagcgtgccctggaaaggcacacactccctgacaaaattcagctgcaaaaatgcctaagggctgagtctagaaggatcacgcagactgttccttacttgtgctccttccctatagtgtttcatctcgcagaagggtgctccggctttggagggcaccgccagtgtgtttgtaccaggagacagtaaaggagctgctgcaggcaggttctgcacatctgaacagctgtcccctggctccactcttcttgcagtacctgtcatgccttgctcaattaaaaaagcactccttaaaaaaaaaaaaaaaaaaaaa

SEQ ID NO: 1181 - DNA, 1132 bp, Homo sapiens
gaattcccgggtcgacccacgcgtccggtttcggaaggagctgactggccaatcacaattgcgaagatgaaggctctgtgggccgtgctgttggtcacattgctgacaggatgcctagccgagggagagccggaggtgacagatcagctcgagtggcaaagcaaccaaccctgggagcaggccctgaaccgcttctgggattacctgcgctgggtgcagacgctgtctgaccaggtccaggaagagctgcagagctcccaagtcacacaagaactgacggcactgatggaggacactatgacggaagtaaaggcttacaaaaaggagctggaggaacagctgggtccagtggcggaggagacacgggccaggctgggcaaagaggtgcaggcggcacaggcccgactcggagccgacatggaggatctacgcaaccgactcgggcagtaccgcaacgaggtgcacaccatgctgggccagagcacagaggagatacgggcgcggctctccacacacctgcgcaagatgcgcaagcgcttgatgcgggatgccgatgatctgcagaagcgcctagctgtgtacaaggcaggggcacgcgagggcgccgagcgcggtgtgagtgccatccgtgagcgcctggggcctctggtggagcaaggtcgccagcgcactgccaacctaggcgctggggccgcccagcctctgcgcgatcgcgcccaggcttttggtgaccgcatccgagggcggctggaggaagtgggcaaccaggcccgtgaccgcctagaggaggtgcgtgagcacatggaggaggtgcgctccaagatggaggaacagacccagcaaatacgcctgcaggcggagatcttccaggcccgcctcaagggctggttcgagccaatagtggaagacatgcatcgccagtgggcaaacctgatggagaagatacaggcctctgtggctaccaaccccatcatcaccccagtggcccaggagaatcaatgagtatccttctcctgtcctgcaacaacatccatatccagccaggtggccctgtctcaagcacctctctggccctctggtggcccttgcttaataaagattctccgagcaaaaaaaaaaaaaaaaaaaaaaa

SEQ ID NO: 1182 - DNA, 1114 bp, Homo sapiens
ggcacgaggagcttctttgctccggacgcccctggacgtggcgggcagccgcgagggtaaccaccatgatcccctgggtgctcctggcctgtgccctcccctgtgctgctgacccactgcttggcgcctttgctcgcagggacttccggaaaggctcccctcaactggtctgcagcctgcctggcccccagggcccacccggccccccaggagccccagggccctcaggaatgatgggacgaatgggctttcctggcaaagacggccaagatggacacgacggcgaccggggggacagcggagaggaaggtccacctggccggacaggtaaccggggaaagccaggaccaaagggcaaagccggggccattgggcgggctggcccccgtggccccaagggggtcaacggtacccccgggaagcatggcacaccaggcaagaaggggcccaagggcaagaagggggagccaggcctcccaggcccctgcagctgtggcagtggccataccaagtcagctttctcggtggcagtgaccaagagctacccacgggagcggctgcccatcaagtttgacaagattctgatgaacgagggtggccactacaatgcttccagcggcaagttcgtctgcggcgtgcctgggatctactacttcacctacgacatcacgctggccaacaagcacctggccatcggcctggtgcacaacggccagtaccgcatccggacctttgatgccaacaccggcaaccacgatgtggcctcaggctccaccatcctggctctcaagcagggtgacgaagtttggctgcagatcttctactcagagcagaacgggctcttctatgacccttactggacagacagcctctttacgggcttcctaatctatgccgaccaggatgaccccaacgaggtatagacatgccacggcggtcctccaggcagggaacaagcttctggacttgggcttacagagcaagaccccacaactgtaggctgggggtggggggtcgagtgagcggttctagcctcaggctcacctcctctgcctctttttttccccttcattaaatccaaacctttttattcatcaaaaaaaaaaaaaaaaaa

SEQ ID NO: 1183 - DNA, 913 bp, Homo sapiens
ggcacgagtggatatgtctattactcggcttcttagcattcgcattcctgctctcttacccccaacgtccacagagctggatgttcctcacaatgtccaagtggctgcagtggttggcattggccttgtatatcaagggacagctcacagacatactgcagaagtcctgttggctgagataggacggcctcctggtcctgaaatggaatactgcactgacagaaagtcatactccttagctgctggcttggccctgggcatggtctgcttggggcacggcagcaatttgataggtatgtctgatctcaatgtgcctgagcagctctatcagtacatggttggaggacataggcgctttcaaacaggaatgcatagggagaaacataaatcaccaagttatcaaatcaaagtaagtacacagcaaagtaatagatcaaaagtctggaagctgggaagttaattggaaaatactagtgttcatcctgacattggtaaatatgttaattttaagcatacttatcagaggaattttataaaaatttagaactcttttacatgcataaactcttctttcaataggaaggagataccataaatgtggatgtgacttgtccaggtgctactctagctttggctatgatctacttaaaaaccaataacagtgtcttctaggaagcccagacacatggagaagttctgagtgttttggccgatagtcccagatgaggttccagcaacagctgggatcacccatgagatgtgagtgaggaaggctttgagatggtttcagccctagccaccactgacctcataagagaccacaagaatgagaatcacctggccaagcccagcagaccttcagaattcagaaataaaataattcatcttattttaaaaaaaaaaaaaaaaaaaa

SEQ ID NO: 1184 - DNA, 548 bp, Homo sapiens
  misc_feature (323)..(323): n equals a,t,g, or c
  misc_feature (477)..(477): n equals a,t,g, or c
  misc_feature (497)..(497): n equals a,t,g, or c
  misc_feature (506)..(506): n equals a,t,g, or c
  misc_feature (518)..(518): n equals a,t,g, or c
ataacccccatttaatggattaggaaaccaaggaaccatgaaattaaraaacttgccccaggacatacagctaggttktcccaggtcctgctgcraggaggcggccaggtcctgctcggytggacactccattacttcccgtttttcctgatgggccgggtcctctacttccaccactacttcccagccatgctcttytcaagcatgttgacaggcmttctktgggacaccctcctgmggctctktgcctggggcttggcctcatggcccctggcgaggggcatacatgtggcgggaatcctgagcctgctcctgggaactgnctacagcttctacctcttccaccctctggcttacgggatggttggtcccctggcccaggacccccaaagtccaatggcaggactaaggtggctggactcatgggacttttgaggccactgcaaagattccagcctgggtccaggaactttccangagagccagctgggaacagnactggaccntctgggcatgangaagctggctaaggagcccgaagaattctg

SEQ ID NO: 1185 - DNA, 831 bp, Homo sapiens
ggcacgaggtctgagaggaacccttctctgaggatggacacttctcacactacaaagtcctgtttgctgattcttcttgtggccctactgtgtgcagaaagagctcagggactggagtgttaccagtgctatggagtcccatttgagacttcttgcccatcaattacctgcccctaccctgatggagtctgtgttactcaggaggcagcagttattgtggattctcaaacaaggaaagtaaagaacaatctttgcttacccatctgccctcctaatattgaaagtatggagatcctgggtactaaggtcaacgtgaagacttcctgttgccaggaagacctctgcaatgtagcagttcccaatggaggcagcacctggaccatggcaggggtgcttctgttcagcctgagctcagtcctcctgcagaccttgctctgatggtcctcccaatgacctccacccttgtccttttatcctcatgtgcaacaattcttcctggagccctctagtgatgaattatgagttatagaagctccaaggtgggagtagtgtgtgaaataccatgttttgcctttatagcccctgctgggtaggtaggtgctctaatcctctctagggctttcaagtctgtacttcctagaatgtcattttgttgtggattgctgctcatgaccctggaggcacacagccagcacagtgaagaggcagaattccaaggtattatgctatcaccatccacacataagtatctggggtcctgcaatgttcccacatgtatcctgaatgtccccctgttgagtccaataaaccctttgttctcccaaaaaaaaa

SEQ ID NO: 1186 - DNA, 2380 bp, Homo sapiens
ccacgcgtccgctcttttcaaatagctggattaggtcctcatgctgctgtggtcattgctggtcatctttgatgcagtcactgaacaggcagattcgctgacccttgtggcgccctcttctgtcttcgaaggagacagcatcgttctgaaatgccagggagaacagaactggaaaattcagaagatggcttaccataaggataacaaagagttatctgttttcaaaaaattctcagatttccttatccaaagtgcagttttaagtgacagtggtaactatttctgtagtaccaaaggacaactctttctctgggataaaacttcaaatatagtaaagataaaagtccaagagctctttcaacgtcctgtgctgactgccagctccttccagcccatcgaagggggtccagtgagcctgaaatgtgagacccggctctctccacagaggttggatgttcaactccagttctgcttcttcagagaaaaccaggtcctggggtcaggctggagcagctctccggagctccagatttctgccgtgtggagtgaagacacagggtcttactggtgcaaggcagaaacggtgactcacaggatcagaaaacagagcctccaatcccagattcacgtgcagagaatccccatctctaatgtaagcttggagatccgggcccccgggggacaggtgactgaaggacaaaaactgatcctgctctgctcagtggctgggggtacaggaaatgtcacattcttcctggtacagagaggccacaggaaccagtatgggaaagaaaacccagcgttccctgtcagcagagctggagatcccagctgtgaaagagagtgatgccggcaaatattactgtagagctgacaacggccatgtgcctatccagagcaaggtggtgaatatccctgtgagaaaacattctggaaactactcctgtgaggccaacaacggcctgggggcccagtgcagtgaggcagtgccagtctccatctcaggacctgatggctatagaagagacctcatgacagctggagttctctggggactgtttggtgtccttggtttcactggtgttgctttgctgttgtatgccttgttccacaagatatcaggagaaagttctgccactaatgaacccagaggggcttccaggccaaatcctcaagagttcacctattcaagcccaaccccagacatggaggagctgcagccagtgtatgtcaatgtgggctctgtagatgtggtgtggtttattctcaggtctggagcagcagcagccagaaagctcagcaaacatcaggacacttctggagaacaaggactcccaagtcatctactcttctgtgaagaaatcataacacttggaggaatcagaagggaagatcaacagcaaggatggggcatcattaagacttgctataaaaccttatgaaaatgcttgaggcttatcacctgccacagccagaacgtgcctcaggaggcacctcctgtcatttttgtcctgatgatgtttcttctccaatatcttcttttacctatcaatattcattgaactgctgctacatccagacactgtgcaaataaattatttctgctaccttctcttaagcaatcagtgtgtaaagatttgagggaagaatgaataagagatacaaggtctcacctgcatctactgtgaagtgatgagaacaggacttgatagtggtgtattaacttatttatgtgctgctggatacagtttgctaatattttgttgagaatttttgcaaatatcttgggaatatgggctgaaattttcttttccactgtgtctctgccagaatgtttgtatcaggctgatgctggcttcatagaatgagttaggcaggagcccttcctccttgattttttggcatagtttcagcaggattggtaccagttattctttctgcatcttgtagaattcagctatgaatccatctggtctagggcttttgtgttggttggtaagttttttattactaattcaacttcagcgcttgatattggtctaggaggggtttctgtctcttcctggttcaatcttgggagattgtgtgtttccaggaatttagccgtttcctccagattttcttctttatgtgcatcgacttgagtgtaaacataacttatatgcactgggaaaccaaaaaatctgtgtgacttgctttattgcagcatttgttttattttggtagtctggaactgaacctgcaatatcaccaaagtatgcatatagttgcaaaaatgtgatttttgacatagtaaatatgagtatttgcaataaactatgatattacttttgtaagtatatagaataaaatgtaaataatctataaaaaaaaaaaaaaa

SEQ ID NO: 1187 - DNA, 1451 bp, Homo sapiens
ccacgcgtccgcgccttctaggcagtcacccgcagccaaggtggctcccgctgagaggatgagcaagttcttaaggcacttcacggtcgtgggagacgactaccatgcctggaacatcaactacaagaaatgggagaatgaagaggaggaggaggaggaggagcagccaccacccacaccagtctcaggcgaggaaggcagagctgcagcccctgacgttgcccctgcccctggccccgcacccagggcccccccttgacttcaggggcatgttgaggaaactgttcagctcccacaggtttcaggtcatcatcatctgcttggtggttctggatgccctcctggtgcttgctgagctcatcctggacctgaagatcatccagcccgacaagaataactatgctgccatggtattccactacatgagcatcaccatcttggtcttttttatgatggagatcatctttaaattatttgtcttccgcctggagttctttcaccacaagtttgagatcctggatgccgtcgtggtggtggtctcattcatcctcgacattgtcctcctgttccaggagcaccagtttgaggctctgggcctgctgattctgctccggctgtggcgggtggcccggatcatcaatgggattatcatctcagttaagacacgttcagaacggcaactcttaaggttaaaacagatgaatgtacaattggccgccaagattcaacaccttgagttcagctgctctgagaaggaacaagaaattgaaagacttaacaaactattgcgacagcatggacttcttggtgaagtgaactagacccggaccagctcccctcaaaaagaagacactgtctcatgggcctgtgctgtcacgagaggaacagctgcccctcctgggccgcttggtgagaggtttggtttgatacctctgcctccctcctgccagcatggattctgggtggacacagccttgtggaaggtccagtaccaccaagagctgcccatccactcccaccccacactgtatcaaatgtatcacattttctcatgttgaacactttagccttaattgaaaatgagcaacaaagctggacaattgctagttgtatataaaatttaatctcaccgaatgtacagttttcaaatttcacgtgtatattaaggaactgatgcatctgagcattctgaaagaaagaaaaagaagctactttagctgccaccccattctagaaaagtctcttattttcaagctgttctaaatagcttcgtctcagtttccccaaaaggggtacccaggcccctcctctgtgtgccccagctgcatcagccagcttctaggtggctccattgttttctgccacctgacaacatttttcctcaattactgtacaactactgtataaaataaaacaactactgtataaaataaaaaaaaaaaaaaaaaaaa

SEQ ID NO: 1188 - DNA, 823 bp, Homo sapiens
  misc_feature (607)..(607): n equals a,t,g, or c
  misc_feature (806)..(806): n equals a,t,g, or c
  misc_feature (813)..(813): n equals a,t,g, or c
  misc_feature (819)..(819): n equals a,t,g, or c
tcgacccacgcgtccgcccacgcgtccgaaccaggacagggaggctggccggaggttcctgcagagggagcgtcaaggccctgtgctgctgtccctgggggccagaggggttgcccagcatgcccactggcaggagagagggaactgacccacttgctcctaccagcttctgaaggtgacactgagccccaggtgacgccgcaccaccaaagaaggtgcttgtgtttgtcagacaaatacagccaggcctgccaccccttaggctccaaagtccggaggtgcagaaagccaggaccaagagacaggcagctcaccagggtggacaaatcgccagagatgtggtgcattgtcctgttttcacttttggcatgggtttatgctgagcctaccatgtatggggagatcctgtcccctaactatcctcaggcatatcccagtgaggtagagaaatcttgggacatagaagttcctgaagggtatgggattcacctctacttcacccatctggacattgagctgtcagagaactgtgcgtatgactcagtgcagataatctcaggagacactgaagaagggaggctctgtggacagaggagcagtaacaatncccaatctycaattgkgggaaagaagttccaaggtcccattacaacaaaactccagggggaacctttaaagtcaagaacttttttccaaatggaaagaagcggtttttacgggggttttggcttggaataactaatggttggccccaaggaccttaaaatggaaatggcccaggaatttttgggagatggccccttggnagccctnttttgngaaa

SEQ ID NO: 1189 - DNA, 1517 bp, Homo sapiens
  misc_feature (1481)..(1481): n equals a,t,g, or c
ggtgacactatagaaaggtacgcctgcaggtaccggtccggaattcccgggtcgacccacgcgtcagcttgccttgagtcagtgcgccgctctccagcccgcttgaacgctccccgcagccaccgccacccattggaatggccaacaggggacctgcatatggcctgagccgggaggtgcagcagaagattgagaaacaatatgatgcagatctggagcagatcctgatccagtggatcaccacccagtgccgaaaggatgtgggccggccccagcctggacgcgagaacttccagaactggctcaaggatggcacggtgctatgtgagctcattaatgcactgtaccccgaggggcaggccccagtaaagaagatccaggcctccaccatggccttcaagcagatggagcagatctctcagttcctgcaagcagctgagcgctatggcattaacaccactgacatcttccaaactgtggacctctgggaaggaaagaacatggcctgtgtgcagcggacgctgatgaatctgggtgggctggcagtagcccgagatgatgggctcttctctggggatcccaactggttccctaagaaatccaaggagaatcctcggaacttctcggataaccagctgcaagagggcaagaacgtgatcgggttacagatgggcaccaaccgcggggcgtctcaggcaggcatgactggctacgggatgccacgccagatcctctgatcccaccccaggccttgcccctgccctcccacgaatggttaatatatatgtagatatatattttagcagtgacattcccagagagccccagagctctcaagctcctttctgtcagggtggggggttcagcctgtcctgtcacctctgaggtgcctgctggcatcctctcccccatgcttactaatacattcccttccccatagccatcaaaactggaccaactggcctcttcctttcccctgggaccaaaatttaggggcctcagtccctcaccgccatgccctggcctattctgtctctccttcttccccctggcctgttctgtctctgagctctgtgtcctccgttcattccatggctgggagtcactgatgctgcctctgccttctgatgctggactggccttgcttctacaagtatgcttctcccacagctgtggctgcaggaacttaatttatagggaggagcctgtggcagctgctgccccagccacagctgcactgactgtgctcaccacacatctggggcagccttccctggcaggggccctcgtggcttctcattttccattcccttcactgtggctaaggggtggggtgaggggatggagagggagggctgcctaccatggtctggggcttgaggaagatgagtttgttgatttaaataaagaatttgtcatttttgaaaaaaaaaaaaaaaaaaaaaaaaaaaaaaaaaaaaaaaaaaaaaaaaaaaaaaggnggccgccgctgatctagaactagttctagatcgcga

SEQ ID NO: 1190 - DNA, 1219 bp, Homo sapiens
ggcacgaggagccttgggcccctctggcctcagccggatttcccagccaaacgcagagagagatgccctggaccatcttgctctttgcagctggctccttggcgatcccagcaccatccatccggctggtgcccccgtacccaagcagccaagaggaccccatccacatcgcatgcatggcccctgggaacttcccgggggcgaatttcacactgtatcgaggggggcaggtggtccagctcctgcaggcccccacggaccagcgcggggtgacatttaacctgagcggcggcagcagcaaggctccagggggacccttccactgccaatatggagtgttaggtgagctcaaccagtcccagctgtcagacctcagcgagcccgtgaacgtctccttcccatgcccacttggatcttggtgctctccctgagcctggctggtgccctcttcctccttgctgggctggtggctgttgccctggtggtcagaaaagttaaactcagaaatttacagaagaaaagagatcgagaatcctgctgggcccagattaacttcgacagcacagacatgtccttcgataactccctgtttaccgtctccgcgaaaacgatgccagaagaagacccggccaccttggatgatcactcaggcaccactgccacccccagcaactccaggacccggaagaggcccacttccacgtcctcctcgcctgagacccccgaattcagcacttttccgggcctgccagtgaggctgaggactgggggacccctctgtctccaggcattcgggggcctgaggtccctccagctacttctgggggggctctgtcagccactttctcagggaattggacagaggaaaggaaggggaaccctggccttgggattttcatcacagaggagtgggagaggggacacaggcatgggcctggcactatacagacaacaggaagttcccctctcgacttcggctcctcaggaccaccagagaaggagatgtcaggaccccttcttgtcccccagctgggccataagacgtcccaggtctctgcacacccgtggaattcctcccttccccagtgggtttttgagcatagggtgcccttgggtgtgttgtgtgtctgcctgctggcttgcttaagttattaattataacacgggtcaaggtgaaaaaaaaaaaaaaaaaaaaaaaaaaaaaaaaaaaaaaaaaaaa

SEQ ID NO: 1191 - DNA, 702 bp, Homo sapiens
ggagagcacaaccatgaaaccagtcacggcctctgctctgctgcttatcctgctgggtgtggcctggcgtggagacagccacagctggggttcagatctgtcatctctgcagaagagggcaggtggcgctgaccagttttctaagcctgaagcaagacaagatctttcagctgactcatccaagaactactacaataaccagcaggtgaatcctacttacaactggcaatactataccaagaccactgccaaggcgggagtcacaccttcatcttcctcggcttcccgggcacaacctggcctgctgaagtggctgaagttttggtagaacattccttctagtcactgcggactcctcacgaatgcacacaggtcttcagggagtttgactgtccttacccagagtcctctctgatgcagctgacctacctgggcatgacaagcctgtcatctcgcctggggacctggtttatctgtcctcattctccccattcgattgtggtgtcttggcgactaatcagtttcattgtataaccagccagatcttcacctcttcttccgtacgtgaccgcaagtccctggaacgaggcatctggagcttcctactctccagtttctctgtggaaataaaacatgactctttgtttccctgagaaaaaaaaaaaaaaaaaaaaaaaaaaaaaaaaaaaaaaaaaaaaaaag

SEQ ID NO: 1192 - DNA, 1424 bp, Homo sapiens
  misc_feature (1391)..(1391): n equals a,t,g, or c
  misc_feature (1406)..(1406): n equals a,t,g, or c
  misc_feature (1415)..(1415): n equals a,t,g, or c
gaattcggcacgagtggctatatatttcttcacttgcaattgcctcatggggttcttataaggctgaaatccaataacggatacaaaaatactttaaaaagtaggcatggatttctactgacagccatgagagagtttctagaactagacctggatggccccaaacaactagaaaattggacaaaagatataaaaaaaaaactgttttcaaccattggacagtagtcagcataggactcttatctttgagagaaggggcaaaaacaagatgatccctataagcttccttaatttcttttttttctttttttgagacgctgtctccaaaacaaaacaaaagaataggacaatctcgtatttcctctatctagactcaacaattcttaatatttgctttatccctgtctttctacacatgcatacacatacacacacacaggcatacataattgcatatttacagggtgtttttgctgatctatttgaaagtaagtttcagacattatgacacctactcctaattcctcatgttttttctaagaataaggatattatcttacctaacatatcttttatcaaacctacaaaaattaacaattttatatctaatattagttcatgtttaggttttgcctgttttcccccaaatgtcttttacagtacatgtttttaaaaccaggatctaaggagttcacagattatatttggttattatgtctctttagtgtcttttggcatccttgggttttctacttttatcccccatgacactgactattggaagagtccagaccaattttctatttgattgcttccytgtgtgtatcatttaatttgttcctctatctcatgtgtttcttgtaaactgaaagttaggtgtagagattgagtctaaatatttttggcaagtatatgtcgtaggtaacatttgtgctttatactgcatcatattgggagataaataatattatattgccatctctgttagtgcagccattagaaagacattgtgcctatgtctgtctctttgctgtgtttggtatctgttgagagccatatttttataaaaatcttaaagcattgtcctctgtgaagaaaatatattagaaaaattacacttgacagtataagaattgttgatttgaataaatacatgatttttagaagacatatgtatgaccagcaggaatagtagcctaataggcctttgtttgggacagaatacacttcagatcatccagaaatctaaaatcaggcctgtgtgcctttgactggtatcttccatgtggtgttgaagagtttgagaatttaaaagaaaatgaattaatactaagcaagacacacttttttctttgttccttaaaaaaaaaaaaaaaaaaractcgaggggncccttggtacccganctcaagggngcatagtcg

SEQ ID NO: 1193 - DNA, 1176 bp, Homo sapiens
tgtcgacccagcgtccggccggccgtgtgcgtcccccgacagacactgtgaacggaagacagcaggccgcgatcagagtcgctgttcattcagccgcagcctctgggccggggcggcccccaggggccaggagagagccctggagtcccgcagccaccatgcacgctcccagcgtgctgtgtccttcgccactcccacgcgcccgttcctcttccgtcgccctctgtcccctgctctacctctctgtccttgtctggctctcccgtcaccctccctgcctctgtctctcttctggcctgagcctgggcccagccacctcctgacgggtcccctgggtctgcataggtctcccatggcgcaatgagtcagtggcccccagccaggcagtgtgggcattgccactgcggctggacggggctgcgcgctcgcgytctctctctctctctctctctttgatctcagggggtcctttttggagtttattgtattttattgtacttggtggggtgtttggggtgggggcggaggagagcttgttctcgtggggttgtcggtaccttcagaaacttttaccaaagtcacgattagctgcttgtggtggggccccaaccgccctcgggcactggggagctgggctggggctgctgctctggggtctccgggggccacagcttggggtgagttgaagacctcaggggatgtggaggggtctgcggggccctggccgcacaggatggccttcagggaaggtggtcttggggcatggtgcagagcaggtgaccggagggaatcggtgacggagcggggccaagggaggggtccggagggagtcagggatggagggcagagggagtggatgtgggggtttgaggacgtgtgacaagctccagcaggggtgggggccgggctgagggtgggggtgcgaggyggtcactcccatcgtgcccctggccgtccctccactcacccacacctggcccagtccacgttgaggtccaggactgggaaggaccgggtgagtgcaccggggacccaggccaggtgccccccggagcctgctggggtggccagagcaggagggggtgtgtttcctttttgtgggtgttgcatgcaaatcaagtggacaagaaaaaataacaaaacaaaaaamaaaaaaaaaaaaaaaaaaaaaaaaaa

SEQ ID NO: 1194 - DNA, 892 bp, Homo sapiens
ggcacgagcggcacgagccgcatcctagccgccgactcacacaaggcagagttgccatggagaaaattccagtgtcagcattcttgctccttgtggccctctcctacactctggccagagataccacagtcaaacctggagccaaaaaggacacaaaggactctcgacccaaactgccccagaccctctccagaggttggggtgaccaactcatctggactcagacatatgaagaagctctatataaatccaagacaagcaacaaacccttgatgattattcatcacttggatgagtgcccacacagtcaagctttaaagaaagtgtttgctgaaaataaagaaatccagaaattggcagagcagtttgtcctcctcaatctggtttatgaaacaactgacaaacacctttctcctgatggccagtatgtccccaggattatgtttgttgacccatctctgacagttagagccgatatcactggaagatattcaaaycgtctctatgcttacgaacctgcagatacagctctgttgcttgacaacatgaagaaagctctcaagttgctgaagactgaattgtaaagaaaaaaaatctccaagcccttctgtctgtcaggccttgagacttgaaaccagaagaagtgtgagaagactggctagtgtggaagcatagtgaacacactgattaggttatggtttaatgttacaacaactattttttaagaaaaacaagttttagaaatttggtttcaagtgtacatgtgtgaaaacaatattgtatactaccatagtgagccatgattttctaaaaaaaaaaataaatgttttgggggtgttttctccaaaaaaaaaaaaaaaaaaaaaaaaaaaaaaaaaaaaaaaaaaaaaaa

SEQ ID NO: 1195 - DNA, 856 bp, Homo sapiens; identical to SEQ ID NO: 15

SEQ ID NO: 1196 - DNA, 892 bp, Homo sapiens; identical to SEQ ID NO: 1194

SEQ ID NO: 1197 - DNA, 1552 bp, Homo sapiens
ggcacgagcggctgcgggcgcgaggtgaggggcgcgaggttcccagcaggatgccccggctctgcaggaagctgaagtgagaggcccggagagggcccagcccgcccggggcaggatgaccaaggcccggctgttccggctgtggctggtgctggggtcggtgttcatgatcctgctgatcatcgtgtactgggacagcgcaggcgccgcgcacttctacttgcacacgtccttctctaggccgcacacggggccgccgctgcccacgcccgggccggacagggacagggagctcacggccgactccgatgtcgacgagtttctggacaagtttctcagtgctggcgtgaagcagagtgaccttcccagaaaggagacggagcagccgcctgcgccggggagcatggaggagagcgtgagaggctacgactggtccccgcgcgacgcccggcgcagcccagaccagggccggcagcaggcggagcggaggagcgtgctgcggggcttctgcgccaactccagcctggccttccccaccaaggagcgcgcattcgacgacatccccaactcggagctgagccacctgatcgtggacgaccggcacggggccatctactgctacgtgcccaaggtggcctgcaccaactggaagcgcgtgatgatcgtgctgagcggaagcctgctgcaccgcggtgcgccctaccgcgacccgctgcgcatcccgcgcgagcacgtgcacaacgccagcgcgcacctgaccttcaacaagttctggcgccgctacgggaagctctcccgccacctcatgaaggtcaagctcaagaagtacaccaagttcctcttcgtgcgcgaccccttcgtgcgcctgatctccgccttccgcagcaagttcgagctggagaacgaggagttctaccgcaagttcgccgtgcccatgctgcggctgtacgccaaccacaccagcctgcccgcctcggcgcgcgaggccttccgcgctggcctcaaggtgtccttcgccaacttcatccagtacctgctggacccgcacacggagaagctggcgcccttcaacgagcactggcggcaggtgtaccgcctctgccacccgtgccagatcgactacgacttcgtggggaagctggagactctggacgaggacgccgcgcagctgctgcagctactccaggtggaccggcagctccgcttccccccgagctaccggaacaggaccgccagcagctgggaggaggactggttcgccaagatccccctggcctggaggcagcagctgtataaactctacgaggccgactttgttctcttcggctaccccaagcccgaaaacctcctccgagactgaaagctttcgcgttgctttttctcgcgtgcctggaacctgacgcacgcgcactccagtttttttatgacctacgattttgcaatctgggcttcttgttcactccactgcctctatccattgagtactgtatcgatattgttttttaagattaatatatttcaggtatttaatacgaaaaaaaaaaaaaaaaaa

SEQ ID NO: 1198 - DNA, 1550 bp, Homo sapiens
ggcacgagcggctgcgggcgcgaggtgaggggcgcgaggttcccagcaggatgccccggctctgcaggaagctgaagtgagaggcccggagagggcccagcccgcccggggcaggatgaccaaggcccggctgttccggctgtggctggtgctggggtcggtgttcatgatcctgctgatcatcgtgtactgggacagcgcagcgccgcgcacttctacttgcacacgtccttctctaggccgcacacggggccgccgctgcccacgcccgggccggacagggaacagggagctcacggccgactccgatgtcgacgagtttctggacaagtttctcagtgctggcgtgaagcagagtgaccttcccagaaaggagacggagcagccgcctggccggggagcatggaggagagcgtgagaggctacgactggtccccgcgcgacgcccggcgcagcccagaccaggscggcagcaggcggagcggaggagcgtgctgcggggcttctgcgccaactccagcctggccttccccaccaaggagcgcgcattcgacgacatccccaactcggagctgagccacctgatcgtggacgaccggcacggggccatctactgctacgtgcccaaggtggcctgcaccaactggaagcgcgtgatgatcgtgctgagcggaagcctgctgcaccgcggtgcgccctaccgcgacccgctgcgcatcccgcgcgagcacgtgcacaacgccagcgcgcacctgaccttcaacaagttctggcgccgctacgggaagctctcccgccacctcatgaaggtcaagctcaagaagtacaccaagttcctcttcgtgcgcgaccccttcgtgcgcctgatctccgccttccgcagcaagttcgagctggagaacgaggagttctaccgcaagttcgccgtgcccatgctgcggctgtacgccaaccacaccagcctgcccgcctcggcgcgcgaggccttccgcgctggcctcaaggtgtccttcgccaacttcatccagtacctgctggacccgcacacggagaagctggcgcccttcaacgagcactggcggcaggtgtaccgcctctgccacccgtgccagatcgactacgacttcgtggggaagctggagactctggacgaggacgccgcgcagctgctgcagctactccaggtggaccggcagctccgcttccccccgagctaccggaacaggaccgccagcagctgggaggaggactggttcgccaagatccccctggcctggaggcagcagctgtataaactctacgaggccgactttgttctcttcggctaccccaagcccgaaaacctcctccgagactgaaagctttcgcgttgctttttctcgcgtgcctggaacctgacgcacgcgcactccagtttttttatgacctacgattttgcaatctgggcttcttgttcactccactgcctctatccattgagtactgtatcgatattgttttttaagattaatatatttcaggtatttaatacgaaaaaaaaaaaaaaaaaa

SEQ ID NO: 1199 - DNA, 1635 bp, Homo sapiens
  misc_feature (6)..(6): n equals a,t,g, or c
  misc_feature (24)..(24): n equals a,t,g, or c
  misc_feature (34)..(34): n equals a,t,g, or c
  misc_feature (1615)..(1615): n equals a,t,g, or c
  misc_feature (1630)..(1630): n equals a,t,g, or c
gtggangcgctctagaactatggntcccccgggntgcagattcggcacgagctcgtgccscttctgtgtctcagggtaatactattcagagtcgcccctttgctcattttctcccgtatttgttaccttcctgaggcctcagtattagtcgtgagcacaaagttttgagacctttggcgttgtttcttgatgtgggaggggaggtgttagtgcatgcaagggttgaactagatagaccctgccttagtagagggtgggactataaycttagaggccagaacttgatccagaagttgctgtccacagaagtgctttctatttcatcatttttgtttctagggctctttttctgtagccaggtcttcccaaggattttagtatttgcattggagttgaggtttactctaatgatggtggcccagctgtgcccagaggacagccaggcaggcccygggagggagtttagaaagacagtcctggtgaatgggcttcaagtggtcacaaagagggtggctgtgaggtgaccccagacactgcagaacgatgtgcaccctctgcgttttggatgtccttggaatgtgggagcctagaaataaccctgtggatggaattggggcagcggctgctggagatctgtgtgccttgccttccttcagcaggaccgtctaggtgcgcagccacctatggatgcgtcccagccagccccgtcgctctcgtccatcctcagagacaaagaagagggcagggagtttgggcttggttttgaactttcctttcaatgtagcaaagcattcctagttaaccagagccttggaatctactgcctgctggccaggctttaaaatgaaaagtgttttaatgctgccataaaagggaggcgggggggaggaagggaaaataaaggcatctttccaagtactcatctaatttaattgtcaaaagattgataggccatgaattacttctccatctcactaagggttaaaggcgtgcaaccccccactggctgtgtcccctgccaccgaagtgagtgacctgccctacaaccaggtgggaccacctgtgctgcagtccggaggggcttctgcaggaagcactcaccccccacaccttccccggcctgagcttcccctacctttcgtcaccacctgagggcatgagcacaggccatggggcgtgcctggtgagtctgcctgtggttcaggcttagcctgtggtctcctgtgtgctgctgcccgcatgggatgcgcaggggaggcgtggggatccgcaggagggtggttgggatacaccggatacctctgctctcattgcttgtttscaaatgctctatggacatttgtgtgctaaatcctattaaataaaaaagacgggttaaaacccagatgctgtatattcatttgtaattatgtataaagtgaagcagttttaaactgtaaagatttttttcagtgtgttttctcgaattttgccacaacatactggcttcgtattttatttatctttctttctagttaccagcttcagacccttgtaaagtctccctcagccctttcaaaaaataataaatttcctgtgaagttaaaaaaaaaaaaaaaaaaaaaaaaaaaaaaanaaaaaaaaaaaaaanaaaaa

SEQ ID NO: 1200 - DNA, 3544 bp, Homo sapiens
aattgggtaccgggccccccctcgagtttttttttttttttttttttttttttcaagttgaataaagcttttaataaaacagtcttgttctttatcaatacctgtaaattctcttaaagcagtagcaaaggcgactgtagcaagagctcaaaaggcaaggcaatatcggaaagtgtatttaacagaagattaaaaatataaatgtagaagatctgtttatatatttttctttcagaaataaatcccccctcccctgccaggtgaaaggaaatattgcactttctgttctcatgactaaggggacaggagttccagaagaacctttcaagatgatcaggaacaccaggacgagggccgtctcacctcactcggaccacatggagacctcccttcaaaatgggagccatgtcctgccccaccaagccctgtctgaagtggagcttccccgcctgtgctccctccacagtcccggaaagcccagcggcaaaggcagctttgtcccagctctgccaccctcctgctcacagtggtcagggcccctcaggggcaaggacggcagggattggaacgagggctctggaaggactgttcagccctatgcctaagacccctatgctggggacactacaggcacacagaggaatagcagggccaccctcagagctcacacatccacgaacaaatgaaggctgaggaggtttctaaacctaaagtccatgagtgtgcacttcaatccaggaaggtcgggacttccttcagtttcaaaaaataaattctcccttccggtttggactgttgcaggctcgaggccattcaggagttgtccaccacctggtggggcagtgtgacagaggggccattggggaaggtggctagcttatcccgccccttcaagaagaaggtcagcagctcccccttccccttcacaaagatggggcctcgcctcacaaagcggaagccgtactctcggaggatgacttgggtttcttctaccacctgaatgttgcccatgacccccgtggactccatcctgctggctacattgactgtattgccccagatgtcgtagtgtggtttccgggctccgatgaccccagccagaaccccgcctttgttcatgcctatgcgcagcatgaagttattgaaggactggttgttgatgttggtgagcgtatccttcatggccagcgcgaagtcggccaggtcagccaggtgctgccagcgctctctctcggacttgtcttccttgttggagctggcaaagccattggtgttgacatcgggggtgactcctgaagccgccatatacgtgctgccaatggttttgatcttggtgatcacccggaacttgggattgtccaggagagagtcaaaatcygagatgatttcattgaggaaacgcagacactcaataccaccattgttgatgctctcctctgtgtagaagtcagcaaagttgggcagggaggcaaacatgactccaatctcatcatacgtctggctatacagctcctcatctctcttcttggaccccaggaaatggcgtgccacgtgctcaggcaacatgttggtgaccaaggcctcgttccagcgtcgcatctcatagacacgttccttctggtcgtggacctcaatcttccacaagaaaagtgtccgtgccagtttttctacgtggcgggagaagtagtagaagctgagcatcatgaggaacaccatcaccgtcatagagtacttggaaggcaccaggggcagcctgtcagtgccattgagcccagggttgaatccttgcatctgctctaaggccaccataggtaagtcgtgctcccgaaaacgcttgtggtcgtattcatcaaagacgggacgccaggcatagaggttgatggtggccacggcgcctgcgacgagcagcatgagcgtgagcttcaccatgtggctgacctgcaccagcatgatggtggcgatgagggacagcacggccacatagttgtaatacttggggttctccaggcagctgccctccgtytccatccctgccgttgcattgctgggtcccgtgtagtactggagacagctgagcatgtccacgacatttgccatcaccaggatgaagatggcgagcatggcccaggtgttcctggcccagcgggtccggtcaatccaagttgagaaggccacaagcttcttaggaaaggcccggggaaagatggcagccagggagcagatggtcaggatgaggagcagaatctcccccaccatgaaggtcacatagtttgtcattagccaggggtcgatgagtatctcgaccagggccgtgcagagcaggacgacgcaggagcagctgaaggcagccccactctgcttctccttctccaccgagtagcgggtttccatctcggggtccatgaaccgcatggacaagaggaaggtgtttctcttctttactacttgggcggactctcgctcaagcagggcctcgttgagcagctggttgagctcgtgctcatcttcagaggcatccaccactcggtcagccaggtcctgcaggcgcagcctccggcgtgggttggggaatgaggggttgtcggcctgggcatcctgctcctcgggcttctccgacgtggacccactgctgtgggcactcccgttgggctccttggtctcaatgagggcaggggagctggactttgaggaagctggtgctccattgggcagggccgagccattgaggccattctgggtggctgttttcttcacctctggcttggaggcaatgatgaggtaggtttcaatacccttctcttctaggtaatcacagcggctgcccccatcgcctggctccacatcaaactcccctttcaggcagtccatggtgctctgggagatgtgcacgcgcccagggatgccgccggcctccatcttgttggctacagtgacatcagtcgaccacacgtcgtactgccagcgcttctggcccaggacgccccccagcacggtgcccgtgtgcacccccacacgcatgtccaccccagtcttggtcttctcccgcacatacgagatggcctccaccatggccagccccatgaggatggagcagacggcgtggtcctcccggtagtcrggcaagccgcagatgcagtagtagcagtcgcccaggatcttaatccgcagctggtggtatttagctgccagcttgtcaaagcgggcaaagagctcgttgagcagcttcacaagctcctgggcactgcaggcagaagacagctgggtaaagcccacgatgtcggcaaagaggatgctgacgttctcgtgacggtacatgtacatggtgttgaactgctgctggtccttctggctctcgtctttcttcatgtctttcagcatctcgtcagccacgtgcttgggcaggatggaaagcatgaggttctcctgctgctggctctgctcttccaggttcatcttcacctccagcgactggcgggcctccaggaaggccttgcggtgcttgcggtctgttcaccgcggtggcggccgggctagtccaaaggag

SEQ ID NO: 1201 - DNA, 214 bp, Homo sapiens
  misc_feature (18)..(18): n equals a,t,g, or c
tagaccggccgtcacctnggtgaacagttctcctgctgctggctctgctcttccaggttcatcttcacctycagcgamtggcgggcctccagraagsccttgcggtgcttkcggtcagccatgtagtaggacatgatgcccacaagcgatggcgcacaggtagaggaagacgttggccaggatagttcagcatgggtggaaggcctcaggaaag

SEQ ID NO: 1202 - DNA, 481 bp, Homo sapiens
  misc_feature (5)..(5): n equals a,t,g, or c
  misc_feature (38)..(38): n equals a,t,g, or c
gtaancaagttggccccaggattcttaattccgcaagntgggtggtattttaagcttgccaagctttgtcaaaagcgggcaaaaaagctcgttgagcagcttcacaagctcctgggcactkcaggcagaagmcagctgggtaaagcccacgatgtcggcaaagaggatgctgacggttctcgtgacggtacatgtacatggtgttgaactgctgctggtccttctggctctcgtctttcttcatgtctttcagcatctcgtcagccacgtgcttgggcaggatggaaagcatgaggttctcctgctgctggctctgctcttccaggttcatcttcacctccagcgactggcgggcctccaggaaggccttgcggtgcttgcggtcagccatgtagtaggacatgatgcccacagcgatggcgcacaggtagaggaagacgttggccaggatagttcagcatggctgggaaggcctcaggaa

SEQ ID NO: 1203 - DNA, 662 bp, Homo sapiens
ttggactagcccggccgccccgcggtgaacaaaacatgactccaatctcatcatacgtctggctatacagctcctcatctctcttcttggaccccargaaatggcgtgccacgtgctcaggcaacatgttggtgaccaaggcctcgttccagcgtcgcatytcatagacacgttccttctggtcgtggacctcaatcttccacaagaaaagtgtccgtgccagtttttctacgtggcgggagaagtagtagaagytagcatcataggaacaccatcaccgtcatagagtacttggaaggcaccagggcagcctgcagtgccattgacccagggttgaatccttgcwtctgstytaaggccaccataggtaagtcgtgctcccgaaaacgcttgtggycgtattcatyaaagacgggacgccaggcatagaggttgatggtggccacggcgcctgcgacgagcagcatgagcgtgarcttcaccatgtggctgaccatgtccacgacatttgccatcaccaggatgaagatggcgagcatggcccaggtgttcctggcccagcgggtccggtcaatccaagttgagaaggccacaagcttcttaggaaaggcccggggaaagatgtgttcaccgcggtggcggccgggctagttccaaaggag

SEQ ID NO: 1204 - DNA, 856 bp, Homo sapiens
  misc_feature (19)..(19): n equals a,t,g, or c
  misc_feature (26)..(26): n equals a,t,g, or c
  misc_feature (36)..(36): n equals a,t,g, or c
  misc_feature (829)..(830): n equals a,t,g, or c
cgtcggaaaaagcccgagnaaccggnatgcccaggncggacaaccccttcaattccccaacccacgccggaaggctgcgcttgcaggaccctgggctgaccgaagtggtggatgcctctgaaagatgagcacgagctcaaccagctgctcacgaggccctgcttgagcgagagtccgcccaagtagtaaagaagagaamcaccttcctcttgtccatgcggttcatggaccccgagatggaaacccgctactcggtggagaaggagaagcagagtggggctgccttcagctgctcctgcgtcgtcctgctctgcacggccctggtcgagatactcatcgacccctggctaatgacaaactatgtgaccttcatggtgggggagattctgctcctcatcctgaccatctgctccctggctgccatctttccccgggcctttcctaagaagcttgtggccttctcaacttggattgaccggacccgctgggccaggaacacctgggccatgctcgccatcttcatcctggtgatggcaaatgtcgtggacatggtcagccacatggtgaagctcacgctcatgctgctcgtcgcaggcgccgtggccaccatcaacctctatgcctggcgtcccgtctttgatgaatacgaccacaagcgttttcgggagcacgacttacctatggtggccttagagcagatgcaaggattcaaccctgggctcaatggcactgacaggctgcccctggtgccttycaagtactctatgacggkgatggtgttcctcatgatgctcagcttctactaactttcttccccggccaacggtannaaaaaaacctggggcaccgggacaac

SEQ ID NO: 1205 - DNA, 439 bp, Homo sapiens
  misc_feature (402)..(402): n equals a,t,g, or c
  misc_feature (430)..(430): n equals a,t,g, or c
ccatttggactagcccggccgccaccgcggtgaacaagatgaacctggaagagcagagccagcagcaggagaacctcatgctttccatcctgcccaagcacgtggctgacgagatgctgaaagacatgaagaaagacgagagccagaaggaccagcagcagttcaacaccatgtacatgtaccgtcacgagaacgtcagcatcctctttgccgacatcgtgggctttacccagctgtcttctgcctgcagtgcccaggagcttgtgaagctgctcaacgagctctttgcccgctttgacaagctggcagctaaataccaccagctgcggattaagatcctgggcgactgctactamtgcatctgcggcttgccygactaccggggaggaccacgccgtytgnccatcctcatggggctggccatggtggnaggccatct

SEQ ID NO: 1206 - DNA, 1558 bp, Homo sapiens; identical to SEQ ID NO: 21

SEQ ID NO: 1207 - DNA, 930 bp, Homo sapiens
gaattcggcacgagcccagccccaccatgaccctcggccgccgactcgcgtgtcttttcctcgcctgtgtcctgccggccttgctgctggggggcaccgcgctggcctcggagattgtggggggccggcgagcgcggccccacgcgtggcccttcatggtgtccctgcagctgcgcggaggccacttctgcggcgccaccctgattgcgcccaacttcgtcatgtcggccgcgcactgcgtggcgaatgtaaacgtccgcgcggtgcgggtggtcctgggagcccataacctctcgcggcgggagcccacccggcaggtgttcgccgtgcagcgcatcttcgaaaacggctacgaccccgtaaacttgctcaacgacatcgtgattctccagctcaacgggtcggccaccatcaacgccaacgtgcaggtggcccagctgccggctcagggacgccgcctgggcaacggggtgcagtgcctggccatgggctggggccttctgggcaggaaccgtgggatcgccagcgtcctgcaggagctcaacgtgacggtggtgacgtccctctgccgtcgcagcaacgtctgcactctcgtgaggggccggcaggccggcgtctgtttcggggactccggcagccccttggtctgcaacgggctaatccacggaattgcctccttcgtccggggaggctgcgcctcagggctctaccccgatgcctttgccccggtggcacagtttgtaaactggatcgactctatcatccaacgctccgaggacaacccctgtccccacccccgggacccggacccggccagcaggacccactgagaagggctgcccgggtcacctcagctgcccacacccacactctccagcatctggcacaataaacattctctgttttgtagaaaaaaaaaaaaaaaaaaaa

SEQ ID NO: 1208 - DNA, 1408 bp, Homo sapiens
  misc_feature (22)..(22): n equals a,t,g, or c
  misc_feature (50)..(50): n equals a,t,g, or c
  misc_feature (1384)..(1384): n equals a,t,g, or c
  misc_feature (1387)..(1387): n equals a,t,g, or c
  misc_feature (1394)..(1394): n equals a,t,g, or c
  misc_feature (1403)..(1403): n equals a,t,g, or c
  misc_feature (1407)..(1407): n equals a,t,g, or c
gtaaaccgcggccaggtgaatngatttagtgcccctatagaagagcttangcgtcgcatgcacgcgtacgtaagcttggatcctctagagcggccgccctttttttttttttttactataacattcaacttttttcacataaagccttccatgatcttatttattacatctagtttttctttatacctctaaaaaaaagtgccttttagatttacagcttgtgcttctaaagcaaaggttaaaacatcatgccccaaaggaaaacaaggtaaaaaggaagctgccatataagctcttaaaaattgtatgttacaaggttctaaaatctcttcagcactggttggttggtagattgtacgacactgacatggtgcttgggagggtcatttatctgatggttggagcagcaccatgggaaagctgcccagatggtctactgaagtccttggctgtgcacagaatgggccaagggcccagaattcatgagtccggggaactttggaggtccttactcaatctccttagtgctaaggttcagagtctcaaaccagatttcttccaaaccttcttgttgtctgtttgttcccccgtcactgtttatcttccacctctgaagccataatttgcacacatgtgatctggaggagggctaaagctgccacaccgakggctttcgccaagatcaaggtcctcttgttggtagtttgggattgcttatgacccgatcctccttatgctaccagcacttctgcagatggcatctgcttagttcagagtggaggagggccattcgtgtatctgagcatggggtggaatgaccgggcaaagttgttggagagggcacagctgtagtcttcctctgacattggtacaaggcaggcaagcccgatgaggaggagcaggagaagctgaaggggaagagctgctcggaggactctgaacaggaagccgcggccggaccgacctggccctggctcagaaagggaggaatcggagccaccttttgtggacctgctatgtggactgctgacagagggtccaggctgtgagagactacacttgcctcgtggcgttttctgtctgtttggggtgctccttcctgatgtgggactcacagaccctgaggtgtccagttcatcagcagaagaccaggaagacaaatcctgctgactacttgacacgtctaataacttctccagttccttgatatgacgactgacctccttcaagagaagtttgagccgatttccaataacatggactttttctttggcttctaaacagtctgttccttcagcattcaccagtagttggcaagacatgtcttgcaaagaggctactctgagttgggattgccaacagctcawrctttattggaagattnccntttgatncgccccctnaagnt

SEQ ID NO: 1209 - DNA, 1209 bp, Homo sapiens; identical to SEQ ID NO: 866
  misc_feature (2)..(2): n equals a,t,g, or c
  misc_feature (8)..(9): n equals a,t,g, or c
  misc_feature (1147)..(1147): n equals a,t,g, or c
  misc_feature (1174)..(1174): n equals a,t,g, or c
  misc_feature (1194)..(1194): n equals a,t,g, or c

SEQ ID NO: 1210 - DNA, 337 bp, Homo sapiens
  misc_feature (21)..(21): n equals a,t,g, or c
  misc_feature (324)..(324): n equals a,t,g, or c
gcaacgtttgcctcccaatgntgtccctttccttcgttcccatggtaaagctcctctcgctttcctcctgaggctatacccatgcgtctctaggaactggtcacaaaagtcatggtgcctgcatccctgccaagcccccctgaccctctctccccactaccaccttcttcctgagctgggggcaccagggagaatcagagatgctggggatgccagagcaagactcaaagaggcagaggttttgttctcaaatattttttaataaatagacgaaaccacgaaaaaaaaaaaaaaaaaaaaaaaaaaaaaaaaaaaaaaaactcnggggggggcccgg

SEQ ID NO: 1211 - DNA, 1084 bp, Homo sapiens
ggcacgagccaccatgcccggcctagattaaaaatttgaagacatattctctactatgagccaatgaaattactcattttgtttctatcccatttgctgtcccttgcttttggaattttgtgtcttagtgtgactgtgattctttctctccttttgtctttcagcaaacggggattcagcgtccgatcctttggaacagggactcacgtgaagcttccaggaccagctcccgacaagcccaatgtttatgatttcaaaaccacatatgaccagatgtacaatgatcttcttaggaaagacaaagaactctatacacagaatgggattttacatatgctggacagaaataagagaatcaagccccggccagaaagattccagaactgcaaagacctgtttgatctgatcctcacttgcgaagagagagtgtatgaccaggtggtggaagatctgaattccagagaacaggagacctgccagcccgtgcacgtggtcaatgtggacatccaggacaaccacgaggaggccaccctgggggcgtttctcatctgtgagctctgccagtgtatccagcacacggaagacatggagaacgagatcgacgagctgctgcaggagttcgaggagaagagtggccgcacctttctgcacaccgtctgcttctactgagcccagcgcccgcatggagccgcctctggagcttcctgttgttcatactttttccttcctgacatttgtttttacttacaggtgttctgctggtgacggtagcattacccaaataaactgtgcatatgaaatgggagaggagatgccaaaacgccagatgaaagcaatcaagtttcttcttttccacttttacttatgagcgggatattgattacaaagtttttcttctttaaccaaaaaggaaagacaacggtttgtgtgcacttcccgacatacctgtgtcttcgtgtgcctgccttccctccctcctccccaccgggccggactgtacagagccctgctgcggcgtgttaggaatgacctggaattgtcaataaacagatgctgctgtcaaaaaaaaaaaaaaaaaaaaaaa

SEQ ID NO: 1212 - DNA, 1281 bp, Homo sapiens
gggcagacttaactgctgtctgctcagcatggaagccaggagccaaaccagtgggcttgatgacagtgagctatttctggtggctcagggttggggcttgggccgaagatgtggaggccctggcttcccttcctgaggacagactgaggtggaaccttttggctctgccagcttctccatgtgcagtcacagcactggtggcaaggcataggagagctgggctacaaagaagcattcagtgtctcctggggcggcagggaggtgggggttgtaattgtgaactcaccaaaccccaggtgggcagtaagtgggtgggtcataggaagaaaagtgatcttcagtcaggagacttgggttctgggctctgtctgatgactggctctgtgatgtgagccaggtgacttctctaaccctgagttgcctcatctgtaaagataattccagtcttggaggatttttatggasyaaaaaggacagagcggtcctgtgtatcccctgcaaatggttagacgttatccatttacagcccctgccaagccaccactagcttcttcagagaacttttgaaccctgcctccctaaagtagttctaaaacatttttcactgtgttacccatcaagggaaacaaaatgtttctacaaaccatagtaaataggatcgtttttgtattgtgtttyaagggaggaaaagctgaccagcaagaagaacgtcggagacaaaagcagatgaaggttctgaagaaggagctgcgccacctgctgtcccagccactgtttacggagagccagaaaaccaagtatcccactcagtctggcaagccgcccctgcttgtgtctgccccaagtaagagcgagtctgctttgagctgtctctccaagcagaagaagaagaagacaaagaagccgaaggagccacagccggaacagccacagccaagtacaagtgcaaattaactggtcaagtgtgtcagtgactgcacattggtttctgttctctggctatttgcaaaacctctcccacccttgtgtttcactccaccaccaaccccaggtaaaaaagtctccctctcttccactcacacccatagcgggagagacctcatgcagatttgcattgttttggagtaagaattcaatgcagcagcttaatttttctgtattgcagtgtttataggcttcttgtgtgttaaacttgatttcataaattaaaaacaatggtcagaaaaaaaaaaaaaaaaaaaaaaaaaaaaaaaaaaaaaagggsggcccgggaaccaattt

SEQ ID NO: 1213 - DNA, 1044 bp, Homo sapiens
cggtccggaattcccgggtcgacccacgcgtccggtgtaaggttggcaaagattcttttggcaatgattatatagaaaacttaaamcrgaatgatatttctacagaatttacatatcagactaaagatgctgctacaggaactgcttctataattgtcaataatgaaggccagaatatcattgtcatagtggctggagcaaatttacttttgaatacggaggatctgagggcagcagccaatgtcattagcagagccaaagtcatggtctgccagctcgaaataactccagcaacttctttggaagccctaacaatggcccgcaggagtggagtgaaaaccttgttcaatccagcccctgccattgctgacctggatccccagttctacaccctctcagatgtgttctgctgcaatgaaagtgaggctgagattttaactggcctcacggtgggcagcgctgcagatgctggggaggctgcattagtgctcttgaaaaggggctgccaggtggtaatcattaccttaggggctgaaggatgtgtggtgctgtcacagacagaacctgagccaaagcacattcccacagagaaagtcaaggctgtggataccacgggtgctggtgacagctttgtgggagctctggccttctacctggcttactatccaaatctgtccttggaagacatgctcaacagatccaatttcattgcagcagtcagtgtccaggctgcaggaacacagtcatcttacccttacaaaaaagaccttccgcttactctgttttgattgctattagtcccaaaataaatatacctgggaataaaatgtacttgggggtggctgctcctggctaatgcttattagaaaatgtcctcgtcccctttctttgcaaatattagttcttttacgaagtcatcctcaagcttcaatttatttataacgatgattcttttgctttccatgcatttgcacaaaacaaccagaattaaagattccacaaccaagatctgtacaaacttaaatacaattccctccacaaata

SEQ ID NO: 1214 - DNA, 1380 bp, Homo sapiens
  misc_feature (905)..(905): n equals a,t,g, or c
gttcttcttctgtaaaatggaaataatacttgtctcacagaattgtttaaagattaaatgaaaaaaaagattaaatgagatgtatgcaaaagagacacagcaagcatgcagtaaatgttagctgctagaatttgttggttaaaagaatgatctctgctaaccagtgctccttgctgttcatttcactggagaagcttgtaagacacagctacttgttcactgcctagaatctaagcccgacaagggcagagactttgccttatttattgctatatccccagcaactatcatatgactgggacatgataggtattccacaaatccctatttgttgatgaatgactggataaatgaatgaatacaggtaacacaggtataattttactgctattctgattttatgaatgaggaaactacgtctcagagaggtcaagctgcttgcataaagtcccacagagagttagagagggattaaaatacagttcccctgcctggttgttcttctcttttaccatatcacttactagggstttgtttcattatccaaaaattcaggtacagcatctaattagttactaagtaacaattttcaaaggctaaacatgattcttaaattttaaaacttaccgtggtatccacagccttgactttctctgtgggaatgtgctttggctcaggttctgtctgtgacagcaccacacatcyttcagcccctaaggtaatgattaccacctggcagccccttttcaagagcactaatgcagcctccccagcatctgcagcgctgcccaccgtgaggccagttaaaatctcagcctagaatacacaaaagtcaacagaaacagtggtgaaaataagtaacctgaatccacttccagatgcgtttttctagaaaatgtctcccntcttttttataacaaccaatgcaatgggaaccttgatagatactggtacaggaaaataaataaagcaataacmgtgatgacaaaaaccatcaawgaagacattctggggacaactggggaaatttgaatgtggcttggatattagatgatagcatggaattactgacaatcttcctaggtgtgataatggtattgtgtttcctcttaggagatgtatgccgaagtatttggggtgaggcatcatgttgtctgcaacttattctcaacaacaaaatacttttttttccacttacttttcaacaaaaacaaaactaaatacatacagggaagaggaaaagcaaatacagcaaaatgttagcaaatgtttaggtgaaatgtagagtgttcattcagcttttctgcacatataataattttaacaaagagttggggcaacaaagagaagtctaccaaaaaaaaaaaaaaaagggcggcc

SEQ ID NO: 1215 - DNA, 1969 bp, Homo sapiens
  misc_feature (10)..(10): n equals a,t,g, or c
  misc_feature (18)..(18): n equals a,t,g, or c
  misc_feature (30)..(30): n equals a,t,g, or c
  misc_feature (89)..(89): n equals a,t,g, or c
  misc_feature (159)..(159): n equals a,t,g, or c
gccccccatngccccaantggccgggtagncgtgtacggtggaaggtctatataagcagagctcgttaagtgaccgtcagatcgcctgnagacgccatccacgctgttttgacctccatagaagacccgggacccgatccagccttccggactctagcntaggccgcggacggataccaatttcacacaggaaccagctatgaccactaggcttttgcaaaaagctatttaggtgacactatagaaggtacgcctgcaggtaccggtccggaattcccgggtcgacccacgcgtccgggcaaagaattaaacctggtgtttggacttcaacttagcatggctagaattggaagtacagtaaacatgaacctcatgggatggctgtattctaagattgaagctttgttaggttctgctggtcacacaaccctcgggatcacacttatgattgggggtataacgtgtattctttcactaatctgtgccttggctcttgcctacttggatcagagagcagagagaatccttcataaagaacaaggaaaaacaggtgaagttattaaattaactgatgtaaaggacttctccttacccctgtggcttatatttatcatctgtgtctgctattatgttgctgtgttcccttttattggacttgggaaagttttctttacagagaaatttggattttcttcccaggcagcaagtgcaattaacagtgttgtatatgtcatatcagctcccatgtccccggtgtttgggctcctggtggataaaacagggaagaacatcatctgggttctttgcgcagtagcagccactcttgtgtcccacatgatgctggcctttacgatgtggaacccttggattgctatgtgtcttctgggactctcctactcattgcttgcctgtgcattgtggccaatggtggcatttgtagttcctgaacatcagctgggaactgcatatggcttcatgcagtccattcagaatcttgggttggccatcatttccatcattgctggtatgatactggattctcgggggtatttgtttttggaagtgttcttcattgcctgtgtttctttgtcacttttatctgtggtcttactctatttggtgaatcgtgcccagggtgggaacctaaattattctgcaagacaaagggaagaaataaaattttcccatactgaatgagaagttaaaatgaatgtgtcatgagaatgggcttaacacatcgttggtttgaaaacttccatttttaaaaatttagagtttagtcattagaaaaaataatggactggaaagttatatttatatccaaatatacctatttcaaagtgtatttgtgaggcctgttttagcctgtgtcttttgtattgtgtgttgctaaagaattctacttttagtaggctaatcaacaatgaaagggttagaaaattgctgtggaacatccaggtgaacttcaggaaagacagtgaaaaatggaaaacgttggagcttctgttgagataatcttcattaggtatatatcttagggatacagccttttctttatcttatagcaggaaaaaaaaacttttgagggaaatagaagggctgcgttacacaaaataaacaatggcattgtcataggccttccttttactagtagggcataatgctagggaatatgtgaagatgtttttatgaagtctctttctgatcacgaacaatagcttgcgctctactctgtagttatgtggattgccgagcaatgacccttttcaatttcttatttctgtgttactgaggaccctaatcacttagggatgtaattttatagtataaactttctgtacagtttttcttatagtctaataagtaaaaagtgtccttcaaattatgataattgcctatgtacatggataaattaaaacactgcacacggaaaaaaaaaaaaaaaaagggcggccgctctagaggatcc

SEQ ID NO: 1216 - DNA, 1655 bp, Homo sapiens
ccacgcgtccgggcaaagaattaaacctggtgtttggacttcaacttagcatggctagaattggaagtacagtaaacatgaacctcatgggatggctgtattctaagattgaagctttgttaggttctgctggtcacacaaccctcgggatcacacttatgattgggggtataacgtgtattctttcactaatctgtgccttggctcttgcctacttggatcagagagcagagagaatccttcataaagaacaaggaaaaacaggtgaagttattaaattaactgatgtaaaggacttctccttacccctgtggcttatatttatcatctgtgtctgctattatgttgctgtgttcccttttattggacttgggaaagttttctttacagagaaatttggattttcttcccaggcagcaagtgcaattaacagtgttgtatatgtcatatcagctcccatgtccccggtgtttgggctcctggtggataaaacagggaagaacatcatctgggttctttgcgcatagcagccactcttgtgtcccacatgatgctggcctttacgatgtggaacccttggattgctatgtgtcttctgggactctcctactcattgcttgcctgtgcattgtggccaatggtggcatttgtagttcctgaacatcagctgggaactgcatatggcttcatgcagtccattcagaatcttgggttggccatcatttccatcattgctggtatgatactggattctcgggggtatttgtttttggaagtgttcttcattgcctgtgtttctttgtcacttttatctgtggtcttactctattggtgaatcgtgcccagggtgggaacctaaattattctgcaagacaaaggaagaaataaaatttcccatactgaatgagaagttaaaatgaatgtgtcagagaatgggcttaacacatcgttggtttgaaaacttccattttaaaaatttagagtttagtcattagaaaaaataatggactggaaagttatatttatatccaaatatacctatttcaaagtgtatttgtgaggcctgttttagcctgtgtcttttgtattgtgtgttgctaaagaattctacttttagtaggctaatcaacaatgaaagggttagaaaattgctgtggaacatccaggtgaacttcaggaaagacagtgaaaaatggaaaacgttggagcttctgttgagataatcttcattaggtatatatcttagggatacagccttttctttatcttatagcaggaaaaaaaaacttttgagggaaatagaagggctgcgttacacaaaataaacaatggcattgtcataggccttccttttactagtagggcataatgctagggaatatgtgaagatgtttttttgaagtctctttctgatcacgaacaatagcttgcgctctactctgtagttatgtggattgccgagcaatgacccttttcaatttcttatttctgtgttactgaggaccctaatcacttagggatgtaattttatagtataaactttctgtacagtttttcttatagtctaataagtaaaaagtgtccttcaaattatgataattgcctatgtacatggataaattaaaacactgcacacggaaaaaaaaaaaaaaaaa

SEQ ID NO: 1217 - DNA, 937 bp, Homo sapiens
  misc_feature (6)..(6): n equals a,t,g, or c
  misc_feature (35)..(35): n equals a,t,g, or c
  misc_feature (51)..(51): n equals a,t,g, or c
  misc_feature (88)..(88): n equals a,t,g, or c
  misc_feature (97)..(97): n equals a,t,g, or c
  misc_feature (137)..(137): n equals a,t,g, or c
  misc_feature (160)..(160): n equals a,t,g, or c
  misc_feature (234)..(234): n equals a,t,g, or c
  misc_feature (842)..(842): n equals a,t,g, or c
  misc_feature (869)..(869): n equals a,t,g, or c
ccgaanttggaaaacccggggcaattttgaccggnaaccggcaattttaantggtgaggtttggcttaacctcaattagggcaccccnagggctttnacccctttaaggcttccgggctccgtatggttggtgtggnaattgtgagcggataccaatttnccaccaggaacagctatgaccatggattacgcaaagctcgaaattaaccctcactaaagggaacaaaagctggngctccaccgcggtggcggccgctctagaactagtggatcccccgggctgcaggaattcggcacgagattagctaccccttttgttatactttattatacatatatgtatgtatatatacagtatgtgtgtatgcatatatgtatgtatatatacagtatgtgcgtatacatatatgtatgtatatatacagtatgtgcgtatacatgtatgtatacatacagtatgtgcgtatacatgtgtgtatgcatacagtatgtgcgtatacatgtatgtatacatacagtatgtgcgtatacatgtatgtatgtatgcatacagtatgtgcatatacatgtatgtatgcatatatacatacgtatatatacagtcgggtcgaaaccaccctactgttttcaaatatgtgatgatactgataagagcttgccctagtgtggtatatttttgggaacccagcaataggtaatttattctttttatgcatattgtatttgtaattcaagttgaccagatttttattagtgaagaaaaggagacagtaaaatttatatattcccctgtgttaaaaaaaaaaaaaaaaaaaactcgagggggggcccggtacccaatncgccctatagtgagtcgtattacaatncactggccgtcgttttacaacgtcgtgactgggaaaaccctggcgttacccaacttaatcgccttgca

SEQ ID NO: 1218 - DNA, 843 bp, Homo sapiens
gaaattaaccctcactaaagggacaaaagctggagctccaccgcggtggcggccgctctagaactagtggatcccccgggctgcaggaattcggcacgagcccttgagcgcgaggcgcggagcccccggagcccccaaaccgcagacacatccccgcgccccagagccccggcctgcgcgcccagccgggcccgcgcgatgccctcagaccggcctttcaagcagcggcggagcttcgccgaccgctgtaaggaggtacagcagatccgcgaccagcaccccagcaaaatcccggtgatcatcgagcgctacaagggtgagaagcagctgcccgtcctggacaagaccaagtttttggtcccggaccatgtcaacatgagcgagttggtcaagatcatccggcgccgcctgcagctgaaccccacgcaggccttcttcctgctggtgaaccagcacagcatggtgagtgtgtccacgcccatcgcggacatctacgagcaggagaaagacgaggacggcttcctctatatggtctacgcctyccaggaaaccttcggcttctgagccagcagcccctgcctgtctgcccatctgcccctcacccacccgaggctctgcccaccgcctggacctgcccacccctgaaagactggcccctggctccccgcccctcggtctccacgtggtgtatggatctgtggtcattgtccctctgcagaataaagattgctcaggcctgcctgaaaaaaaaaaaaaaaaaaaaaaaaaaaaaaaaaaaaaaaaaaaaaaaaaaaaaaaaaaaactcgagggggggcccggtacccaattcgccctatagggag

SEQ ID NO: 1219 - DNA, 717 bp, Homo sapiens; identical to SEQ ID NO: 32
  misc_feature (47)..(47): n equals a,t,g, or c
  misc_feature (699)..(699): n equals a,t,g, or c

SEQ ID NO: 1220 - DNA, 989 bp, Homo sapiens
  misc_feature (6)..(6): n equals a,t,g, or c
  misc_feature (15)..(15): n equals a,t,g, or c
acgacnagacaggtnaccggtaccggaattacccgggtacgaacccacgcgtaccgatatttcgtcatttaagaatatctacagatatgcctttgattttgcaagggataaagatcagagaagccttgatattgatactgctaaatctatgttagctcttctgcttgggaggacatggccactgttttcagtattttaccagtacctggagcaatcaaagtatcgtgttatgaacaaagatcaatggtacaatgtattagaattcagcagaacagtccatgctgatcttagtaactatgatgaagatggtgcttggcctgttcttcttgatgaatttgttgagtggcaaaaagtccgtcagacatcatagcaagaactatgtgaagaaaatgcaaacctttcaattcccacgtgtatacaagctaatgtgatgagggggaaaaaaatccaacgggtgcattttcattcatatgaaagacttctcatagtacttttttttcctttttttaaaggaggtttttcttgttacatgtgatgggcattgagccacacctcttcttagactgaatattgaagtttttgttttgagttatgtttataacatttatttcagaacaataaagattcagatttgtgacaaaaaaaaaaaaaaaaaaattaatttcaacgagaaggcgatccataaggagggctgtgtggagaagattgggggctggctgaggaaaaatgtgctggtggtagctgcagcagcccttggaattgcttttgtcgaggttttgggaattgtctttgcctgctgcctcgtgaagagtatcagaagtggctacgaggtgatgtaggggtctggtctcctcagcctcctcatctgggggagtggaatagtatcctccaggtttttcaattaaacggattattttttcagaccgaaaagagatggtctgagtttgtcttaraaaaaaaaaaaaaaaaaaaaaaaaaaaaaaaaaaaa

SEQ ID NO: 1221 - DNA, 836 bp, Homo sapiens
  misc_feature (793)..(793): n equals a,t,g, or c
  misc_feature (804)..(804): n equals a,t,g, or c
acagggcgattgggtacgggccccccctcgagtttttttttttttttttttttttatccaaaatgtgtttattgagatggtttcccactcatcttgactcagagtgcttttagtgctgcttcctcctgaaggaacatccttctgtaagccttgcttttcctcctgtaggctggcagaggacagtggagcagccaacacacaaaactaccgtttgtgcatggctaaagaccgtggtgattttatagcatcctgggcatttcacatccatgaagtaggaattggggctctgcaccaggcgtttcttcttgtgtttcctcttctcctcttctggagagggatgaaggagatcctttgcgagaggcatgttctcgtgtgcgtaggtcgtcactcgtgccgaattcggcacgagtatcagtaccagcagcaagggcagaaccaccccagtgcacctccctggcctggtctgctgatggccagactctgtttgctggctacacggacaacctggtgcgartgtggcaggtgaccattggcacacgctaraagtttatggcagagctttacaaataaaaaaaaaactggcttttctgaaaaaaaaaaaaaaaactcgtgccgaattcggcacgagtttaaggcctttgtcacaaatctgaatctttattgttctgaaataaatgttataaacataactcaaaacaaaaacttcaatattcagtctaagaagaggtgtggctcaatgcccatcacatgtaacaagaaaaacctcctttaaaaaaaggaaaaaaaagtactntgagaagtctnggcccatgaatggacatgcttccaaatgggaa

SEQ ID NO: 1222 - DNA, 564 bp, Homo sapiens
ggcacgagctcttctgcttgggaggacatggccactgttttcagtattttaccagtacctggagcaatcaaagtatcgtgttatgaacaaagatcaatggtacaatgtattagaattcagcagaacagtccatgctgatcttagtaactatgatgaagatggtgcttggcctgttcttcttgatgaatttgttgagtggcaaaaagtccgtcagacatcatagcaagaactatgtgaagaaaatgcaaacctttcaattcccacgtgtatacaagctaatgtgatgagggggaaaaaaatccaacgggtgcattttcattcatatgaaagacttctcatagtacttttttttcctttttttaaaggaggtttttcttgttacatgtgatgggcattgagccacacctcttcttagactgaatattgaagtttttgttttgagttatgtttataacatttatttcagaacaataaagattcagatttgtgacaaaggccttaaactcgtgccgaattcggcacgagttttttttttttttttcagaaaagccagtttttttttta

SEQ ID NO: 1223 - DNA, 1298 bp, Homo sapiens
ctcttgcttgctgtgactggtggagctgccgcgctgtccgcgttatctcctcccggtgagaacgaaccgcagtgtccaccggcgaggagccagccctgtcccggtcagagaaagacgacgaggatacctgggagcgggcggcggccgggctgggccgcgccggtgcgggctggcgactctgctcctccgcttgctgctgtctctgggaactgggtgccagcgctgaggggcttccagcggacagggacccccttccccggctcccctgcccaccctgccggggagggcggaagatgccggtgaagaagaagagaaaatcccctggggtggcagcagcagtagcggaagacggaggcctcaaaaagtgtaaaatctccagctattgcagatcccaaccccctgctagactaataagtggagaggaacatttttcaagcaagaagtgcctggcttggttttatgaatatgcaggtcctgatgaagttgtagggccagaaggaatggaaaaattttgtgaagacattggtgttggaacctgaaaatattattatgttagttttagcgtggaaattggaggctgaaacatggggattttttaccaaggaagaatggtttaaagggaatgacttcattacagtgtgactgcacagaaaagttacaaaacaaatttgactttttgcgctcaacagttgaatgatatttcgtcatttaagaatatctacagatatgcctttgattttgcaagggataaagatcagagaagccttgatattgatactgctaaatctatgttagctcttctgcttgggaggacatggccactgttttcagtattttaccagtacctggagcaatcaaagtatcgtgttatgaacaaagatcaatggtacaatgtattagaattcagcagaacagtccatgctgatcttagtaactatgatgaagatggtgcttggcctgttcttcttgatgaatttgttgagtggcaaaaagtccgtcagacatcatagcaagaactatgtgaagaaaatgcaaacctttcaattcccacgtgtatacaagctaatgtgatgagggggaaaaaaatccaacgggtgcattttcattcatatgaaagacttctcatagtacttttttttcctttttttaaaggaggtttttcttgttacatgtgatgggcattgagccacacctcttcttagactgaatattgaagtttttgttttgagttatgtttataacatttatttcagaacaataaagattcagatttgtgacaaaaaaaaaaaaaaaaaaaa

SEQ ID NO: 1224 - DNA, 2306 bp, Homo sapiens
  misc_feature (2298)..(2298): n equals a,t,g, or c
  misc_feature (2300)..(2300): n equals a,t,g, or c
  misc_feature (2305)..(2305): n equals a,t,g, or c
gcctgctttcgcgacatggccttcaattttggggctccctcgggcacctccggtaccgctgcagccaccgcggcccccgcgggtgggtttggaggatttgggacaacatctacaactgcaggttctgcattcagcttttctgccccaactaacacaggcactactggactctttggtggtactcagaacaaaggttttggatttggtactggttttggcacaacaacgggaactagtactggtttaggtactggtttgggaactggactgggatttggaggatttaatacacagcagcagcagcaaactacattaggtggtctcttcagtcagcctacacaagctcctacccagtccaaccagctgataaatactgcgagtgctctttctgctccaacgctgttgggagatgagagagatgctattttggcaaaatggaatcaactgcaggccttttggggaacaggaaaagggtatttcaacaataatattccgccagtggaattcacacaagaaaatcccttttgccgatttaaggcagtaggttatagttgcatgcccagtaataaagatgaagatgggctagtggttttagttttcaacaaaaaagaaacagagattcgaagccaacaacaacagttggtagaatcattgcataaagttttgggaggaaaccagacccttactgtaaatgtagagggcactaaaacattgccagatgatcagacagaagttgttatttatgttgttgagcgttcgccaaatggtacttcaagaagagttccagctacaacgctatatgcccattttgaacaagccaatataaaaacacaattgcagcaacttggtgtaaccctttctatgactagaacagaactttctcctgcacagatcaaacagcttttacagaatcctcctgctggtgttgatcctattatctgggaacaggccaaggtagataaccctgattctgaaaagttaattcctgtaccaatggtgggttttaaggaacttctccgaagactgaaggttcaagatcagatgactaagcagcatcaaaccagattagatatcatatctgaagatattagtgagctacaaaagaatcaaactacatctgtagccaaaattgcacaatacaagaggaaactcatggatctttcccatagaactttacaggtcctaatcaaacaggaaattcaaaggaagagtggttatgccattcaggctgatgaagagcagttgcgagttcagctggatacgattcagggtgaactaaatgcacctactcagttcaagggccgactaaatgaattgatgtctcaaatcaggatgcagaatcattttggagcagtcagatctgaagaaaggtattacatagatgcagatctgttacgagaaatcaagcagcatttgaaacaacaacaggaaggccttagccatttgattagcatcattaaagacgatctagaagatataaagctggtcgaacatggattgaatgaaaccatccacatcagaggtggtgtctttagttgacagttcacaaacttgtgtaaaggtttgtgaaatgcatcttcttactgcatcagaccttccttaagaatgaaaccgaccacatggagggaaaaagaaaacaattctttcttggattggttttttgagaagtttactgacaaattactgttcatcaaatctgaaatagtcacctcacagctcttcaaagaaaacctttgaaagatttatatctaaaagctgtatttactttaaaagaagtgcataattaccaaaattgtatgtactattgtacatttttacaacagcattttcttaaacataatctgtgtttaatgattattgtccattgagcctgtactctgctttccataccaagtaaatatgaaataatctactttgcacataacagaasaaactataattacttggctgttggagatttgtacttgagtataaatgtacaccagtttttgtatttgtgaactcatctgtgggaggagtaaagaaaatccaaaagcatttaatgttttgtttttgttctataaagatatgaaaatgtatttttatattattttacttatttggaatttacagagcacacctaagcaattaggatataacaaaactacttaaccatttttgcaaccattttgttttttaagcctttttatttctaaaaagatgaaaacttataaataaattcttaatttgtaattacttttaaaaaaaaaaaaaaaaaaaaactcgagggggggcccgtacccaattcgccctccaacnancacant

SEQ ID NO: 1225 - DNA, 1438 bp, Homo sapiens
cggccgccctgcagggcttccagacccaggtgctgggcttcatcgaggagggggaagctgccatgctaggccgctcccagggtgacctgcggcgacaggaggaacagcgcagccgcctgagccgagcccgccagaatctcagccaggtccctgaagctgactcagtcagcttcctgcaggagctgctggcactaaggctggccctggaggatgggtgtggccctgggcctggacccccgagggagctcagcttcaccaaatcatcccaagctgtccgtgcagtgagagacatgctggccgtggcctgcgtcaaccagtgggagcagctgagggggccgggtggcaacgaggatgggccacagaagctggactcggaagctgatgctgagccccaagacctcgagagtacgaacctcttggagagtgaagctcccagggactatttcctcaagtttgcctatattgtggatttggacagcgacacagcagacaagttcctgcagctgtttggaaccaaaggtgtgcaagagggtgctgtgtcctatcaactaccccttgtcgcccacccgcttcacccattgtgagcaggtgctgggcgagggtgccctggaccgaggcacctactactgggaggtggagattatcgagggctgggtcagcatgggggtcatggccgaagacttctccccacaagagccctacgaccgcggccggctgggccgcaacgcccactcctgctgcctgcagtggaatggacgcagcttctccgtctggtttcatgggctggaggctcccctgccccaccccttctcgcccacggttggggtctgcctggaatacgctgaccgtgccttggccttctatgctgtacgggacggcaagatgagcctcctgcggaggctgaaggcctcccggccccgccggggtggcatcccggcctcccccattgaccccttccagagccgcctggacagtcactttgcggggctcttcacccacagactcaagcctgccttcttcctggagagtgtggacgcccacttgcagatcgggcccctcaagaagtcctgcatatccgtgctgaagaggaggtgatgccgggcacgggcgctcctgctgccgtctctgctccaggaagctgcctcctctgggccctctccttcgtctgggaaggcaccagcatgagtcccacacacccagccttctcatttctagaggcttccacctttttatacactcagccttccctctcccaggcaggaggacccccagaccctgttcccctgcagacctcacttctgggagacagagctacagctgggacagctccaagctaccctaacccctcctttcccaggtttctagaatagtgtctggcatgtagtagatgctcaataaacacttgttgaatgaaaaaaaaaaaaaaaaaaaactcgag

SEQ ID NO: 1226 - DNA, 508 bp, Homo sapiens
  misc_feature (71)..(71): n equals a,t,g, or c
  misc_feature (181)..(181): n equals a,t,g, or c
  misc_feature (368)..(368): n equals a,t,g, or c
ctctagaactagtggatcccccgggctkcaggaattcggcacgagtggacagtcactttgcggggytcttnacccmcagattcaagcctgccttcttcctggagagtgtggacgcccacttgcagatcgggcccctcaagaagtcctgcatatccgtgctgaagaggaggtgatgccgggnacgggcgctcctgctgccgtctctgctccaggaagctgcctcctctgggccctctccttcgtctgggaaggcaccagcatgagtcccacacacccagccttctcatttctagaggcttccacctttttatacactcagccttccctctcccaggcaggaggacccccagaccctgttcccctgcagncctcacttctgggagacagagctacagctgggacagctccaagctaccctaacccctcctttcccaggtttctagaatagtgtctggcatgtagtagatgctcaataaacacttgttgaatgaaaaaaaaaaaaaaaaaa

SEQ ID NO: 1227 - DNA, 455 bp, Homo sapiens
tcggcacgagtggacagtcactttgcggggctcttcacccacagactcaagcctgccttcttcctggagagtgtggacgcccacttgcagatcgggcccctcaagaagtcctgcatatccgtgctgaagaggaggtgatgccgggcacgggcgctcctgctgccgtctctgctccaggaagctgcctcctctgggccctctccttcgtctgggaaggcaccagcatgagtcccacacacccagccttctcatttctagaggcttccacctttttatacactcagccttccctctcccaggcaggaggacccccagaccctgttcccctgcagacctcacttctgggagacagagctacagctgggacagctccaagctaccctaacccctcctttcccaggtttctagaatagtgtctggcatgtagtagatgctcaataaacacttgttgaatg

SEQ ID NO: 1228 - DNA, 2693 bp, Homo sapiens
gacttttctctagagtctgaaagatgctagaaagaaataaaatttaacttacttaagagaattatggatcttttattaataaaaattaacttgatgatttgaactaacagttatgataattctggtatttatagctttttttattcccctgcagaaaaccataggcaaaattgcaacatgcttggaattgcgaagtgcagctttacagtccacacagtctcaagaagaatttaaactggaggacctgaagaagctagaaccaatcctaaagaatattcttacatataataaagaattcccatttgatgttcagcctgtcccattaagaagaattttggcacctggtgaagaagagaatttggaatttgaagaagatgaagaagagggtggtgctggagcagggtctcctgattcttttcctgctagagttcccggtactttattaccaaggttgccatcggaaccaggaatgacattactcactatcagaattgagaaaattggtttgaaagatgctgggcagtgcatcgatccctatattacagttagtgtaaaggatctgaatggcatagacttaactcctgtgcaagatactcctgtggcttcaagaaaagaagatacatatgttcattttaatgtggacattgagctccagaagcatgttgaaaaattaaccaaaggtgcagctatcttctttgaattcaaacactacaagcctaaaaaaaggtttaccagcaccaagtgttttgctttcatggagatggatgaaattaaacctgggccaattgtaatagaactatacaagaaacccactgactttaaaagaaagaaattgcaattattgaccaagaaaccactttatcttcatctacatcaaactttgcacaaggaatgatcctgacatgatgaacctggaacttctgtgaattttaccactcagtagaaaccatcatagctctgtgtagcatattcacccttcaacaggcaggaagcaagccgtacccagaccagtaggccggacggagtccaatgcaaagctgtaccacagaattcagagtccagcacatcacactgacgtataggactccttgggatacaggtttattgtagattttgaaacatgtttttacttttctattaattgtgcaattaatagtctattttctaatttaccactactcctaccctgcttcctggaacaatactgttgtgggtaggatgtgctcatcttcagacttaatacagcaataagaatgtgctagagtttacacatctgttcacttttgctccaatatgctcttttgacttaacgtcaagctttgggttgatgtgggtagggtagtgtcaaactgctttgagaggaatgggaccagttctgctgcctaagaaggtctgtctggatgtttataggcagcacctctgaagtggcctaaattcaccctgatctgatagttttcctgcttagaaagtgtgccttggccagatcagtatcccacatgggagtgttccctaggttgtagctgtgattgtttccagatgaccagattgtttttctgaaaatgagcatatttttagtcatgtcgattagctgttcttctacatcacattgttactctttctgatgatgattctagggttaacattggaaccatctcaaaataattacaaagttttagatgggtttacaatgtcttctaaacaatgtaatctaaaaataattgagtcagatgctaacgagatactgcaggcataactgctgtttttctgacaactgattgtgaaaccttaaaacctgcatacctcttcttacagtgaggagtatgcaaaatctggaaagatattctattttttttatataggtagataggatcgccatttatttcctatttagatatactgacattcatccatatgaaaatatgcaggtcattagcttactataatttacttttgacttaatggggcataaataaaactttcatagtacacatgaggtggatatttgatacacagaacatttgcggtgggctttctgtgggttagatgtaaagcccacatattttaatattcactattttaaatgagcaatgcatgaggggaatgcagtgtcagtacctggcctatttttaaactagtgtaatcaccctagtcataccattcagtatgtttgctttttaaaataagtaaccacaattaagttgttgtagcccttgcacttcaagagatctagtctttactttcagttgtctgttaggtccattctgtttactagacggatgttaataaaaactatgcgagcctgaatgaattctcagccaaatttagtcttgtctctcatcttgattggattaattccaaattctaaaatgattcagtccacaatagctctaggggatgaagaatttgccttactttgcccagttcctaagactgtgagttgtcaaatccctagactgtaagctcttcaaggagcaagaggcgcattttctccgtgtcatgtaatttttctaaggtgtttggcagcactctgtaccctgtggagtactcagtaccttttgtttgatgttgctgacaagacctgaaaaaaaatcccttaaaaaaaaaacccattaaagtgtagcaaaaccgaaaaaaaaaaaaaaaaaaactcgagacgggcccggtacccaattcgccgtatagtgagtcgagag

SEQ ID NO: 1229 - DNA, 1629 bp, Homo sapiens
ccacgcgtccggagccgggagccggtcgcgggggctccgggctgtgggaccgctgggcccccagcgatggcgaccctgtggggaggccttcttcggcttggctccttgctcagcctgtcgtgcctggcgctttccgtgctgctgctggcgcactgtcagacgccgccaagtgattgccttcatgttgtggagcccatgcctgtgcgggggcctgatgtagaagcatactgtctacgctgtgaatgcaaatatgaagaaagaagctctgtcacaatcaaggttaccattataatttatctctccattttgggccttctacttctgtacatggtatatcttactctggttgagcccatactgaagaggcgcctctttggacatgcacagttgatacagagtgatgatgatattggggatcaccagccttttgcaaatgcacacgatgtgctagcccgctcccgcagtcgagccaacgtgctgaacaaggtagaatatgcacagcagcgctggaagcttcaagtccaagagcagcgaaagtctgtctttgaccggcatgttgtcctcagctaattgggaattgaattcaaggtgactagaaagaaacaggcagacaactggaaagaactgactgggttttgctgggtttcattttaataccttgttgatttcaccaactgttgctggaagattcaaaactggaagcaaaaacttgcttgatttttttttcttgttaacgtaataatagagacatttttaaaagcacacagctcaaagtcagccaataagtcttttcctatttgtgacttttactaataaaaataaatctgcctgtaaattatcttgaagtcctttacctggaacaagcactctctttttcaccacatagttttaacttgactttcaagataattttcagggtttttgttgttgttgttttttgtttgtttgttttggtgggagaggggagggatgcctgggaagtggttaacaacttttttcaagtcactttactaaacaaacttttgtaaatagaccttaccttctattttcgagtttcatttatattttgcagtgtagccagcctcatcaaagagctgacttactcatttgacttttgcactgactgtattatctgggtatctgctgtgtctgcacttcatggtaaacgggatctaaaatgcctggtggcttttcacaaaaagcagattttcttcatgtactgtgatgtctgatgcaatgcatcctagaacaaactggccatttgctagtttactctaaagactaaacatagtcttggtgtgtgtggtcttactcatcttctagtacctttaaggacaaatcctaaggacttggacacttgcaataaagaaattttattttaaacccaagcctccctggattgataatatatacacatttgtcagcatttccggtcgtggtgagaggcagctgtttgagctccaatgtgtgcagctttgaactagggctggggttgtgggtgcctcttctgaaaggtctaaccattattggataactggcttttttcttcctctttggaatgtaacaataaaaataatttttgaaacatcaaaaaaaaaaaaaaaaaaaaaaaaaaaaaaaaaaaaaaaa

SEQ ID NO: 1230 - DNA, 2094 bp, Homo sapiens
  misc_feature (2064)..(2064): n equals a,t,g, or c
aattcgcggccgcgtcgacacggctgcgcagaagacgacagaaggggccccgcgcatggggaggtaggctcggaccggcccgcggagctgctgcagtccttcgcgccctcctcgccctccccaccgacatcatgctccagttcctgcttggatttacactgggcaacgtggttggaatgtatctggctcagaactatgatataccaaacctggctaaaaaacttgaagaaattaaaaaggacttggatgccaagaagaaaccccctagtgcatgagactgcctccagcactgccttcaggatatactgattctactgctcttgagggcctcgtttactatctgaaccaaaagcttttgttttcgtctccagcctcagcacttctcttctttgctagaccctgtgttttttgctttaaagcaagcaaaatggggccccaatttgagaactacccgacatttccaacatactcacctcttcccataatccctttccaactgcatgggaggttctaagactggaattatggtgctagattagtaaacatgacttttaatgagtagtgtcttctttatcgtttgcgatttttactaccttttttcaaaagaaaaattgatgagttttgtatagctggtcagatacaaataatagtgacttcacagtttagtaattataatgggtacttgttaaacatttggtactaaattatgttgctgcaaagtaattaaaattagtatctagagctagtttctggtgaattattcatttattttgtactgttgttaggcagctctgtagttgctaatttaaccaataagtcaatttgctattcatgaagaaacgattctgagaatcctgtcaggaattggggaatgaaaaaatacacaaaataatggtctttgtcccagtagagttcatagtctatttagtgtgcatgtttttccttaatgatgtatttgatctgacttttttccttctcaaaagaatcatacttgggattacaggtacatttgatgttatatgatggataagtgaaaagtttttaaaggagattttataccttttcacattaaaaaaggtatttatattattactttgtagtgattgtcttaagaaaaaatatagcccaaatgtatagtaaaatcagcagctcaagaagaatttctgcttctctttgtagttgatgctttgttttttcctgcagtcagaaattccttgtatttgtcaaatgtataatcagcttgtattgtttttaaattaaaaaaaaatttgaataattaacttttgccatgggacaagatacaaaagtaatttcatataaagggcctctcccacccctgttctctggctcctggctcctgtttgacaagttactgttaccacttcgccttatacttttgagaaagagtctgtgcctaaacaaacacgtgtaacacaaatagtaactatacatggaggtctagccctcgccttttttttttctttttttcttttttaatggagatcattctataccagcatgtaagtagcaaggaacctcattctttttttggctgcctaaaatttttttgaatagatataacataattgatttaatctgctactggtgaatgcttaggttgttcttttgctattacagtgataacttcaatcctaatgttattaagcatatcgattcagggtatagctataagatgaagtcctaaaagtataatttagactaaatacaaatacccatttcgctagctgttttgtttcagaggacttgttgagcagcttcactaataatgccatttttgaagacatggcaggttcagaatcaataaactggaagaattgttcagagcatcttttttcagacagtgatgacattgattctgtatatgataaagtgattctgcttctctttgacaacttgcatctctcctacatggaagtaagttttattcctgtcaatgttgtctttgtgtgtgacagattaggattaaattatggtttgacttttcctagcagcgtgatcakgggcaagtggctttttttttttttttttttgaggacagagtcncactctgctgcccggggtgggagtgcagtt

SEQ ID NO: 1231 - DNA, 1152 bp, Homo sapiens
accctcctaaagggaacaaaagctggagctccccgcggtggcggccgctctagaactagtggatcccccgggctgcaggaattccgtattttcttgtaaatactagaatcttattatcaatttctctattttaaaaagcctgatgatattttggtcagtattaagttgaatctctagatcatttttgagagaaatggcttcttataaaactttaaagatgctgttttcctgtcttctcacttgcagtgtctctaatgagcaatatgctgtcatctttaacttttttcctctatatatatgttttttatctgattgctttaaatgtttctctttatcactggttttgagcaatttgattataatatatcttggagtaattttcttcatattttttgtacttgatatccatcgatcttcttgattctgtgtgtttataatattcatcaaattgaaaccattttggtgattatatcttcaaatataatcaaatgcaatcatattttgtctctccttctcctctgttagtcttcaaggactccaactatatctatgttaggctacttgcagttgttccatgcttattttttttttcatttttaaaaactattttttctccctatgtttcattttttctagcttctattgctacatcttcaagttcactaaccttttgttctgcaatgtctcatctaccattaatcctctcaaatgtatttttcatatcacacgttatagtttgcatctctaatagtttgatttgggcttttttatttcttccatgtctctgcttaacattttgaatgtatgaaatatatttaaaactgtattaatacatttgcctgctaattctacacctttgttaattctaggtcatatcaactgattgattttctttgcgtcattatgggccatctttttcttgttcatttcatgcctgatattttaaaatttaaaaccaaatattgtgaattttaccttgttttgtgttggatattttttgtatttctatcaacaatcatgagttttcttcttggatgcagttacagtcattggaaacaatttgatcctttcagacctggcctttggaattcgatatcaagcttatcgataccgtcgacctcgagggggggcccggacccaatcgccctatag

SEQ ID NO: 1232 - DNA, 1926 bp, Homo sapiens
ggcacgagcctgctcggtctctcagagccgcacactccgcggagctcctgccacagccgtcgccttcgcggcggctctccagccccgcgcctcagcctcggcgccgcatcaccgcgtcccaggcctccttccctccctctgccactccccctccctttcccgctcttcttgcccacccggccggcagagagagcctggatacgaagcaggcgggcttcagagtgggttggaaaaatggaggtgccgcgcctggatcatgccctcaacagccccaccagcccctgtgaggaggtgatcaaaaacctcagcctggaggccattcagctgtgcgaccgggacgggaacaaatcacaagacagtggcatagcagagatggaagaacttcctgtaccacataacatcaaaataagcaatataacgtgtgactcattcaagatttcatgggaaatggattcaaaatcaaaggatcgcattacacactattttattgacctcaacaagaaagagaacaagaactccaataaatttaaacacaaggatgttcccacaaaattgggggcaaaagctgttcccttgcctatgactgtccgtggacactggtttttaagcccaagaactgaatatacagtagcagtgcagactgcctcaaaacaagttgatggtgattatgttgtgtctgaatggagtgaaattatagaattctgcaccgcagactattcaaaagttcatctaacacaattgttggagaaggctgaagtgattgcaggacgcatgcttaagttttctgttttttatcgtaatcagcacaaagaatattttgactatgttcgagaacatcatgggaatgctatgcagccatctgtcaaggataacagtggtagccatggctctcctatcagtggaaaattagaaggcatcttcttcagctgcagcactgaattcaatactggaaagccaccccaggattcaccttatggaagatacaggtttgagattgccgcagaaaaactttttaaccccaatactaacttatactttggggacttctactgtatgtacactgcttatcattatgtgattcttgttattgctcctgtgggatcaccaggagatgaattttgtaagcagcgccttcctcaactaaattctaaggataataaatttttgacctgtacagaagaagatggggtgctggtttaccaccatgcccaggatgtcattttagaagtcatttacactgaccctgtggatctttctctgggcaccgtggcagaaatcactggtcatcagctcatgagtttgtctactgcaaatgcaaagaaagatcccagctgcaaaacctgtaatatcagtgttggacgttaatgcccacttttcttattcttactcagcccttttcctcccttaggagcattggtcctctgttgtccatttttatcaccagatgttttccactgaagcatgcacatgccactgtcaccaaaacaaacaactaccactttccaaatttcattcagaaccattttagtgttttcctattccctacccctcccactactttcaatgatgaaataccctaagttaagttctccttttgacactttattgcctagatgctgcaatgtttttatgtttcctttatgccaaacataacaaaacagttatatagactgctttagcaaagtacacaataatggcttataaatggtgtttaaatatgcattcattttaatctactgaacaaatattgggataactccaaaccgcatgaaagggtgtaattgcagcatgagttaaatcttgaagcctagaattgtcagcacttccaacttcttgtttgacagtgttatttatgttatttatattagctaacaggaaacaactactgtgtttcaacataataaatataaaaaaaaaaaaaaaaaa

SEQ ID NO: 1233 - DNA, 1530 bp, Homo sapiens
gccaaccccggaaaatcctctgtctccagtctctggaggtgaagcagggacaataagctaaggtagtatcttggccatcccaggaaacttgtggcattaggacgatgaaggccatgcttcagtgttttcgtttctatttcatgagactttttgtcttcctgcttacaagtgggaagatgattgacagtgactctactatgcagggctgttggtaccaacctgagccctataggtggcagtccctggagaagtggtcacagaagatggagctctgatcccctgcttacctcttcacaacacttgtgtgcaaagatagttttagatttggtttagaagctatcctccagaacaggctcccatacttagaatgtttctagttaaggtaataaattaggcaacccaagtgtgactccactcaagtgtccttttctgtaggcaggaagggcccacaacatggcttaaaatgtagtccatggttctggcccacagtacagtgtgtatctataccaggtcacctgtgttcaatctgggagccttcctggccagtctgagtggcagccagaagggagctcatagtgtctaggagtctcaggcaaggtaggtcagggtactgtgggcaggggggatgtgtgtgataggagagggtaccctaaaccccataccttccctccctgacctgaaaagctgatctcaacagggattcacacagaattaggctgtgtttttgcattagctggtaggtgactttctcaaaattcttaaattcagaaagtatttagtaaacttgaggaaggtatgaaatctggaggaggcatccaggacccaggggtttgatagctttacaggtaggatcataccacaccaaaagagcagtggacaataagactatatgagctatatgaagcttttaggaatcatttaggacagacagagccctaaacaacccattcatgacttaagttgttggctcagtgtatgctggggacaaagaaaaactaacaagccgacctgcctttatgataaattctagtgtgcttacaagggatgacttcctgaggtgtgatctgtccaccttgaagaactccacaactgaagaaggggagctgtgagaacgtggattgttctacaacttgcacagggtaacagaggaagtggctgaggcctagagtcacgttttccagttcccttcgcaaactatatttcttggaacgcgaaaggaagctttacctatttcatagaagacctggaatccataacctcagaaggcaatattattgatagaaaatgtggaaggatcaggaagttcttagattcttggatgacagatgcatgttgatgccctatggagatgtccttgtgttttgaggtcactgaggtaggaagacctgtctactcttggtttcaccactagaacagtcttgggctggatgggttatagagctgagcggctgtgatggttctgtttttacattaacaaaaacaattaaaaacaccaaaaacaaaaaaaaaaaaaaaaaaaaaaaaaaaaaa

SEQ ID NO: 1234 - DNA, 1183 bp, Homo sapiens
ggcacgagccacgattcagtcccctggactgtagataaagaccctttcttgccaggtgctgagacaaccacactatgagaggcactccaggagacgctgatggtggaggaagggccgtctatcaatcaatgtgtaaacctattactgggactattaatgatttgaatcagcaagtgtggacccttcagggtcagaaccttgtggcagttccacgaagtgacagtgtgaccccagtcactgttgctgttatcacatgcaagtatccagaggctcttgagcaaggcagaggggatcccatttatttgggaatccagaatccagaaatgtgtttgtattgtgagaaggttggagaacagcccacattgcagctaaaagagcagaagatcatggatctgtatggccaacccgagcccgtgaaacccttccttttctaccgtgccaagactggtaggacctccacccttgagtctgtggccttcccggactggttcattgcctcctccaagagagaccagcccatcattctgacttcagaacttgggaagtcatacaacactgcctttgaattaaatataaatgactgaactcagcctagaggtggcagcttggtctttgtcttaaagtttctggttcccaatgtgttttcgtctacattttcttagtgtcattttcacgctggtgctgagacaggggcaaggctgctgttatcatctcattttataatgaagaagaagcaattacttcatagcaactgaagaacaggatgtggcctcagaagcaggagagctgggtggtataaggctgtcctctcaagctggtgctgtgtaggccacaaggcatctgcatgagtgactttaagactcaaagaccaaacactgagctttcttctaggggtgggtatgaagatgcttcagagctcatgcgcgttacccacgatggcatgactagcacagagctgatctctgtttctgttttgctttattccctcttgggatgatatcatccagtctttatatgttgccaatatacctcattgtgtgtaatagaaccttcttagcattaagaccttgtaaacaaaaataattcttgtgttaagttaaatcatttttgtcctaattgtaatgtgtaatcttaaagttaaataaactttgtgtatttatataataaaaaaaaaaaaaaaaaa

SEQ ID NO: 1235 - DNA, 2822 bp, Homo sapiens
gactacacctactacttcgtcccagcaccctggctctcggtgaagctcctgcggctgctgcagtgctacccgcctccagaggatgcggctgtgaaggggcggctggtggaatgtctggagactgtgctcaacaaggcccaggagccccccaaatccaagaaggtgcagcattccaacgccaagaacgccatcctcttcgagaccatyagcctcatcatccactatgacagtgagcccaacctcctggttcgggcctgcaaccagctgggccagttcctgcagcaccgggagaccaacctgcgctacctggccctggagagcatgtgcacgctggccagctccgagttctcccatgaagccgtcaagacgcacattgacaccgtcatcaatgccctcaagacggagcgggacgtcagcgtgcggcagcgggcggctgacctcctctacgccatgtgtgaccggagcaatgccaagcagatcgtgtcggagatgctgcggtacctggagacggcagactacgccatccgcgaggagatcgtcctgaaggtggccatcctggccgagaagtacgccgtggactacagctggtacgtggacaccatcctcaacctcatccgcattgcgggcgactacgtgagtgaggaggtgtggtaccgtgtgctacagatcgtcaccaaccgtgatgacgtccagggctatgccgccaagaccgtctttgaggcgctccaggcccctgcctgtcacgagaacatggtgaaggttggcggctacatccttggggagtttgggaacctgattgctggggacccccgctccagccccccagtgcagttctccctgctccactccaagttccatctgtgcagcgtggccacgsgggcgctgctgctgtccacctacatcaagttcatcaacctcttccccgagaccaaggccaccatccagggcgtcctgcgggccggctcccagctgcgcaatgctgacgtggagctgcagcagcgagccgtggagtacctcaccctcagctcagtggccagcaccgacgtcctggccacggtgctggaggagatgccgcccttccccgagcgcgagtcgtccatcctggccaagctgaaacgcaagaaggggccaggggccggcagcgccctggacgatggccggagggaccccagcagcaacgacatcaacgggggcatggagcccacccccagcactgtgtcgacgccctcgccctccgccgacctcctggggctgcgggcagcccctcccccggcagcacccccggcttctgcaggagcagggaaccttctggtggacgtcttcgatggcccggccgcccagcccagcctggggcccacccccgaggaggccttcctcagcccaggtcctgaggacatcggccctcccattccggaagccgatgagttgctgaataagtttgtgtgtaagaacaacggggtcctgttcgagaaccagctgctgcagatcggagtcaagtcagagttccgacagaacctgggccgcatgtatctcttctatggcaacaagacctcggtgcagttccagaatttctcacccactgtggttcacccgggagacctccagactcagctggctgtgcagaccaagcgcgtggcggcgcaggtggacggcggcgcgcaggtgcagcaggtgctcaatatcgagtgcctgcgggacttcctgacgcccccgctgctgtccgtgcgcttccggtacggtggcgccccccaggccctcaccctgaagctcccagtgaccatcaacaagttcttccagcccaccgagatggcggcccaggatttcttccagcgctggaagcagctgagcctccctcaacaggaggcgcagaaaatcttcaaagccaaccaccccatggacgcagaagttactaaggccaagcttctggggtttggctctgctctcctggacaatgtggaccccaaccctgagaacttcgtgggggcggggatcatccagactaaagccctgcaggtgggctgtctgcttcggctggagcccaatgcccaggcccagatgtaccggctgaccctgcgcaccagcaaggagcccgtctcccgtcacctgtgtgagctgctggcacagcagttctgagccctggactctgccccgggggatgtggccggcactgggcagccccttggactgaggcagttttggtggatgggggacctccactggtgacagagaagacaccagggtttgggggatgcctgggactttcctccggccttttgtatttttatttttgttcatctgctgctgtttacattctggggggttagggggagtccccctccctccctttcccccccaagcacagaggggagaggggccagggaagtggatgtctcctcccctcccaccccaccctgttgtagcccctcctaccccctccccatccaggggctgtgtattattgtgagcgaataaacagagagacgctaacagccccatgtctgtgtccatcacccactgctaggtagtcaaagaagtggggtgagggcatgcagagtgtgggtggccaggcttcgcagcccatgggtgggactctggggagacagcagcagcagcagccgccgaagccccagctgcaaggccaccagacgcactcctgtgcctggttcctcagtccccaacaccaggtagcaagctctgggcagctgggcctggtagacctcatcttctgtcttctctggtggccctggctctggtgggaagtgcgtggaggtgaccagggtatagaagtttcggagctgattggaagaggattaacttcccgc

SEQ ID NO: 1236 - DNA, 260 bp, Homo sapiens
  misc_feature (234)..(234): n equals a,t,g, or c
  misc_feature (254)..(254): n equals a,t,g, or c
tacatatatgcaaaaaaaaaaagaattgagacacagaccttgctcctcaaaaattaactcgaacgacacatttttaagttaataatattttaaattgtcaaaccacaattgcatacatttatggggtacratgtgatgcttggatatgtgtataaaatgaggaatgactacatcgaggataaaatatccatcacctcatggcgtgaacccaggaggcggagcttgcagtgtccnagaccggcccactgcatccnaactgg

SEQ ID NO: 1237 - DNA, 192 bp, Homo sapiens
  misc_feature (1)..(1): n equals a,t,g, or c
naaatacccatcacctcaattttattttttgtggttagatatttgaaatttactttttgttatttaaatatacagtacattattattgactatagtcatcctgctgtgcaatagatttcaaaacgcatttctccggtttaactgaatctttgcatctgtgaacaacttcccatttttcctcgtgccgaattc

SEQ ID NO: 1238 - DNA, 117 bp, Homo sapiens
  misc_feature (85)..(85): n equals a,t,g, or c
tgcatatatgtatatatacawacacgcaatgtattcatsactgtttttgaaaaagctaccctttctcccttgaattggctttacntttttgtaaaagatcaattgactgtgtttgtg

SEQ ID NO: 1239 - DNA, 778 bp, Homo sapiens
ggcacgaggaaaaatgggaagttgttcacagatgcaaagattcagttaaaccggagaaatgcgttttgaaatctattgcacagcaggatgactatagtcaataataatgtactgtatatttaaataacaaaaagtaaatttcaaatatctaaccacaaaaaataaaattgaggtgatgggtattttttattttatttatttatttgtttatttatttatttttttgagacagagtctcgctctttcgcccaggccggactgcagtggcagggtctcggctcactgcaagctccgcctcctgggttcacgccatgaggtgatggatattttatcctcgatgtagtcattcctcattttatacacatatccaagcatcacattgtaccccataaatgtatgcaattgtggtttgacaatttaaaatattattaacttaaaaatgtgtcgttcgagttaatttttgaggagcaaggtctgtgtctcaattctttttttttttgcatatatgtatatatacatacacgcaatgtattcatcactgtttttgaaaaagctaccctttctcccttgaattgcctttacctttttgtaaaagatcaattgactgtgtttgtgcactcttatttctgagttctctattctgttccgttgatcactttgcaagtccttgaactttgttcctcccccacaatattgttggctattcttgttagtttgtctttctatataaactttagaattagtttgtcaatttccacacaaaaaaaaaaaaaaaaaa

SEQ ID NO: 1240 - DNA, 2707 bp, Homo sapiens
  misc_feature (2699)..(2701): n equals a,t,g, or c
taggttaagctggtacgcctgcaggtaccggtccggaattcccgggtcgacccacgcgtccggggaggtgcagcactttgtctgaatgctcagggtcgaaggaacggagaagctctggttaggtttgtaagtgaggagcaccgagacctagcactacagaggcacaaacatcacatggggacccggtatattgaggtttacaaagcaacaggtgaagatttccttaaaattgctggtggtacttccaatgaggtagcccagtttctctccaaggaaaatcaagtcattgtccgcatgcgggggctccctttcacggccacagctgaagaagtggtggccttctttggacagcattgccctattactgggggaaaggaaggcatcctctttgtcacctacccagatggtaggccaacaggggacgcttttgtcctctttgcctgtgaggaatatgcacagaatgcgttgaggaagcataaagacttgttgggtaaaagatacattgaactcttcaggagcacagcagctgaagttcagcaggtgctgaatcgattctcctcggcccctctcattccacttccaacccctcccattattccagtactacctcagcaatttgtgccccctacaaatgttagagactgtatacgccttcgaggtcttccctatgcagccacaattgaggacatcctggatttcctgggggagttcgccacagatattcgtactcatggggttcacatggttttgaatcaccagggccgcccatcaggagatgcctttatccagatgaagtctgcggacagagcatttatggctgcacagaagtgtcataaaaaaaacatgaaggacagatatgttgaagtctttcagtgttcagctgaggagatgaactttgtgttaatggggggcactttaaatcgaaatggcttatccccaccgccatgtaagttaccatgcctgtctcctccctcctacacatttccagctcctgctgcagttattcctacagaagctgccatttaccagccctctgtgattttgaatccacgagcactgcagccctccacagcgtactacccagcaggcactcagctcttcatgaactacacagcgtactatcccagtgtttgaaagatgtatggtgatcttgaaacctccagacacaagaaaacttctagcaaattcaggggaagtttgtctacactcaggctgcagtattttcagcaaacttgattggacaaacgggcctgtgccttatcttttggtggagtgaaaaaatttgagcyagtgaagccaaatcgtaacttacagcaagcagcatgcagcatacctggctctttgctgattgcaaataggcatttaaaatgtgaatttggaatcagatgtctccattacttccagttaaagtggcatcataggygtttcctaagttttaagtcttggataaaaactccaccagtgtctaccatctccaccatgaactctgttaaggaagcttcattttcgtatattcccgctcttttctcttcatttccctgtcttctgcataatcatgccttcttgctaagtaattcaagcataagatcttggaataataaaatcacaatcttaggagaaagaataaaattgttattttcccagtctcttggccatgatgatatcttatgattaaaaacaaattaaattttaaaacacctgaagatawattagaagaaattgtgcaccctccacaaaacatacaaagtttaaaagtttggatctttttctcagcaggtatcagttgtaaataatgaattaggggccaaaatgcaaaacgaaaaatgaagcagctacatgtagttagtaatttctagtttgaactgtaattgaatattgtggcttcatatgtattattttatattgtacttttttcattattgatggtttggactttaataagagaaattccatagtttttaatatcccagaagtgagacaatttgaacagtgtattctagaaaacaatacactaactgaacagaagtgaatgcttatatatattatgatagccttaaacctttttcctctaatgccttaactgtcaaataattataaccttttaaagcataggactatagtcagcatgctagactgagaggtaaacactgatgcaattagaacaggtactgatgctgtcagtgtttaacactatgtttagctgtgtttatgctataaaagtgcaatattagacactagctagtactgctgcctcatgtaactccaaagaaaacaggatttcattaagtgcattgaatgtggmtatttctctaagttactcatattgtcctttgcttgaatgcaatgccgtgcagatttatgwggctgctatttttattttctgtgcattactttaacaccttaaagggagaagcaaacatttccttcttcagctgactggcaatggccctttaactgcaataggaagaaaaaaaaaaaggtttgtgtgaaaattggtgataactggcacttaagatcgaaaagaaatttctgtatacttgatgccttaagatgcccaaagctgcccaaagctctgaaagactttaagataggcagtaatgcttactacaatactactgagtttttgtagagttaacatttgataataaaacttgcctgtttaatctcaaaaaaaaaaaaaaaaagggcggccgcccttnnntttttc

SEQ ID NO: 1241 - DNA, 2839 bp, Homo sapiens
attcggcgcgaggatggcggcgcccagcggagtaggggctgcgcttggggtttgctgaagctggctgcctctcccactccccttttgggtgcaaagcgccgctagcgggaagacgggggccgggcggggacaggggcacctgcgtasstggactgagagcctgcgcccagcttacatcgaccccacccggccccggcccgacccgacgcgacccgatccgatccgatcccattccatccgttcctcgtctcctcccggtctgacccgttgcccggccgtggttcgccacaccaggcatccaaagctgaggtcgctcctacggcctgggctcgcttcgctttagagatgtttggcctcttccctcccaaacagcccatcttcaaaacctggactcttggactggcacctggccacctttccctctaccaagactccacttccgtcttacccacttcttcctcagattcttggtaccccctgggttggagactgctcattttcctcccaaattaatcccagaccccctaaaatattgacaaccttgacaaccccccaaccgaggagccagactttgttttggactaacttccatagccctgtcatggaggcagtgtacctggtagtgaatgggttgggcctggtgctggacgtgctgaccttggtgttggacctcaacttcctgctggtgtcctccctcctggcttccctggcctggctcctggccttcgtctacaacctgccgcacacggtactgactagtcttctgcacttgggccgcggagtcttgctttcattgctggccttgatcgaagccgtggtccggttcacatgtgggggcttgcaggccttgtgtactctgctgtatagctgctgctctggcctagagagcctaaagctcctggggcacctggcctctcatggggcactgcggagcagggagatactgcaccggggcgtcctcaatgtggtctccagtggccatgctttgctgcgccaggcctgtgacatctgtgccattgccatgagcctggtggcttatgtgatcaacagcctggtcaacatctgcctcatcggcactcagaacctcttttccctggtgctggccctgtgggatgcagtgaccgggcctctgtggaggatgacagacgtagtggctgccttcctagcccacatttccagcagtgctgtggccatggccatcctcctttggacaccctgccaactagccctggagctgctggcctcagctgcccgcctcctggccagctttgtgcttgtcaatctcactggcttggtgttgctagcttgtgtgctggcagtgacggtgactgtgttgcatccggacttcaccctgaggctggctacccaggcactcagccagctccatgcccggccatcctaccaccgtcttcgagaggatgtcatgcggctctctcgcctagcactgggctcagaggcctggcgccgagtctggagccgcagtctgcagctggcgagttggccaaaccggggaggggcacctggagctccccagggtgaccctatgagggtattctcagttaggacccggagacaggacactcttcctgaagcggggcgcagatcagaggcagaagaggaggaggccaggaccatcagagtgacacctgtcaggggccgagagaggctcaatgaggaggagcctccaggtgggcaagacccttggaaattgctgaaggagcaagaggagcggaagaagtgtgtcatctgccaggaccagagcaagacagtgttgctcctgccctgccggcatctgtgcctgtgccaggcctgcactgaaatcctgatgcgccaccccgtctaccaccgcaattgcccgctctgccgccggggcatcctgcagaccctcaatgtctacctctgaagcctccttccctgcctgcccacccctccatgctccacgcaggcactcacgctaggacagcattaacacctcatctccgggtcctggtctgaatcccctcctacccctgtggccatcctgccatacatccaggacattgagttggaagactatgatctgggtgggggcaggataacatggcttctctttacccagtgggtcccttcgatgctgagggtggtgagtatgtcactatgcaagggccctgagactatttgctgtgggctctcctccagcctgcccagggcccacccagatgcctctggggttacccctgtctgcttctggtttttctgttggagatctataggtccttttcctgcctccttcacatttcctccccagcttttgcggccacaacacatcagtgtcatttgggtgttttggcaactcaggggccttcggatgatcttaaacctttgtgttcagccagagcccctgtgccctggtaggcgttggggttagtatctctcgggtgccctcagagccacctctgcctgtgatcgtctgatgaggctccctcccaacctgatccaaaagccagtctcaggagtttacccctgggatgggggatgcatctgcacctgactttggggccacgtgccctgtggcaccccagctcactgggagtctcaggagggataaccggatttctgctctttcccctgtcactcccacatcacacagaaaaatggcattcctctctgtctctccctggcatggagagggcagactgtgcacatttcactagggtccaaatacagaagggcccagggcccaggggcttgcagcttcgtgaggggtctctggcccagtttccaatgaataaagttctcttgacagctcaaaaaaaaaaaaaaaaaaaaaaaaaaaaaaaaaaaaaaaaaaaaaactcga

SEQ ID NO: 1242 - DNA, 2155 bp, Homo sapiens
  misc_feature (2146)..(2146): n equals a,t,g, or c
  misc_feature (2148)..(2148): n equals a,t,g, or c
  misc_feature (2155)..(2155): n equals a,t,g, or c
ggagagctattcctgtttctgttttttctcagttgccttcagctcaaaatcatccttattccaatgtggcatttttgaggtgacatattctggttcccttaagtataatcattgtagagcaaatgcaggcacagtacctgtgatgtaaatatttagtgaatgttagtcctgtgtgaaatgctcctctccccgcccttctcattccttcccaccacttcacgcttagccacagcgcagcattcttacttttctcctcctgctcagcttggagaattcagatgtcgatgagacaaaatggatcctactctcctggagattacagtctagcaggggaaatgtatattaagcaaatatcacacaaatagttgttaagttgtgataactgctgtgaaaggaacgtatagagtgctttgaaaatgccctggcatggtggctcacgcctcakcctcccagtgtgctgggattgcargagtgagccactttacccggccttagctggaaaacttgaagagttttgacaaatgtatacagtcatataactatcaccacaattgagatataaattgtttccttccttttcaaaagttccctagtatccctttgcagccggtccatttccccacccccagcctctggcaacctgattcctgtccatataattttgtattttgtagataccattctattcttatatggttggcttctctgctctggtataaaactttatttatttaaaatttctacatcttagtttggatacatagctctagactgtcatgatatttttaatcccaattctgwttttattttcttccctatctcataacatgcataaatttgatatgcattttagctgatcctccatgttattggggataaaaggccaaagataagagccaaggaggaaaaacccacaaaaattccttatttgacactagacaacattatcgaaggtgacatttattcattaatcattctcttttgatattgtgctttaatccactaaactttattattgktcagttcatacttatataggsatatgttggaggtattccaggttcagttccagaccaccagaataaagtgaaaatcactatatagcagccatcgacatcaaggcaagaccctgctggtgggtcttggaaaaagatgacaactcactgaagtgtctgatggttgttagcatgttttagcaataaagtatttttgattaaggtatgtacattgtttactagacataatgttattacacacttaatagactacagtatagtgtaaacataacatttttttttgagatggagtcttgctctgtcgcctaggctggagtgcagtggcacgatcttggctcaatgcaacctccacctcccaggttctagcacaggtgggcaccatcacaccctactaaaatacaaaaactagccgggcctggtggcacacacctgtagtttcagctacttgggagactgaggcaggagaatcacttgaacctgggaaatggaggctgcagtgagccgagatcgcgccactgcactccatcttgggcgwcagagcaagwcttcatctccaaaaaatatataaataaataaagtatgtgaaacttttaactgtatgtctggtatttttaaaaatttttattwkaaatttttatatatttacttatttttgagacttaactgggttatgagactggctaatttttgtatttttggtagaaacagggtttcaccatgttgtccaggctggtctcaaactcctgagctcaagcgatccatcgccttatgcctgtaatcccagcattttgagagtctgaggcaggcggatcacctgaggtcaggagtttgagaccatcctggccaacatggtgaatctctactaaatatacaaaaacttagccaggcatggtgtcatgcgcctgtagtcctaggtacttgggaggctgaggccaggcatgagaaccacttgaacccaggagtcagcggttgcagtgagccaagatggcaccactgcatgccagcctgggtgacagagtgagactttgcctcaaagcaaaaaaaaaaaaaaaaagggcggccgctctagaggatccctcgaggggcccaagcttacgcgtgcatgcgacgtcatagctmtctcccaatgngnagtttcn

SEQ ID NO: 1243 - DNA, 1364 bp, Homo sapiens
tcgacccacgcgtccggggatctggggtcaggcagcccggggggcttggagagacttccagaggaggcgcggactcggtagcgcggcgggcaaggcaggcgccatgaccctgattgaaggggtgggtgatgaggtgaccgtccttttctcggtgcttgcctgccttctggtgctggcccttgcctgggtctcaacgcacaccgctgagggcggggacccactgccccagccgtcagggaccccaacgccatcccagcccagcgcagcatggcagctaccgacagcatgagaggggaggccccaggggcagagacccccagcctgagacacagaggtcaagctgcacagccagagcccagcacggggttcacagcaacaccgccagccccggactccccgcaggagcccctcgtgctacggctgaaattcctcaatgattcagagcaggtggccagggcctggccccacgacaccattggctccttgaaaaggacccagtttcccggccgggaacagcaggtgcgactcatctaccaagggcagctgctaggcgacgacacccagaccctgggcagccttcacctccctcccaactgcgttctccactgccacgtgtccacgagagtcggtcccccaaatcccccctgcccgccggggtccgagcccggcccctccgggctggaaatcggcagcctgctgctgcccctgctgctcctgctgttgctgctgctctggtactgccagatccagtaccggcccttctttcccctgaccgccactctgggcctggccggcttcaccctgctcctcagtctcctggcctttgccatgtaccgcccgtagtgcctccgcgggcgcttggcagcgtcgccggcccctccggaccttgctccccgcgccgcggcgggagctgctgcctgcccaggcccgcctctccggcctgcctcttcccgctgccctggagcccagccctgcgccgcagaggactcccgggactggcggaggccccgccctgcgaccgccggggctcggggccacctcccggggctgctgaccctcagcccgcactgggagtgggctcctcggggtcgggcatctgctgtcgctgcctcggccccgggcagagccgggccgccccgggggcccgtcttagtgttctgccggaggacccagccgcctccaatccctgacagctccttgggctgagttggggacgccaggtcggtgggaggctggtgaaggggagcggggaggggcagaggagttccccggaacccgtgcagattaaagtaactgtgaagttttcaaaaaaaaaaaaaaaaaaaaaaaaaaaaaaaaaaaaaaaaaaaaaaaaaagggcggcc

SEQ ID NO: 1244 - DNA, 773 bp, Homo sapiens
  misc_feature (769)..(769): n equals a,t,g, or c
gcggccgctccaacatcagaggggccgcgatggagctggggragccgggcgctcggtagcgcggcgggcaaggcaggcgccatgaccctgattgaaggggtgggtgatgaggtgaccgtccttttctcggtgcttgcctgccttctggtgctggcccttgcctgggtctcaacgcacaccgctgagggcggggacccactgccccagccgtcagggaccccaacgccatcccagcccagcgcagcatggcagctaccgacagcatgagaggggaggccccaggggcagagacccccagcctgagacacagaggtcaagctgcacagccagagcccagcacggggttcacagcaacaccgccagccccggactccccgcaggagcccctcgtgctacggctgaaattcctcaatgattcagagcaggtggccagggcctggccccacgacaccattggctccttgaaaaggacccagtttcccggccgggaacagcaggtgcgactcatctaccaagggcagctgctaggcgacgacacccagaccctgggcagccttcacctccctcccaactgcgttctccactgccacgtgtccacgagartcggtcccccaaatcccccctgcccgccggggtccgagcccggcccctccgggctggaaatcggcarcctgctgttcccctgctgctcctgtgttgtgctgtctggtactgccagattcagtaccggcccttctttcccctgaacgcaatcttggctggccggttnaact

SEQ ID NO: 1245 - DNA, 736 bp, Homo sapiens
cgaggggtaccagctgaattactgcagtgggcagtgccctccccacctggctggcagcccaggcattgctgcctctttccattctgccgtcttcagcctcctcaaagccaacaatccttggcctgccagtacctcctgttgtgtccctactgcccgaaggcccctctctctcctctacctggatcataatggcaatgtggtcaagacggatgtgccagatatggtggtggaggcctgtggctgcagctagcaagaggacctggggctttggagtgaagagaccaagatgaagtttcccaggcacagggcatctgtgactggaggcatcagattcctgatccacaccccaacccaacaaccacctggcaatatgactcacttgacccctatgggacccaaatgggcactttcttgtctgagactctggcttattccaggttggctgatgtgttgggagatgggtaaagcgtttcttctaaaggggtctacccagaaagcatgatttcctgccctaagtcctgtgagaagatgtcagggactagggagggagggagggaaggcagagaaaaattacttagcctctcccaagatgagaaagtcctcaagtgargggaggaggaagcagatagatggtccagcaggcttgaagcagggtaagcaggctggcccasggtaagggctgttgargtaccttaagggaagtcaagaaggagatgggcaagcgctgaaggaagga

SEQ ID NO: 1246 - DNA, 272 bp, Homo sapiens
gcggccgccctttttttttttttttgtcagaaagatgatgtaatcacatgtcacacggcctctggaaaactccacaatacaattttaagataatgagaattcaaaaggcaaataacatgttagtattattatgaaaatagctttgactttgtggacacccctgaaaagggacctcccagaagcctacagagtacacttgaagaactgttgctctggaccatcaccctaacccktctttatgactcamatttgttgattttctttctcctttt

SEQ ID NO: 1247 - DNA, 791 bp, Homo sapiens
  misc_feature (789)..(789): n equals a,t,g, or c
tagatkccctttcaaaaagctatttaggtgacactatagaaggtacgcctgcaggtaccggtccggaattcccgggtcgacccacgcgtccggtccttgcttatgttttgggagacccagccatctaccaaagcctgaaggcacagaatgcttattctcgtcactgtcctttctatgtcagcattcagagttactggctgtcatttttcatggtgatgattttatttgtagctttcataacctgttgggaagaagttactactttggtacaggctatcaggataacttcctatatgaatgaaactatcttatattttcctttttcatcccactccagttatactgtgagatctaaaaaaatattcttatccaagctcattgtctgttttctcagtacctggttaccatttgtactacttcaggtaatcattgttttacttaaagttcagattccagcatatattgagatgaatattccctggttatactttgtcaatagttttctcattgctacagtgtattggtttaattgtcacaagcttaatttaaaagacattggattacctttggatccatttgtcaactggaagtgctgcttcattccacttacaattcctaatcttgagcaaattgaaaagcctatatcaataatgatttgttaatattattaattaaaagttacagctgtcataagatcataattttatgaacagaaagaactcaggacatattaaaaaataaactgaactaaaacaaaaaaaaaaaaaaaaaaaaaaaaaaagggcggcnac

SEQ ID NO: 1248 - DNA, 701 bp, Homo sapiens
cccacgcgtccggtccttgcttatgttttgggagacccagccatctaccaaagcctgaaggcacagaatgcttattctcgtcactgtcctttctatgtcagcattcagagttactggctgtcatttttcatggtgatgattttatttgtagctttcataacctgttgggaagaagttactactttggtacaggctatcaggataacttcctatatgaatgaaactatcttatattttcctttttcatcccactccagttatactgtgagatctaaaaaaatattcttatccaagctcattgtctgttttctcagtacctggttaccatttgtactacttcaggtaatcattgttttacttaaagttcagattccagcatatattgagatgaatattccctggttatactttgtcaatagttttctcattgctacagtgtattggtttaattgtcacaagcttaatttaaaagacattggattacctttggatccatttgtcaactggaagtgctgcttcattccacttacaattcctaatcttgagcaaattgaaaagcctatatcaataatgatttgttaatattattaattaaaagttacagctgtcataagatcataattttatgaacagaaagaactcaggacatattaaaaaataaactgaactaaaacaaaaaaaaaaaaaaaaaaaaaaaaaaa

SEQ ID NO: 1249 - DNA, 1594 bp, Homo sapiens
ccacgcgtccgaaataacataattgaaggcagtaaaagtgaaattaaataggaagatcatcagtcaaggaagacccactggagaggacagaaaatgaagcagtgttttatcatgtgtatttcagcaggtcttcttgaaatttaactaaaaatatgactgctctctcttcagagaactgctcttttcagtaccagttacgtcaaacaaaccagcccctagatgttaactatctgctattcttgatcatacttgggaaaatattattaaatatccttacactaggaatgagaagaaaaaacacctgtcaaaattttatggaatatttttgcatttcactagcattcgttgatcttttacttttggtaaacatttccattatattgtatttcagggattttgtacttttaagcattaggttcactaaataccacatctgcctatttactcaaattatttcctttacttatggctttttgcattatccagttttcctgacagcttgtatagattattgcctgaatttctctaaaacaaccaagctttcatttaagtgtcaaaaattattttatttctttacagtaattttaatttggatttcagtccttgcttatgttttgggagacccagccatctaccaaagcctgaaggcacagaatgcttattctcgtcactgtcctttctatgtcagcattcagagttactggctgtcatttttcatggtgatgattttatttgtagctttcataacctgttgggaagaagttactactttggtacaggctatcaggataacttcctatatgaatgaaactatcttatattttcctttttcatcccactccagttatactgtgagatctaaaaaaatattcttatccaagctcattgtctgttttctcagtacctggttaccatttgtactacttcaggtaatcattgttttacttaaagttcagattccagcatatattgagatgaatattccctggttatactttgtcaatagttttctcattgctacagtgtattggtttaattgtcacaagcttaatttaaaagacattggattacctttggatccatttgtcaactggaagtgctgcttcattccacttacaattcctaatcttgagcaaattgaaaagcctatatcaataatgatttgttaatattattaattaaaagttacagctgtcataagatcataattttatgaacagaaagaactcaggacatattaaaaaataaactgaactaaaacaacttttgccccctgactgatagcatttcagaatgtgtcttttgaagggctatgataccagttattaaatagtgttttattttaaaaacaaaataattccaagaagtttttatagttattcagggacactatattacaaatattactttgttattaacacaaaaagtgataagagttaacatttggctatactgatgtttgtgttactcaaaaaaactactggatgcaaactgttatgtaaatctgagatttcactgacaactttaagatatcaacctaaacatttttattaaatgttcaaatgaaagcaagaaaaaaaaaaaaaaaaaaaaa

SEQ ID NO: 1250 - DNA, 431 bp, Homo sapiens
cggcttctcgcggccatgagtatggatcggtatctggctattgttcacccaatgaagtcccgccttcgacgcacaatgcttgtagccaaagtcacctgcatcatcatttggctgctggcaggcttggccagtttgccagctataatccatcgaaatgtatttttcattgagaacaccaatattacagtttgtgctttccattatgagtcccaaaattcaacccttccgatagggctgggcctgaccaaaaatatactgggtttcctgtttccttttctgatcattcttacaagttatactcttatttggaaggccctaaagaaggcttatgaaattcagaagaacaaaccaagaaatgatgatatttttaagataattatggcaattgtgcttttctttctcctttcctggcttccctactacatgaagcc

SEQ ID NO: 1251 - DNA, 906 bp, Homo sapiens
  misc_feature (75)..(76): n equals a,t,g, or c
gatgattttatttgtagctttcataacctgttgggaagaagttactactttggtacaggctatcaggataacttnntatatgaatgaaactatcttatattttcctttttcattccactccagttatactgtgagatctaaaaaaatattcttatccaagctcattgtctgttttctcagtacctggttaccatttgtactacttcaggtaatcattgttttacttaaagttcagattccagcatatattgagatgaatattccctggttatactttgtcaatagttttctcattgctacagtgtattggtttaattgtcacaagcttaatttaaaagacattggattacctttggatccatttgtcaactggaagtgctgcttcattccacttacaattcctaatcttgagcaaattgaaaagcctatatcaataatgatttgttaatattattaattaaaagttacagctgtcataagatcataattttatgaacagaaagaactcaggacatattaaaaaataaactgaactaaaacaacttttgccccctgactgatagcatttcagaatgtgtcttttgaagggctatgataccagttattaaatagtgttttattttaaaaacaaaataattccaagaagtttttatagttattcagggacactatattacaaatattactttgttattaacacaaaaagtgataagagttaacatttggctatactgatgtttgtgttactcaaaaaaaactactggatgcaaactgttatgtaaatctgagatttcactgacaactttaagatatcaacctaaacatttttattaaatgttcaaatgaaagcaaaaaaaaaaaaaaaaaaaaaaaaaaaaaaaaaaaaaaaaaaaaaaaaaaaaaaaa

SEQ ID NO: 1252 - DNA, 1294 bp, Homo sapiens
ccacgcgtccgcggtaaccacctccttataaagggcagtagtaagaagctaatcaacaggaccgcgaaacgtgaaagtgcttcatgaactggaaagccaacgcagaccttagttattatattagatgttagctttagattctttctgtggaaacaaagatcctctctttttctaactgctctcctggacacctggtcatttgttgtggatgaacattagtacattacaggcactactcttcatctttgcacttaacacatcagcagccacaaaaggcattctgatgagagcttaaagattcaacaacaaatctcttgctgacagacccttctaagtttacaacccctgaaactgttcttctataatgacagaaaaaaaggctacagggagttctaaaaatgggattagaagtacctgcaatttttcacaagcttgtgacccatcaaaccttctggttcctaccaggatctgcactttcaaatcatgactcattaagttctcaatagagataaagagctaagatacaacaagtctaatttaaaaaatacatgtattagaactttggaaatgtgtgtgtcagacaaccagcttagattgactaaacgcagccagtctcttttcctttaaatcagaattaaaatgtcatacacagtaacgcaggcttcatagaaactttatggttctatggtttcttgggttaggggtttcttgaaataggcaaaacctcttcctggctccataatcccattttattggttgtttaactttagctgtggtacctttacatgcgttacttcatttaatcccccaaacagtgctatgaaataggcactatttttaccttcattatataaatggggaaattgctctaagggtttaaataactggcccaagaattcaaacccagacattctgattccagagcctctttttcaccaataaaggaactcagctgaagtaatgcagcatttcactaattcaaaccccgttattctggcattgacagtttaaaaaaaaacaagtctggctgaaatgagcttttgagatgtcaagtaaggctggatttgttaggaggttagaaaggttttagagctactaaagagatacaactattctcaaggaccttcaaatatctcagagcacccactctaaaagcaactgtcacttgtagtcccagcattttgggagactgaggtgggaggatggcttaaggccagaagttcaagaacagactgggcaacaaagcaatacctcaacttaaaaaaaaaaaaaaaaaaaaaaaaaaaaaaaaaaa

SEQ ID NO: 1253 - DNA, 1458 bp, Homo sapiens; identical to SEQ ID NO: 1161

SEQ ID NO: 1254 - DNA, 963 bp, Homo sapiens
ctcgagggtcatttttttttttttttttttttttttttttttttttttttttttttttcaagttgacatgtgtatttattgcacaaatatcccctagaactgggaggttattataatacaagtgtacatttgagaaatgtatacagaacaagaaacagctatgtacatatccaacatctaagtaacttagaaaaagcagaacaatctcataagacatctaccagaagtaggcattatgtaaaatctgtttttttaagtgatcatccccagagtatgccaattggaacaaaacaaaatctgtactagtatgtttttattgcacttaacattttcaaactcaaaattaagacatattaataaaagccagaaatatttaaaatcaaaccaattagtttatatacaagaaaaaattagttttaattctataatgtaaaagatcccttttttatttcctgtttcaataaacaggttttttttgatatgtaacaactgtctgtaccataacttgtaaaaattatttagaacaagccaaaactcttttcacattcatcataatgaccacactttaaagtagcagcagctcattccttgggctttgcgtaaggaaagaatgactatggtgaaggtaatagaaattatagaaggattaggaattacaaaactcacggaatgggaagcagtggggaagaacaaaacagtaactcaggaatcctataaggattaatgattctttaagaaactataggtcatttccttcccagcaaagcttarctttaggaacaacaatagcatgagccacccacttattgaggactagaatttytaaacggtaattaaacattttaaataaagaacagtttgatggttaaggasacacccagacattatccaagtgctatacagagctacaataaaaaaaaaaaaaaagtacaaggttggggacagtggctcacgcttgtaaac

SEQ ID NO: 1255 - DNA, 1613 bp, Homo sapiens
cacgagttaaattttcaatagttaatggaaagttgtctttgaccttgaatttacagcattgggtcacattttgccttgctgtgtatgtattcaagagacttccaactagacaaagaaaaaattgttgttttaatggaatgtaaacctgaaattggtgtgtctgcaatctgtttggcccatgaccttttacctagtcccagttattacctgagtctcccatggatgacttgctgccaaggagtgtttgtggatatattttctttggctaattttcttattctgtgcattaacaaaattatccagttgtctgattttggaattctatgagtcaatctttttggcagaattcagaatattaaaaagttcatacatttgcgggccattgtacctttttttttttttttttttttttgacggagtttcactcttgttacccaggctggagtgcaatggtgcgatctcagctcactgcaacctccgcctcccagttcaagtgattctcctgcctcagcccccaagtagctgggattacaagtgtgcgccaccacacccagctaattttttatttttagtagagatgagatttcaccatgtgttggtcaggctggtcttgaactcctgaactcaagtgatccacctgcctcgacctcccaaagtactgggattacaggcgtgagccactgtgcccagccttgtactttttttttttttttattgtagctctgtatagcacttggataatgtctgggtgtgtccttaaccatcaaactgttctttatttaaaatgtttaattaccgtttagaaattctagtcctcaataagtgggtggctcatgctattgttgttcctaaagctaagctttgctgggaaggaaatgacctatagtttcttaaagaatcattaatccttataggattcctgagttactgttttgttcctccccactgcttcccattcctgagttttgtaattcctaatccttctataatttctattaccttcaccatagtcattctttccttacgcaaagcccaaggaatgagctgctgctactttaaagtgtggtcattatgatgaatgtgaaaagagttttggcttgttctaaataatttttacaagttatggtacagacagttgttacatatcaaaaaaaacctgtttattgaaacaggaaataaaaaagggatcttttacattatagaattaaaactaattttttcttgtatataaactaattggtttgattttaaatatttctggcttttattaatatgtcttaattttgagtttgaaaatgttaagtgcaataaaaacatactagtacagattttgttttgttccaattggcatactctggggatgatcacttaaaaaaacagattttacataatgcctacttctggtagatgtcttatgagattgttctgctttttctaagttacttagatgttggatatgtacatagctgtttcttgttctgtatacatttctcaaatgtacacttgtattataataacctcccagttctaggggatatttgtgcaataaatacacatgtcaacttgaaaaaaaaaaaaaaaaaaaaaaaaaaaaaaaaaaaaaaaaaaaaaaa

SEQ ID NO: 1256 - DNA, 1508 bp, Homo sapiens
  misc_feature (6)..(6): n equals a,t,g, or c
  misc_feature (18)..(18): n equals a,t,g, or c
  misc_feature (41)..(41): n equals a,t,g, or c
  misc_feature (1506)..(1506): n equals a,t,g, or c
gtggangccgctcctganaactagtgggtcccccgggctgncaggattacggcacgagaaatgaatggcaaagaaatagaaggggaagaaattgaaatagtcttagccaagccaccagacaagaaaaggaaagagcgccaagctgctagacaggcctccagaagcactgcgtatgaagattattactaccaccctcctcctcgcatgccacctccaattagaggtcggggtcgtggtggggggagaggtggatatggctaccctccagattactacggctatgaagattactatgatgattactatggttatgattatcacgactatcgtggaggctatgaagatccctactacggctatgatgatggctatgcagtaagaggaagaggaggaggaaggggagggcgaggtgctccaccaccaccaagggggaggggagcaccacctccaagaggtagagctggctattcacagaggggggcacctttgggaccaccaagaggctctaggggtggcagagggggtcctgctcaacagcagagaggccgtggttcccgtggatctcggggcaatcgtgggggcaatgtaggaggcaagagaaaggcagatgggtacaaccagcctgattccaagcgtcgtcagaccaacaaccaacagaactggggttcccaacccatcgctcagcagccgcttcagcaaggtggtgactattctggtaactatggttacaataatgacaaccaggaattttatcaggatacttatgggcaacagtggaagtagacaagtaagggcttgaaaatgatactggcaagatacgattggctctagatctacattcttcaaaaaaaaaaattggcttaactgtttcatctttaagtagcattttgctgccatttgtattgggctgaagaaatcactattgtgtatatactcaagtctttttatttttcctcttttcataaatgctcttggacattattgggcttgcagagttcccttattctggggattacaatgcttttatcgtttcaggcttcattttagcttcaaaacaagctgggcacactgttaaatcatgattttgcagaacctttggttttggacagtttcatttttttggatttgggatagattacataggagtatggagtatgctgtaaataaaaatacaagctagtgctttgtcttagtagttttaagaaattaaagcaaacaaatttaagttttcttgtattgaaaataacctatgattgtatgttttgcattcctagaagtaggttaactgtgtttttaaattgttataacttcacacctttttgaaatctgccctacaaaatttgtttggcttaaacgtcaaaagccgtgacaatttgttctttgatgtgattgtatttccaatttcttgttcatgtaagatttcaataaaactaaaaaatctattcaaaacattaaaaaaaaaaaaaaaaaaaaaaaaaaaaaaaaaaaaaaaaaaaaaaaaaaaanaa

SEQ ID NO: 1257 - DNA, 622 bp, Homo sapiens
  misc_feature (9)..(9): n equals a,t,g, or c
  misc_feature (22)..(22): n equals a,t,g, or c
taaaaaaantgggctccctttnaaatctctaattaggaccttgcygccattgtattgggctgaagaaatcactattgkgtatatactcaagtctttttatttttcctcttttcataaatgctcttggacattattgggcttgcagagttcccttattctggggattacaatgcttttaycgtttcaggcttcattttagcttcaaaacaagctgggcacactgttaaatcatgattttgcagaacctttggttttggacagtttcatttttttggatttgggatagattacataggagtatggagtatgctgtaaataaaaatacaagctagtgctttgtcttagtagttttaagaaattaaagcaaacaaatttaagttttcttgtattgaaaataacctatgattgtatgttttgcattcctaraagtaggttaactgtgtttttaaattgttataacttcacaccttttgaaatctgccctacaaaattgtttggcttaaacgtcaaaaccgtgacaattkgtyctttgatgtgatkgtatttccaattyctkgtycatgtwagatttcaataaaactaaaaaatctattcaaaaaaaaaaaaaaaaaatgaccctcga

SEQ ID NO: 1258 - DNA, 1850 bp, Homo sapiens
  misc_feature (1)..(1): n equals a,t,g, or c
naaagcactggctgaaggaagccaagaggatcactgctgctccttttttctagaggaaatgtttgtctacgtggtaagatatgacctagcccttttaggtaagcgaactggtatgttagtaacgtgtacaaagtttaggttcagaccccgggagtcttgggcacgtgggtctcgggtcactggttttgactttagggctttgttacagatgtgtgaccaaggggaaaatgtgcatgacaacactagaggtatgggcgamrcsagaamgaagggaagttttggctgaagtaggagtcttggtgagattttgctctgatgcatggtgtgaactttctgagcctcttgtttttcctcagctgactccatattttcctacttgtggcagcgactgcatccgacataaaggaacagttgtgctctgcccacaaacaggcgtccctttccctctggataacaacaaaagcaagccgggaggctggctgcctctcctcctgctgtctctgctggtggccacatgggtgctggtggcarggatctatctaakgtggaggcacgaaaggatcaagaagacttccttttctaccaccacactactgccccccattaaggttcttgtggtttacccatctgaaatatgtttccatcacacaatttgttacttcactgaatttcttcaaaaccattgcagaagtgaggtcatccttgaaaagtggcagaaaaagaaaatagcagagatgggtccagtgcagtggcttgccaytcaaaagaaggcagcagacaaagtcgtcttccttctttccaatgacgtcaacagtgtgtgcgatggtacctgtggcaagagcgagggcagtcccagtgagaactctcaagacctcttcccccttgcctttaaccttttctgcagtgatctaagaagccagattcatctgcacaaatacgtggtggtctactttagagagattgatacaaaagacgattacaatgctctcagtgtctgccccaagtaccacctcatgaaggatgccactgctttctgtgcagaacttctccatgtcaagcagcaggtgtcagcaggaaaaagatcacaagcctgccacgatggctgctgctccttgtagcccacccatgagaagcaagagaccttaaaggcttcctatcccaccaattacagggaaaaaacgtgtgatgatcctgaagcttactatgcagcctacaaacagccttagtaattaaaacattttataccaataaaattttcaaatattgctaactaatgtagcattaactaacgattggaaactacatttacaacttcaaagctgttttatacatagaaatcaattacagttttaattgaaaactataaccattttgataatgcaacaataaagcatcttcagccaaacatctagtcttccatagaccatgcattgcagtgtacccagaactgtttagctaatattctatgtttaattaatgaatactaactctaagaacccctcactgattcactcaatagcatcttaagtgaaaaaccttctattacatgcaaaaaatcattgtttttaagataacaaaagtagggaataaacaagctgaacccacttttactggaccaaatgatctattatatgtgtaaccacttgtatgatttggtatttgcataagaccttccctctacaaactagattcatatcttgattcttgtacaggtgccttttaacatgaacaacaaaatacccacaaacttgtctacttttgcctaaagttacctattagaggtcactgtcagagttctcagtttcttagttactatttaacttttcatgttcaaaatgaaaataattctt

SEQ ID NO: 1259 - DNA, 443 bp, Homo sapiens
aaatcaaggaatggagttaaycctgtgaagtctcggaacttgcaattgtgggctttttyccttccctgagggtctggtagaactgacacggactctcagttctgtaattggactgggcgctcatgtagttagaaataacctatgtacttgttacagcagaagagttgtaatggagtataaagagctgaccctcgactcccctttttttcattgatagttaagattgccagattcccaaaaggtagcatcaagtggaacaattcaagatagtatcatttgttgtatacacataagtaaacatttaaggcaacaaaacaaaacaaaacacacttatggtaacccattctgttgaggagtccaaaactcgaataaagcgcctcattgcctttaactggttctgtggcagtgagatcatcatccttatgctggctcacctagtgtct

SEQ ID NO: 1260 - DNA, 550 bp, Homo sapiens
  misc_feature (115)..(115): n equals a,t,g, or c
  misc_feature (132)..(132): n equals a,t,g, or c
  misc_feature (546)..(546): n equals a,t,g, or c
gggctgcaggaattcggcacgagctcgtgccgaattcggcacgagccctgttcctaccagagctgtgctgttggaaggcaagtacgaaaaaaawaaaaaaaaaactcgactcgtnccgaattcggcacgagnacatgtatacatatgtaacaaacctgcatgttgttcacatgtaccctagaacttaaagtatattaaaaaaaacagagtgctgaacccatctttttaaacatctttaaaaaaatagttatgttgcctgtggagttttagaacttaatgtaatgaaagtactatctttctatgaaccttacagtttgtttttgttgtcatttttaccattatttgataaaggtaagtagacaaatagataacacattcatattggactattcattaagaggtctaagaagaaaggtactcttaaattcacaagtggggactacaaagcaatatgaaaatgatcaggatttccgttttaatgaaataatggaatcacatttaaaacattattttatttttttccaattaaaaaaaaaaaaaaaaaantcga

SEQ ID NO: 1261 - DNA, 1762 bp, Homo sapiens
  misc_feature (1003)..(1003): n equals a,t,g, or c
  misc_feature (1128)..(1128): n equals a,t,g, or c
gggctgcaggaattggctccaccttacttattattattgccgtgttaggctatatctattcaattcagactacagagtgggcgattttaatctatggactggtgatgatcttctttttatacatgtatgtttgcttcgcgtcggcggtttatatcccggagctttggccaacgcatttacgcctgcgcggttcgggtttcgttaatgccgtcggacggatcgtcgcagtcttcacgccctatggcgttgcggcattattaacacattatgggtcgatcacggtgtttatggtacttggtgttatgttattgctctgtgcgctggttctctccatttttggcatcgaaacgcggaaggtgtcgttggaagagatttctgaggtgaattaaatctttcgttgatggcatcaattgccagatgtgccactgacgtgttttatttggcctacaatgccagtacagaattgtaggccagcgtaaaattacccctgtgtctcttcccagtctgccagcgtatatagcgttgccccagctgctgacatctccataaacgcgtgcgcactgtcctggggctggatattcacgccacgacaaccatcggtaatcacgtttaccttataacctaactgtaacgcgtccagcacggtaaacttcacgcaatagtcagtagccaggcccataacgatcaattcatcgatttcatgatcgcgtaaccagtcatcgagagaggttttctgccgacggccgttatcaaaaaaggcactgtaactgtcaactaaaggattttcgcctttatggaacaccgctgcgatcgctttttggtgcagtaacggatgtaattgtgcgccttcactgttctgcacacagtgatctggccagaaggtttgtggcaaaccgtcsagttggcctggcgtataaggctctacaccgtgctgactggcaaaactgccgtgattcgccgggtgccagtcctgactggcgataccgyttaccgsgcgactggnaccagtcaatcaggcggttagcgacatccaccgtactgtcaccttccggcacggcgagcgcgccaccagcacagaaatcattttgtaaatcgaccagtaacagggcgcgagggggcattacagtntccttaatcatccggcgtaagttcgccgcgcaggttttggcycatggccttgcgaatggtttcagtatccagttcctggctaagcaggtaatgcagtttggttagcktggcttctacagtcatatctgcaccgccaattacgccggcatgggcgagggcgttaccggtggcataaccacccatgttcactttaccggacatacattgtgtcaggttgaccaccacaataccgcgatcgctggcttcttgtaattcctgcaggaaggctttgttttgtggcgcattacccacgccataggagcgcagaatcaatgctttcaccggttggcgcagaaaattgcgcacgacgtcagcagaaatccctggataaatcgtcactacgccaattggttgtggggtgattggatgaacgattaattccccttcaccgtgcggggcgggtggcgtattcaaacgacgaatatggatacctgcttccagtaacggaggaaggtttggagaggcaaacgcatcaaaaccatcggcatgggctttggtagtgcggttgccgcgatacaatcggttattgaaaaagagcgttacttcgttgatcggataattcgccgcaacgtacaacgcattcagcagattaatt

SEQ ID NO: 1262 - DNA, 608 bp, Homo sapiens
  misc_feature (8)..(8): n equals a,t,g, or c
  misc_feature (14)..(14): n equals a,t,g, or c
  misc_feature (17)..(17): n equals a,t,g, or c
  misc_feature (35)..(35): n equals a,t,g, or c
ccagcggnattgtnccntttcacaatgaccggttnccgagattctcggcatgaacgacagcgcagaggcggtatacgccatcgtgtcgggtgccgtgcagaatgacaaaccatcattagtcgtcatagtgcgctttaatatcttcagcaatatgctgccagtcttccggcgtcatatctgaagatccatcagcggcgtatattcatgaatggtgaaatctggcatctccgggcgatggaattccggttttaccgccgaagccgaccaactggagttactgtcgcgtagtaaaaccgtcaccgtgcctaaggtttgggcagttggcgctgaccgtgactacagttttctggtgatggattatctcccacctcgtccgctggatgcgcatagcgcatttattcttggtcagcaaattgcgcgtttacatcaatggagcgaccaaccacaatttggccttgatttcgataacgcgctctccacaactccacagcccaacacctggcaacgtcgctggtcaacgttttttgctgaacaacggattggctggcagttggaactggctgcagaaaaagggatcgctttcggcaatatcgacgccatcgtcgagg

SEQ ID NO: 1263 - DNA, 621 bp, Homo sapiens
gtctctactaaaaatacaaaatttagctgggtgtggttgcgcgtgcctttagtcccagctactcgggaggctgaggcaggagaatcgcttgaacccaggrggtggaagttggcagtgagccaagatcacgccactgtactccasccyggccgacagagcgagactctgtctcaaaaaagaaaggttttctaaactaatggttaaaacagaattttcttgtaaatagggaagttggagcattctggttaattgagattttgctctgtattgacacagctcgcaccagtttggttcaggagctacctccttgtcattgaattgacgagttacaatgtttggtattcggatacattcagcaagaacacttgaaaactcctcaccaactatttttaaaggcttactttgtttttgtttttattttttcactggctattttggataagaggatgtttacatcttaatgtaaaaaaatgaaaacaggtataaatgttttatgtatagaaatgttttctttcattatttggtgcctgtatctccgtgtttatatcatttccccacctgtatcatgctgccaaaaaaagaactttgaatttagaaaaagaattggtgtaaagcccgggc

SEQ ID NO: 1264 - DNA, 1046 bp, Homo sapiens
  misc_feature (1)..(2): n equals a,t,g, or c
  misc_feature (16)..(16): n equals a,t,g, or c
  misc_feature (435)..(435): n equals a,t,g, or c
  misc_feature (487)..(487): n equals a,t,g, or c
nngtcaacatagtgcnaacttgtctctactaaaaataccacaaaaataagctgggcgtggtggcaggcgcctatagtaccagctgcttgggaggctgaggcagaagaatcactttaggcctccatggtgtatgatcttctgtttctattgcacttctaagagcaagcctgagtttacctcctcactctaagggggaggacacagaggtgatcagatggtaatggcttagccagttcacatagctaagcacacacaaccctgatctagtgcagggctcttcgcactagcatggaactagtgaaggtgaccagtgttatattcagggaatatgactgttcttggtaaagccaaggagttgaggggttctgaaattggtgagtccaggcctgctgctggagtattttatcctaataggtgtattttattttaatttanataattcctaaatackgcttttkgattaaggtgtaccatgagagcgaagatnccctcttttatatactargataattgcaatatttgcttgcttttttcagtckgtatttgaaatatatttacattaatacctggcctcttycccaaaagcacttgaagcagcataccaagaaaagacatatacagccatgttaatgaaatatgaacagaaagggaagaaaaacaaatgaaaattgaagggagggtttacatacattattgtatgtaaaatttgactctggaactttctggaaatcaaggctaagggtagggaaagaagttatgcactgccctatcaggtgaaaagcataccagttccttaggggagagcctttcctgatgccttctagtaaaggtgttctcactgggggtcctgtgaagtgctaaaatgaacagaattctcgattttcacacatttacatgttatgattgtgccttggatccttaccttgtaccagctttcaaaggcttccatttcaggatttggggggatttgtgtaggtgtggttaataaaggattttgttttcataggtaagaatcctaaaaaaaaaaaaaaaaaatgaccctcgag

SEQ ID NO: 1265 - DNA, 496 bp, Homo sapiens
  misc_feature (109)..(109): n equals a,t,g, or c
  misc_feature (371)..(371): n equals a,t,g, or c
  misc_feature (478)..(478): n equals a,t,g, or c
  misc_feature (492)..(492): n equals a,t,g, or c
tctagggaaactcccattaaggagttagcagggttgctcccttctaagggctctgacggaaggatccacgccaggcctttctgcctggagtgtgggtggctgtcttctntgtctgttcacatagagtccctgagtgtgccttggcatggaaattacccctttgtataggacaccagtcatactggattagggcctgcccttgcgacctcatcttaactaattccatctgcaatgaccctatttccagacaaggwcacawgctgaggtactgggggttagacttcacataaaaatttagggaaaatacagttcaaccatagcaacatctttgtccccaactagactataagctcctgggtcaagagagcctnagtaagtgctggacaagtgggttcggtaacaaagagaaggaagggaactgaataaggtcttgtcaggagacacctgtggagggccttggcgtgggtcttaccccagnaatagtcccttagncttg

SEQ ID NO: 1266 - DNA, 1301 bp, Homo sapiens
  misc_feature (1252)..(1252): n equals a,t,g, or c
  misc_feature (1265)..(1265): n equals a,t,g, or c
  misc_feature (1273)..(1273): n equals a,t,g, or c
  misc_feature (1299)..(1299): n equals a,t,g, or c
  misc_feature (1301)..(1301): n equals a,t,g, or c
tcgagggtcattttttttttttttttttatcatgaacaaagcatagggggcagtgctgagtgcggaaagtagtcttggcctcttggtctctccatcgaaagctggcactaggtgtgcaaggaccacagtaaattctatgcctggatatagacatgtttgggaatcctcccacttctggggcaagcagagtccattgcagagcaaggtgtttgggagattcctctctgaccagctcctgcagcctgccctcctcctctgggacgtgcgtccacggcttcaaggccctgcgtggtgtgggaggggcatgaaggcatgcgctccattatgctgaggacagcgagtctgagggaagatgaactgctggctgaagagctcggcatggtaaaagcactcaacaggaggtcaggacacctgagattttgtcccagctctgtcactcacagggttgtcaccctgtcaccaaaaggagacaactcactcagtctcttgcctccgcttccttacctataatgttggaggtggatgatatcatctctgtttcctcctcaggttcccccagaacctgggtgaactgtcctcaggggccccaccttggccccccgcctgaggctgtcagccagcgtgaccagtgtggcttcccaggagaccacccccagagaaggtaataaatgccatggctgggagaaaagagctgtcctgttcctaaaatggatgtccccattgtaaatcactaagctaggagtcttccttamatcctttatctgkctttttgagccctgccagttccgggkcatgamaaggctkagggactattgctggggtaagaccamgccaggccctccacaggtgtctcctgacaagaccttattcagttcccttccttctctttgttaccgaacccacttgtccagcacttactgaggctctcttgacccaggagcttatagtctagttggggacaaagatgttgctatggttgaactgtattttccctaaatttttatgtgaagtctaacccccagtacctcagcatgtgaccttgtctggaaatagggtcattgcagatggaattagttaagatgaggtcgcaagggcaggccctaatccagtatgactggtgtcctatacaaaggggtaatttccatgccaaggcacactcagggactctatgtgaagagacagagaagacagccacccacactccaggcagagaggcctggcgtggatccttccgtcagagcccttagaaggnagcaacccggcangctcccgnagcattcctttaagtcggggggcatngn

SEQ ID NO: 1267 - DNA, 763 bp, Homo sapiens
  misc_feature (759)..(759): n equals a,t,g, or c
gctgctccaccgtcctactgcgccgagcttctgtgcgctgggaggctgggctcctaatcccgacacatactgtcttctccttgtaagtgcggtggttggggaagtggctgtgctgtggcaccctggaaaccctgcccatatccgcatgcgccgagacttgacccacagcagatctcagtcttggcagaatgcctgcctgtggctctccttgaacacaacagcacgggacaattgcaaagagctgctacaagggcatttctcactcgtttccttacatataccaaggaggccgtcctgagacagctgctcgtctccttgggttctgatgagatatgaggccttttgcctcacccctcaagatgctgctgcaggccataaagctgcttagctgcagagggcgttggctcctctacaataggcatcctgtcattggtgcttctgacatgtggccccttttactctggtgtcaccctgcacaagggccgcaggaccttgcacttttggctcctcctcctctcactccacacaggtggtgaatggagtctgaaaaggcttarctgtttctttaccagctgaatcctctgtcaggcttggccttgccttgtgcttggcagttgccaagtamacgtctttgctggttccctaaggctgctgaaacaaagtgccataaartgggtggctttcacaatagacgttaaygkctcamagttctggaagctagaatctkaraacaaagtgccacaagggttgctccttctnaagg

SEQ ID NO: 1268 - DNA, 1791 bp, Homo sapiens
  misc_feature (24)..(24): n equals a,t,g, or c
aattcggcacagttcaggcgccanagctggccgatcggcgttggccgccgacatgacgcccgaggacccagaggaaacccagccgcttctggggcctcctggcggcargtctacatctccgaaatcrcctacccagcagtccgggggttgctcggctcctgtgtgcagctaatggtcgtcgtcggcatcctcctggcctacctggcagagctttcacctggccctgctgcggcagcccggcatctacaagcccttcatcatcggcgtctccctgatggccttccagcagctgtcgggggtcaacgccgtcatgttctatgcagagaccatctttgaagaggccaagttcaaggacagcagcctggcctcggtcgtcgtgggtgtcatccaggtgctgttcacagctgtggcggctctcatcatggacagagcagggcggaggctgctcctggtcttgtcaggtgtggtcatggtgttcagcacgagtgccttcggcgcctacttcaagctgacccagggtggccctggcaactcctcgcacgtggccatctcggcgcctgtctctgcacagcctgttgatgccagcgtggggctggcctggctggccgtgggcagcatgtgcctcttcatcgccggctttgcggtgggctgggggcccatcccctggctcctcatgtcagagatcttccctctgcatgtcaagggcgtggcgacaggcatctgcgtcctcaccaactggctcatggcctttctcgtgaccaaggagttcagcagcctcatggaggtcctcaggccctatggagccttctggcttgcctccgctttctgcatcttcagtgtccttttcactttgttctgtgtccctgaaactaaaggaaagactctggaacaaatcacagcccattttgaggggcgatgacagccactcactaggggatggagcaagcctgtgactccaagctgggcccaagcccagagcccctgcctgccccaggggagccagaatccagccccttggagccttggtctgcagggtccctccttcctgtcatgctccctccagcccatgacccggggctaggaggctcactgcctcctgttccagctcctgctgctgctctgaggactcaggaacaccttcgagctttgcagacctgcggtcagccctccatgcgcaagactaaagcagcggaagaggaggtgggcctctaggatctttgtcttctggctggaggtgcttttggaggttgggtgctgggcattcagtcgctcctctcacgcggctgccttatcgggaaggaaatttgtttgccaaataaagactgacacagaaaatcaggtcagtgtctctgggctttgtgcaagctcagtttgaaaagggtttattcccwtcactgcccaggacaccctgtggctttacttgctcatggtcagccaagcttacccttcacactgagaagtcatttctggctacttccttgggctcagttccctgggtcatcagccatcaaatcttgttgagtttaaaaaataamcagcaaaaaaaaaaaaaacaaaaaaaaacaccttttgttctgttgactttaatggagccagaagtcttttataattttattattaattagctaatatgtgttcattgtagggaaattaaaaaagatttaatatcatttttatagctgttaaccagctgctaggcactgtcctaagcactttacaaatattaactcatttatttggataaacaatgataaaactatttacagccacccctttccagagataacatct

SEQ ID NO: 1269 - DNA, 1425 bp, Homo sapiens
  misc_feature (1328)..(1328): n equals a,t,g, or c
  misc_feature (1422)..(1422): n equals a,t,g, or c
cggacgcgtgggctggccgcgcggatcagcttccagcccagtcggcccggcccgggggccatggagctccgagcggcggatcgcgagcctcctgcgaaccccagcctgcacgcccggttagcattcggccgggagatgcggcagtggaatctggaagggcggtgaaaaacctacgtcctgccctcgcccggcctctccattcgtcccccgggtagagaggtgcccggctcccaccccttcccagccccagccctggagacagcagcccctagactactgagggacagcgacagcatgaaggctccgggtcggctcgtgctcatcatcctgtgctccgtggtcttctctgccgtctacatcctcctgtgctgctgggccggcctgcccctctgcctggccacctgcctggaccaccacttccccacaggctccaggcccactgtgccgggacccctgcacttcagtggatatagcagtgtgccagatgggaagccgctggtccgcgagccctgccgcagctgtgccgtggtgtccagctccggccaaatgctgggctcaggcctgggtgctgagatcgacagtgccgagtgcgtgttccgcatgaaccaggcgcccaccgtgggctttgaggcggatgtgggccagcgcagcaccctgcgtgtcgtctcacacacaagcgtgccgctgctgctgcgcaactattcacactacttccagaaggcccgagacacgctctacatggtgtggggccagggcaggcacatggaccgggtgctcggcggccgcacctaccgcacgctgctgcagctcaccaggatgtaccccggcctgcaggtgtacaccttcacggagcgcatgatggcctactgcgaccagatcttccaggacgagacgggcaagaaccggaggcagtcgggctccttcctcagcaccggctggttcaccatgatcctcgcgctggagctgtgtgaggagatcgtggtctatgggatggtcagcgacagctactgcagggagaagagccacccctcagtgccttaccactactttgagaagggccggctagatgagtgtcagatgtacctggcacacgagcaggcgccccgaagcgcccaccgcttcatcactgagaaggcggtcttctcccgctgggccaagaagaggcccatcgtgttcgcccatccgtcctggaggactgagtagcttccgtcgtcctgccagccgccatgccgttgcgaggcctccgggatgtcccatcccaagccatcacactccacaaaaacatttaatttatggkatcctgcctyctgccamgtgctgggtgggancttaaggttccttcccaccccattgtgggcgacatttggagccattttcaggcttccattccctgagtaattcatgggcattttgggggttcancca

SEQ ID NO: 1270 - DNA, 2602 bp, Homo sapiens
  misc_feature (25)..(25): n equals a,t,g, or c
  misc_feature (2425)..(2425): n equals a,t,g, or c
  misc_feature (2490)..(2490): n equals a,t,g, or c
  misc_feature (2534)..(2534): n equals a,t,g, or c
  misc_feature (2548)..(2548): n equals a,t,g, or c
  misc_feature (2581)..(2581): n equals a,t,g, or c
ccttggaaaccttcatcgatgatgnttgagatgtgtataagagacagaaggccaagtagtggggtgcccacgtgcaagaggagagacaggagagggcctttccctggcctttctgtcttcgttgatgttcacttccaggaacggtctcgtgggctgctaagggcagttcctctgatatcctcacagcaagcacagctctctttcaggctttccatggagtacaatatatgaactcacactttgtctcctctgttgcttctgtttctgacgcagtctgtgctctcacatggtagtgtggtgacagtccccgagggctgacgtccttacggtggcgtgaccagatctacaggagagagactgagaggaagaaggcagtgctggaggtgcaggtggcatgtagaggggccaggccgagcatcccaggcaagcatccttctgcccgggtattaataggaagccccatgccgggcggctcagccgatgaagcagcagccgactgagctgagcccagcaggtcatctgctccagcctgtcctctcgtcagccttcctcttccagaagctgttggagagacattcaggagagagcaagccccttgtcatgtttctgtctctgttcatatcctaaagatagacttctcctgcaccgccagggaagggtagcacgtgcagctctcaccgcaggatggggcctagaatcaggcttgccttggaggcctgacagtgatctgacatccactaagcaaatttatttaaattcatgggaaatcacttcctgccccaaactgagacattgcattttgtgagctcttggtctgatttggagaaaggactgttacccatttttttggtgtgtttatggaagtgcatgtagagcgtcctgccctttgaaatcagactgggtgtgtgtcttccctggacatcactgcctctccagggcattctcaggcccgggggtctccttccctcaggcagctccagtggtgggttctgaagggtgctttcaaaacggggcacatctggctgggaagtcacatggactcttccagggagagagaccagctgaggcgtctctctctgaggttgtgttgggtctaagcgggtgtgtgctgggctccaaggaggaggagcttgctgggaaaagacaggagaagtactgactcaactgcactgaccatgttgtcataattagaataaagaagaagtggtcggaaatgcacattcctggataggaatcacagctcaccccaggatctcacaggtagtctcctgagtagttgacggctagcggggagctagttccgccgcatagttatagtgttgatgtgtgaacgctgacctgtcctgtgtgctaagagctatgcagcttagctgaggcgcctagattactagatgtgctgtatcacggggaatgaggtgggggtgcttattttttaatgaactaatcagagcctcttgagaaattgttactcattgaactggagcatcaagacatctcatggaagtggatacggagtgatttggtgtccatgcttttcactctgaggacatttaatcggagaacctcctggggaattttgtgggagacacttgggaacaaaacagacaccctgggaatgcagttgcaagcacagatgctgccaccagtgtctctgaccaccctggtgtgactgctgactgccagcgtggtacctcccatgctgcaggcctccatctaaatgagacaacaaagcacaatgttcactgtttacaaccaagacaactgcgtgggtccaaacactcctcttcctccaggtcatttgttttgcatttttaatgtctttattttttgtaatgaaaaagcacactaagctgcccctggaatcgggtgcagctgaataggcacccaaaagtccgtgactaaatttcgtttgtctttttgatagcaaattatgttaagagacagtgatggctagggctcaacaattttgtattcccatgtttgtgtgagacagagtttgttttcccttgaacttggttagaattgtgctactgtgaacgctgatcctgcatatggaagtcccrcttcggtgacatttcctggccattcttgtttccattgtgtggatggtgggttgtgcccacttcctggagtgagacagctcctggtgtgtagaattcccggagcgtccgtggttcagagtaaacttgaagcagatctgtgcatgcttttcctctgcaacaattggctcgtttctcttttttgttctcttttgataggatcctgtttcctatgtgtgcaaaataaaaataaatttgggcaaaaaaaaaaaaaaaaaaagggcggccgcyctagrggatccaagcttacgtacgcgtgcatgcgacgtcatagctcttctatagtgtcacctaaattcaattcactggccgtcgttttacaacgncgtgactgggaaaaccctggcgttacccaacttaatcgccttgcagcacatccccctttcgccanctggcgtaatagcgaagaggcccgcaccgatcgcccttcccaanagttgcgcacctgnaatggcgaatggggacgcgccctgtaacggcgnattaaacgcggcgggtgtggg

SEQ ID NO: 1271 - DNA, 911 bp, Homo sapiens
gtagcttaaattaattcatctttttcaatttctttgctgagttacttcaacttttctcagcttcctctgttttttccccccctttggtccatttttgttttgagatttaaatttctaatttcacgttaatttttatttctgcaaaggcctatttaattcatactagatattggwagttttcttctgcctgtggttgagaattttcatcagctgtaattgattctcattttttcttctagtagtttttatggatgttatcttcctttttctgctcatattaaaaggttttattttccttgtcttgcaaaaccagttggttctctgcaggcagggacaaggggtttgtgtggccgagttccttgattcaggaatgttctgttgatagagttaaatggtaccagttaagtgctggcagtacatgtgcgagccaccatacctggtctgtcttttcctttctactgccactctaggaccctgctgccccacgtctttaccctctagtttccacctgactctcagccctcacgagggttctgacgctggctctagtgtcagatgtgcttttctctgcctccacgtaaattgaagttttttggccaagcgtggtggctcaatcctgtaatcctagcaactttgggagactgagggggacaggatcgtttaagcccaggagttcaagaccagcctgggcaacatagggagacctcgtctctacacaaagtaaaaaaaattacccaggcatggtgacaggtgcctgtagtcccagctactcgggaggctgaggtgggaagatcgcctgagcctgggaagtcgaggctgcagtgagtcccgatcatgccactgcactccagcctgggtggcagagcaagaccttgtctcaaaaaaaaaaaaaaaaaaaaaagggcggccgc

SEQ ID NO: 1272 - DNA, 615 bp, Homo sapiens
ccacgcgtccggatggatgctggccgcagaagcagcctgaagagagaaggagctgaggccatttaacctagacagcaggtgacctgacctcctgaactgaggggtaggcaagagcttggctggaagtccagccagccctaccagttccatgggggcctgttcctatgatggtgaaggtatggcttgagtggctgatgcttttattattgcctctgggtaagatgcctctgtgtgccagggcagtgggggagtggggatgagacctgtccacccctttctccattaatgttgatactccaagggccagaccaggaccaattccagaagtccccagggacacctgcctggcctatgtgtaaggagtgatgttttggttggtgagagtctttgcaagcctggagatgaacacatcagagggtggcgggggaggagagtgggatgcaggcttggggctgagagatgggcatgtggatttatcaggttccttcaaaccttgagatcctgtgattgacatccctaacatgacaccctaaaacagtaaaaaaaaaaaaaaaaaaaaaaaaaaaaaaaaaaaaaaaaaaaaaaaaaaaaaaaaaaaaaaaaaaaaaaaaaaaa

SEQ ID NO: 1273 - DNA, 901 bp, Homo sapiens
gtagcttaaattaattcatctttttcaatttctttgctgagttacttcaacttttctcagcttcctctgttttttccccccctttggtccatttttgttttgagatttaaatttctaatttcacgttaatttttatttctgcaaaggcctatttaattcatactagatattggtagttttcttctgcctgtggttgagaattttcatcagctgtaattgattctcattttttcttctagtagtttttatggatgttatcttcctttttctgctcatattaaaaggttttattttccttgtcttgcaaaaccagttggttctctgcaggcagggacaaggggtttgtgtggccgagttccttgattcaggaatgttctgttgatagagttaaatggtaccagttaagtgctggcagtacatgtgcgagccaccatacctggtctgtcttttcctttctactgccactctaggaccctgctgccccacgtctttaccctctagtttccacctgactctcagccctcacgagggttctgacgctggctctagtgtcagatgtgcttttctctgcctccacgtaaattgaagttttttggccaagcgtggtggctcaatcctgtaatcctagcaactttgggagactgagggggacaggatcgtttaagcccaggagttcaagaccagcctgggcaacatagggagacctcgtctctacacaaagtaaaaaaaattacccaggcatggtgacaggtgcctgtagtcccagctactcgggaggctgaggtgggaagatcgcctgagcctgggaagtcgaggctgcagtgagtcccgatcatgccactgcactccagcctgggtggcagagcaagaccttgtctcaaaaaaaaaaaaaaaaaaaaaa

SEQ ID NO: 1274 - DNA, 1927 bp, Homo sapiens
  misc_feature (589)..(589): n equals a,t,g, or c
ggatagttttattggcatttccagtaagaatatttgaaagcctctgtctgaaattacaaagcttaatttttttgttttacaagattcctcaacctctactttttactctatactagtttcaaattggtttataaatagaacttaatgtttaatggctataattttgttattggcaaatattaaagtgttgttagctctacctaatcgtgatcaagctcttctttcacatttgtttcactttagtttcttaccattttggctatgtacccagaattctttaggtatgcatgaactgtttcagtaatgctcatcccctcttctcaatttaagttgaaaaagcaattttctccatttttaaagtacgttaaactggagcccagactcccccctgtgtagtgagttcataactctcattaaattaatctgcatttttatttttcacatccctctgcctccactcagaccaaccagggtcaaggagggccagggaattgggttctggattctcaagaccttgtagactccaaagagatggaaagactgtgaagcacaagaaagagaaaccagaacatccactggagaacttggnaagagccagaacaacattgttcatcgaagagatccctgtcatcctctagctcgggcaaagggagggacaatccccatattaacaatgagcagcatgaaaggaaacggtccactcaggagaggcctcggagacctctgcttcccacgatcagtggtgaagtgtttctgagcactgaatgtgatgactgggagactaagattaaccatcagactcgaaattgggaaaaacagtctcgacaccaagatcgactttcacccaagtcctcacaaaaagcagggcttcactgcaaggaagttgtatatgggagggaccatgggcaaggtgagcacagaaaaaggagacacaggcccaggactcctccattctcagagagtgaggagcagctccacctccatgacgcaggtagaatgaagccaagagtgaygaaagaagctgtatctactccatcacgaatggcccacagggatcaggaatggtatgatgctgaaattgccagaaaactgcaagaagaagaacttttggctacccaggtggacatgagagccgctcaagtagctcaagatgaagaaatcgctcgacttctaatggctgaagaaaagaaagcttacaaaaaagccaaggagcgggagaaatcatctttggacaaaagaaagcaagaccccgagtggaagccaaaaacagctaaagcagcaaattcmaagtcaaaagagagtgatgaacctcaccattctaagaatgaaaggccagcacggccaccaccacctatcatgacagatggtgaagatgcggattacactcattttacaaaccagcagagttccacacggcatttctcaaaatcagagtcctctcataaaggttttcattacaaacattaaaaacctaggaatctgccttgaaaatggactcactatagcaaatattactgggtgatacagaatgaattctacacttactttttttctcctgtgtttgcattcctgggatttatcctcaagtgcatttctgaccataagtaattttaattcatttcaaatgttttggttattcatgatcacttgggcagtataagaaaatgtagcttctgaatattggccacctctatgctgcatatacttcttgggatatagtatctaagacctttgtaaactgccattttgttaggtatggagtttggtatctagggagtaggccttatttagcaattcaaattttatggagatgaatgatcaaagtgaaacaatgtttggatgcaacgcagaataaaagaatataagaaataaaaaaaaaaaaaaaaaaaaaaaaaaaaaaaaaacaaaaaaaaaaaaaaaaaaaaaa

SEQ ID NO: 1275 - DNA, 838 bp, Homo sapiens
ccacgcgtccgattctacacttcccttcccctgactcttttttttttttttttttcttttcgagacggagtctctctttgtcacccatgctggagtgcagtggcataatctcaactcactacaacctctgcctcctgggtcaagagattctcctgcctcagcctcccaagtagccgggattacaggcatgtgccaccacgtctggctaattttttttttatttttagtagagatggaatttcaccatgttagccaggctggtctcaaactcctgagctcaagtgatccacccgccttggcttcccaaagtgctgggactacaggcatgagccaccatgcccggctgcttcccctgacatttgatgatgaagtgtgacaaaaaaggtgtcacactgtacaccttttgatattgtggatttgttaacaaattattgtaggtatagatatttttagtacttttgttttttaacttttatatagatttaaatgttttacacaccaccattacaataaaagaatattctgaattttactatattcctacaccttatggggtgttttatgtttctttgtatgttttcatactattaattaacatccttttgtttccattttaagcacttcctttagcatttctagtaaagcaggtctaatgttgatgaactctgtcatcctttgtgttggaaacagggtttggctgtgtctaaactgcattaccgcgttgtaaaatatagctgtacaaatataagaataaaatgttgaaaagtcaaaaaaaaaaaaaaaaaaaaaaaaaaaaaaaaaaaaaaaaaaaaaaaaaaaaaaaaaaaaaaaaaaaaaa

SEQ ID NO: 1276 - DNA, 1221 bp, Homo sapiens
gaaattgtgaagatttcatggacactgatcacttccccaatttgtgtttagagattgcggtaaagacaggcataggaaattataaaagtattaatttggggaactaataaatgtccatgaaatctctaaacayaaattgtgaakatttcatggacacttatcacttccccartcaatacccttgtgatttcctatgcctgtctttactttamtytcttaatcctgtcagctgaggaggatgtatgtcgcctcaggaccctgtrataattgcgttaactgcacaaattgtacagcatgtgtgtttgaacaatatgaaatstgggcaccttgaaaaaagaacaggataacagcaattgttcagggaataagagagataaccttaaactctgaccamcrgtgagcckggtggaacagagycatatttctcttctttcaaaagcaaatgggagaaatatcgctgaattctttttctcagcaaggaacatccctgagaaagagaatgcacccctgagggtgggtctataaatggcctccttgggtgtggccatcttctatggtcgagactgtagggatgaaataaaccccagtctcccatagygctcccaggcttattaggaagaggaaattcccgcctaataaattttggtcagaccggttgctctcaaaaccctgtctcctgataagatgttatcaatgacaatggtgccygaaacctcattagcaattttaatttctccccggtcctgtggtcctgtgatctcrccctgcctccacttgccttgtgatattctattaccttgtgaagtaggtgatctttgtgacccacaccctattcatacactccctccccttttgaaagtccctaataaaaacttgctggttttgcggcttgtgrggcatcacggaacctaccgayrtgtgatgtctccccyggayrccyagctttaaaatttctctcttttgtactctgtccctttatttatcaaactggccgacgcttagggaaaatagaaaagaacccacatgactatcggggcaggttccccaatagtgtggtggcaggcgcctgtaatccaagctgcttgggaggctgaggcaggaaaataacttgatcccaggaggcagaggttgcagtgagccaagatcgcgccactgcactccagcctgggcaacagagggagaccctgtctcaaaatacataagtaaaaaaaaaaaaaaaag

SEQ ID NO: 1277 - DNA, 2051 bp, Homo sapiens
tcgacccacgcgtccgcggacgcgtggggtctactaaaaatagaaaaattagccaggcgtggtggcaggcccctgtaatgccagctactcaggaggctgaggcaggagaattgtttgtatccgggaggcggagtttgcagtgagccgagatcgtgccactgcactccagcctaggcaacaaaccaagactccatctcaaaaaataaaaataaaaaaagcaggtgatgggatgacatggagtttttgttttgctttgttttgttttgttttgttttttgctgcttccctgataggctatatactgctcccttcagcctctccccgaaaccacaggcgcccaaacaatgaggccagggttggaacccctggccagctagatgatgagctgaaggggaggcaacctttagccagcagacttgagacatctcagtgtactcagggtctgctggctagcaggcccagtggggtctccaaagcccttctgtatccttaatggtccttaaaccctggttgaagatccccccagttgtgtttacttaagccagaaggctgggcaatctctatatcctttctccatcgatcatcctatgattgttttgttagagaattattattgttcagggtaccagatcttagtttcattccacagataataagttcggctccaggctgggcatggtggctcacacctgtaatccctgcactttgagaggccaaggtgagtggatcacttgaggccaggagcttgagaccagcctggccaacatggtgaaaacccatctctactaaaaatacaaaactttgcagggtgtggtgttgcgggaagtcagggaccccaaacggagggaccggctgaagccatggcagaacgtggattgtgaagacttcatggacatttattagttccccaaattaatacttttataatttcctatacctgtctttactgcaatcttggaacataaaattgtgaagatttcatggacacttaccacttccccaatcaatacccttgtgatttcctatgcctgtcttactttactttcttaatcctgtcagctgaggaggatgtatgtcgcctcaggactctgtgataattgcgttaactgcacaaattgtacagcatgtgtgtttgaacaatatgaaatgtgggcaccttgaaaaaagaacaggataacagcaattgttcagggaataagagagataaccttaaactctgaccaccggtgagccgggtggagcagagccatatttctcttctttcaaaagcaaatgggagaaatatcgctgaattctttttctcagcaaggaacatccctgagaaagagaatgcacccctgagggtgggtctataaatggcccccttgggtgtggccgtcttctatggtccagactgtagggatgaaataaaccctagtctcccatagtgctcccaggcttattaggaagagaaaattcccgcctaataaattttggtcagaccggttgctctcaaaaccctgtctcctgataagatgttaccaataacaatggtgcccgaaacttcattagcaattttaatttcgccctggtcctctggtcctgtgatctcgccctgcctccatttgccttgtgatattctattaccttgtgaagtacgtgatctttgtgacccacaccctattcgtacactccgtccccttttgaaagtccctaataaaaccttaccggttttgcggcttgtggggccatcacggagcctaccgacatgtgatgtctcccccggatgcccagctttaaaatttctctcttttgtactctgtccctttatttatcaaactggccgacgcttagggaaaatagaaaagaacccacatgactatcggggcaggttccccaatagtgtggtggcaggcgcctgtaatccaagctgcttgggaggctgaggcaggaaaataacttgatcccaggaggcagaggttgcagtgagccaagatcgcgccactgcactccagcctgggcaacagagggagaccctgtctcaaaatacataagtaaaaaaaaaaaaaaaa

SEQ ID NO: 1278 - DNA, 2073 bp, Homo sapiens
aagaggtgatacgccagctcgaaattaaccctcactaaagggaacaaaagctggagctccaccgcggtggcggccgctctagaactagtggatcccccgggctgcaggaattcggcacgagagagccattccttttggaacaatggtggccgtttgttgcatctgtttttttgttattcttcctctaaatcttgttggtacaatacttggccgaaatctgtcaggtcagcccaactttccttgtcgtgtcaatgctgtgcctcgtcctataccggagaaaaaatggttcatggagcctgcggttattgtttgcctgggtggaattttaccttttggttcaatctttattgaaatgtatttcatcttcacgtctttctgggcatataagatctattatgtctatggcttcatgatgctggtgctggttatcctgtgcattgtgactgtctgtgtgactattgtgtgcacatattttctactaaatgcagaagattaccggtggcaatggacaagttttctctctgctgcatcaactgcaatctatgtttacatgtattccttttactactattttttcaaaacaaagatgtatggcttatttcaaacatcattttactttggatatatggcggtatttagcacagccttggggataatgtgtggagcgattggttacatgggaacaagtgcctttgtccgaaaaatctatactaatgtgaaaattgactagagacccaagaaaacctggaactttggatcaatttctttttcataggggtggaacttgcacagcaaaaacaaacaaacgcaagaagagatttgggctttaacacactgggtactttgtgggtctctctttcgtcggtggcttaaagtaacatctatttccattgatcctaggttcttcctgactgctttctccaactgttcacagcaaatgcttggattttatgcagtaggcattactacagtacatggctaatcttcccaaaaactagctcattaaagatgaaatagaccagctctcttcagtgaagaggacaaatagtttatttaaagcatttgttccaataaaataaatagagggaaacttggatgctaaaattacatgaataggaatcttcctggcacttagtgtttctatgttattgaaaaatgatgttccagaaagattacttttttcctcttatttttactgccattgtcgacctattgtgggacatttttatatattgaatctgggttcttttttgacttttttttttcccaatccaacagcatccttttttttaaaagagagaattagaaaatattaaatcctgcatgtaatatatctgctgtcatcttagttggaccaacttcccatttatttatcttaaaactatacagttacatcttaattccatccaaagaagatacagtttgaagacagaagtgtactctctacaatgcaatttactgtacagttagaaagcaaagtgttaaatggagaagatacttgtttttattaaacattttgagatttagataaactacattttaactgaatgtctaaagtgattatcttttttccccccaagttagtcttaaatcttttgggtttgaatgaaggttttacataagaaattattaaaaacaaggggggtgggtaataaatgtatataacattaaataatgtaacgtaggtgtagattcccaaatgcatttggatgtacagatcgactacagagtacttttttcttatgatgattggtgtagaaatgtgtgatttgggtgggcttttacatcttgcctaccattgcatgaaacattggggtttcttcaaaatgtgtgtgtcatacttcttttgggaggggggttgttttcttctgtttattttctgagactcctacaggagccaaatttgtaatttagagacacttaattttgttaatcctgtctgggacacttaagtaacatctaaagcattattgctttagaatgttcaaataaaatttcctgaccaaaaaaaaaaaaaaaaaaaaaaaaaaaaaaaaaaaaaactcgagggggggcccgacccaattcccctaa

SEQ ID NO: 1279 - DNA, 547 bp, Homo sapiens
  misc_feature (541)..(541): n equals a,t,g, or c
gcggcacgagattgtctcacattgtcactgcaaatcgacacctattaatgggtctcacctcccaactgcttccccctctgttcttcctgctagcatgtgccggcaactttgtccacggacacaagtgcgatatcaccttacaggagatcatcaaaactttgaacagcctcacagagcagaagactctgtgcaccgagttgaccgtaacagacatctttgctgcctccaagaacacaactgagaaggaaaccttctgcagggctgcgactgtgctccggcagttctacagccaccatgagaaggacactcgctgcctgggtgcgactgcacagcagttccacaggcacaagcagctgatccgattcctgaaacggctcgacaggaacctctggggcctggcgggcttgaattcctgtcctgtgaaggaagccaaccagagtacgttggaaaacttcttggaaaggctaaagacgatcatgagagagaaatattcaaagtgttcgagctgaatattttaatttatgagtttttgatagctttntttttt

SEQ ID NO: 1280 - DNA, 3019 bp, Homo sapiens
ccacgcgtccgcacgtatcaagataaagaggaagttgtcttatggatgaatactgttgggccctaccataatcgtcaagaaacatataagtacttttcacttccattctgtgtggggtcaaaaaaaaagtatcagtcattaccatgaaactctgggagaagcacttcaaggggttgaattggaatttagtggtctggatattaaatttaaagatgatgtgatgccagccacttactgtgaaattgatttagataaagaaaagagagatgcatttgtatatgccataaaaaatcattactggtaccagatgtacatagatgatttaccaatatggggtattgttggtgaggctgatgaaaatggagaagattactatctttggacctataaaaaacttgaaataggttttaatggaaatcgaattgttgatgttaatctaactagtgaaggaaaggtgaaactggttccaaatactaaaatccagatgtcatattcagtaaaatggaaaaagtcagatgtgaaatttgaagatcgatttgacaaatatcttgatccgtccttttttcaacatcggattcattggttttcaattttcaactccttcatgatggtgatcttcttggtgggcttagtttcaatgattttaatgagaacattaagaaaagattatgctcggtacagtaaagaggaagaaatggatgatatggatagagacctaggagatgaatatggatggaaacaggtgcatggagatgtatttagaccatcaagtcacccactgatattttcctctctgattggttctggatgtcagatatttgctgtgtctctcatcgttattattgttgcaatgatagaagatttatatactgagaggggatcaatgctcagtacagccatatttgtctatgctgctacgtctccagtgaatggttattttggaggaagtctgtatgctagacaaggaggaaggagatggataaagcagatgtttattggggcattccttatcccagctatggtgtgtggcactgccttcttcatcaatttcatagccatttattaccatgcttcaagagccattccttttggaacaatggtggccgtttgttgcatctgtttttttgttattcttcctctaaatcttgttggtacaatacttggccgaaatctgtcaggtcagcccaactttccttgtcgtgtcaatgctgtgcctcgtcctataccggagaaaaaatggttcatggagcctgcggttattgtttgcctgggtggaattttaccttttggttcaatctttattgaaatgtatttcatcttcacgtctttctgggcatataagatctattatgtctatggcttcatgatgctggtgctggttatcctgtgcattgtgactgtctgtgtgactattgtgtgcacatattttctactaaatgcagaagattaccggtggcaatggacaagttttctctctgctgcatcaactgcaatctatgtttacatgtattccttttactactattttttcaaaacaaagatgtatggcttatttcaaacatcattttactttggatatatggcggtatttagcacagccttggggataatgtgtggagcgattggttacatgggaacaagtgcctttgtccgaaaaatctatactaatgtgaaaattgactagagacccaagaaaacctggaactttggatcaatttctttttcataggggtggaacttgcacagcaaaaacaaacaaacgcaagaagagatttgggctttaacacactgggtactttgtgggtctctctttcgtcggtggcttaaagtaacatctatttccattgatcctaggttcttcctgactgctttctccaactgttcacagcaaatgcttggattttatgcagtaggcattactacagtacatggctaatcttcccaaaaactagctcattaaagatgaaatagaccagctctcttcagtgaagaggacaaatagtttatttaaagcatttgttccaataaaataaatagagggaaacttggatgctaaaattacatgaataggaatcttcctggcacttagtgtttctatgttattgaaaaatgatgttccagaaagattacttttttcctcttatttttactgccattgtcgacctattgtgggacatttttatatattgaatctgggttcttttttgacttttttttttcccaatccaacagcatccttttttttaaaagagagaattagaaaatattaaatcctgcatgtaatatatctgctgtcatcttagttggaccaacttcccatttatttatcttaaaactatacagttacatcttaattccatccaaagaagatacagtttgaagacagaagtgtactctctacaatgcaatttactgtacagttagaaagcaaagtgttaaatggagaagatacttgtttttattaaacattttgagatttagataaactacattttaactgaatgtctaaagtgattatcttttttccccccaagttagtcttaaatcttttgggtttgaatgaaggttttacataagaaattattaaaaacaaggggggtgggtaataaatgtatataacattaaataatgtaacgtaggtgtagattcccaaatgcatttggatgtacagatcgactacagagtacttttttcttatgatgattggtgtagaaatgtgtgatttgggtgggcttttacatcttgcctaccattgcatgaaacattggggtttcttcaaaatgtgtgtgtcatacttcttttgggaggggggttgttttcttctgtttattttctgagactcctacaggagccaaatttgtaatttagagacacttaattttgttaatcctgtctgggacacttaagtaacatctaaagcattattgctttagaatgttcaaataaaatttcctgaccaaaaaaaaaaaaaaaaaaaaaaaaaaaaaaaaaaaaaaaaaaaaaaaaaaaaaaaaaaaaa

SEQ ID NO: 1281 - DNA, 1179 bp, Homo sapiens
  misc_feature (1145)..(1145): n equals a,t,g, or c
  misc_feature (1163)..(1163): n equals a,t,g, or c
  misc_feature (1171)..(1171): n equals a,t,g, or c
cgcgcggggcgccataaggaggaagcgggtagtcgaccgtgtccgcgcgcctgggagacgctgcctcggcccggacgcgcccgcgcccccgcggctggagggtggtcgccactgggacactgtgaaccaggagtgagtcggagctgccgcgctgcccaggccatggactgtgaggtcaacaacggttccagcctcagggatgagtgcatcacaaacctactggtgtttggcttcctccaaagctgttctgacaacagcttccgcagagagctggacgcactgggccacgagctgccagtgctggctccccagtgggagggctacgatgagctgcagactgatggcaaccgcagcagccactcccgcttgggaagaatagaggcagattctgaaagtcaagaagacatcatccggaatattgccaggcacctcgcccaggtcggggacagcatggaccgtagcatccctccgggcctggtgaacggcctggccctgcagctcaggaacaccagccggtcggaggaggaccggaacagggacctggccactgccctggagcagctgctgcaggcctaccctagagacatggagaaggagaagaccatgctggtgctggccctgctgctggccaagaaggtggccagtcacacgccgtccttgctccgtgatgtctttcacacaacagtgaattttattaaccagaacctacgcacctacgtgaggagcttagccagaaatgggatggactgaacggacagttccagaagtgtgactggctaaagctcgatgtggtcacagctgtatagctgcttccagtgtagacggagccctggcatgtcaacagcgttcctagagaagacaggctggaagatagctgtgacttctattttaaagacaatgttaaacttataacccactttaaaatatctacattaatatacttgaatgaaaatgtccatttacacgtatttgaatggccttcatatcatccacacatgaatctgcacatctgtaaatctacacacggtgcctttatttccactgtgcaggttcccacttaaaaattaaattggaaagcaggtttcaaggaagtagaaacaaaatacaatttttttggtaaaaaaaaaaaaaaaaaaaaaaactcnaaggggggggccggtaancaatttgncctaatat

SEQ ID NO: 1282 - DNA, 925 bp, Homo sapiens; identical to SEQ ID NO: 840
  misc_feature (894)..(894): n equals a,t,g, or c
  misc_feature (918)..(919): n equals a,t,g, or c

SEQ ID NO: 1283 - DNA, 957 bp, Homo sapiens
  misc_feature (26)..(26): n equals a,t,g, or c
  misc_feature (32)..(32): n equals a,t,g, or c
  misc_feature (41)..(41): n equals a,t,g, or c
  misc_feature (47)..(47): n equals a,t,g, or c
  misc_feature (49)..(50): n equals a,t,g, or c
  misc_feature (61)..(61): n equals a,t,g, or c
  misc_feature (64)..(64): n equals a,t,g, or c
  misc_feature (67)..(67): n equals a,t,g, or c
  misc_feature (70)..(70): n equals a,t,g, or c
  misc_feature (73)..(73): n equals a,t,g, or c
  misc_feature (75)..(75): n equals a,t,g, or c
gcgcgccccctcttttaaaaaacttngggggnacccccccngggggntnncaagggaaatntcnggncancgnangcggccccaatcggcacgagcggccatggcgctcctgctttcggtgctgcgtgtactgctgggcggcttcttcgcgctcgtggggttggccaagctctcggaggagatctcggctccagtttcggagcggatgaatgccctgttcgtgcagtttgctgaggtgttcccgctgaaggtatttggctaccagccagatcccctgaaactaccaaatagctgtgggctttctggaactgctggctgggttgctgctggtcatgggcccaccgatgctgcaagagatcagtaacttgttcttgattctgctcatgatgggggctatcttcaccttggcagctctgaaagagtcactaagcacctgtatcccagccattgtctgcctggggttcctgctgctgctgaatgtcggccagctcttagcccagactaagaaggtggtcagacccactaggaagaagactctaagtacattcaaggaatcctggaagtagagcatctctgtctctttatgccatgcagctgtcacagcaggaacatggtagaacacagagtctatcatcttgttaccagtataatatccagggtcaaccagtgttgaaagagacattttgtctacctggcactgcttcctctttttagctttactactcttttgtgaggagtacatgttatgcatattaacattcctcatgtcatatgaaaatacaaaataagcagaaaagaaatttaaatcaaccaaaattctgatgccccaaataaccacttttaatgccttggtgtaagtatacctctgaacttttttctgtgcctttaaacagatatatattttttttaaatgaaaataaaaccatatatcctaaaaaaaaaaaaaaaaaaaaaaaa

SEQ ID NO: 1284 - DNA, 957 bp, Homo sapiens; identical to SEQ ID NO: 1283
  misc_feature (26)..(26): n equals a,t,g, or c
  misc_feature (32)..(32): n equals a,t,g, or c
  misc_feature (41)..(41): n equals a,t,g, or c
  misc_feature (47)..(47): n equals a,t,g, or c
  misc_feature (49)..(50): n equals a,t,g, or c
  misc_feature (61)..(61): n equals a,t,g, or c
  misc_feature (64)..(64): n equals a,t,g, or c
  misc_feature (67)..(67): n equals a,t,g, or c
  misc_feature (70)..(70): n equals a,t,g, or c
  misc_feature (73)..(73): n equals a,t,g, or c
  misc_feature (75)..(75): n equals a,t,g, or c

SEQ ID NO: 1285 - DNA, 1074 bp, Homo sapiens
ggcacgagcattttaggacaaataaaaggaaattcaactttgtacttgtggaaactaatccctaaatatgaataggtttatattgattcatgggtaacaggtccataataaattattggaaactaggatgtctgaatatcaaggaagacagccatagtctcttacagtgcctctgttggtctgtctcaaactgaattgggtgggaaaaggtatggtccaatataaaagttcctttttgccattattggcaaatcttgcctttgtttattttggtgccagtgttttctgcttaatcatttgctttgttggcatctgtgtttattttcttgtacaccacatgcagtttacatctgtcttaactactccttcccaggtaaattccaattatatttgcatccagctaagagggcccatctcttctcacctctttcctagtcagtatattcagcaaatatttattgagcccttactgtgggcaaatcattgtactggataattgagaaaaatagataattcccttattcagtaaatgtctactgagcacaatctagtgaatcattacagtatggcctcattgttttgtttgaggtgtgttattcataacaatattttacaccattcgtatcaatgtaattatagaacacaatatacgatcaaggataagtaattgtgtggttatctgccatttaaaagtatccagtatttgatcacattattataaataatgaaaaaatgatttaatctgtaataaactggtttattgtgcagtgactgtaatatactagagttataataaattgtttactctgcctcaccaaacacatgctaggatataacccccaaaataagtatttaactttgcattaggtataaaggagactgggtgctataattagattattttgaggcagacagagagctgttatcctaactgatttagtatgttctgtaattgagaaaatgttcaccaaattatactttttagtgatttacatgtacattttataggggacatgttctgtgtatagcgaataaataacttttatagtatcaaaaaaaaaaaaaaaaaaaaaa

SEQ ID NO: 1286 - DNA, 1279 bp, Homo sapiens
  misc_feature (1188)..(1188): n equals a,t,g, or c
  misc_feature (1224)..(1224): n equals a,t,g, or c
  misc_feature (1278)..(1278): n equals a,t,g, or c
gaattcggcacgagtcatgaagggcttcttcctcattgtcttcatgttgagtagggctgaggaggaggaagatgaggggttagtcttgctgtcttgcgggtgacagatgtggaagtaaatcctcatgtaggtgggaatgagcagttcaaacctatgttgttcaagggccaactatagttgattaactcatatctctacagttaattttcaaacagatgtgatagctgaatgagaacttttaagatagtactggacagtaaccttattggaactggaatggcctttagactttttgtgtccagtttcttctcacctcctctttctcttcaaatgtgcaactgaaactgagagacctcagtcccatgtccaaggtcaggcagatacttagcggcagagtgaggactccagcccatttctgcagctctgctgtgcagtggaagatttgggacaagtacattatttaaaaatgcccacccactaaatattacattcctaacttttcccaatacacaaatatgcttgaacttttaaaagcttgtttttggtcgtgcttggtttggaatgtgaatgactaaaactacctttagcaatttcccaaagtgtaagttcaaatgtacagagaatttttttcctgaatgcccaacacaatatgcagttttacaacacataccagattcttagattcatttggtgaaggaagcctctgaattaaaacttttaaatatttctgatttgcaaccagacgaaaaagaagaaaattgacaacttttttgatgcaactttgtgaaatcatggtgttcctggtttttctggtctggtttttgttgttgttttgttttgttttgccacagtttagttcctcacctgatctttccttgtatccacttcagagtctctgaaatgttatctgtttgttggttcctgggaaattgagagccttttcaaagactccatctagaagcatatttaaaagtgtgaaagaagacatttatgcgaccaacaaacatatgaaaaaaagcttatcatcatgggtcattagagaaatgcacagcagaaccacaatkagataccatctcataccagttagaatggtgatcactaaaaagtcaggaaaggccaggggcggtgactcatgcctgtaatcccagcactttgggaggctgaggcgggtgggatcacctggaggtncaggagtacaagaccagcctggccaacatagtgaancccatctctacttaaaaatacaaaaattagctgggtgtggtggcgggcactgtna

SEQ ID NO: 1287 - DNA, 3084 bp, Homo sapiens
  misc_feature (1029)..(1029): n equals a,t,g, or c
  misc_feature (1106)..(1106): n equals a,t,g, or c
  misc_feature (1109)..(1109): n equals a,t,g, or c
gtcttggctggggctgaccctgggcagggactttcctgcagggccagacctgcctgcattctgagacaaagcaatggacggtccgcagaagcagacctcattgattgagtctttcttccatccccttggcctgctccctgtargaagtcatcctgccaactgatttaaaagggctctttagccagttgttgccaaccttatagggatgagtcccctgtgagattttgcttttccactgcctgggatgatgcagtttgaasaggsccttggacctccttgtmacatcarggacctttggagaccattatcagtgtaagccctgcttagctcatcttagagcaaagagccagcaccctgatgtccctggggtggctaggcaggagtggcgtggggccaatacccagaccccttcagccaccagcccctggcctgtgccttccaacccattagccatttcttgttgtgcccctttccaagatacagcctgcaagtggtagcaagaagtgattagaggcagatctggacttggcaacagaagtggtttcccatctccattgtctgagtctgattttcgctgatgctgttttgtggatttttgtggtagtgatggttgtcagtgctgccagtttcccaaaacgtaatyaagcctctggtcacatggctgtcgatgtaggcattctggagtggtgttcagccaagtgaccgggcaaaattgggctgtgaaattgtacttccaggcttggatgtaatttttgctctagagagaagcaagtggtgggaaggaggtagcatgacgtgtggtgtgcgggtttccttgctgccgtcacctctccgctcatacaggaatgaagccttagccaggaggccaggctcagccctgtgccactcaccgaagccactttctacaggccagcaggggcttgttgcaggctgtgggttttggtgtggtttgtcagaggctaattctgcagagtttccaaaaccagaagacatcgtatgcttgggatgggggccgtgccacccgtgggnaatgctgcccgctctgcagactgctgctagagccagcaactccactaaggtggattttcatcaggggcctgcaggcntcnccttttcccattgttcctgcgctgcaaattgcaggccccagcaatcgtgactgacgtttgctccttgactccaagaaactgagaccaaagaagctgctgttcttagcaagatgcgcactgcattccacaggtgggaggagtcggagaggcaggggcttgctttgcagccccacagacaacagttgcacagtgcctcaagccccagagtggctcaccctgtccagacctttgaggatatcaaaggacaaagtgcccaagtctttcctaccttgggggaacctggaacttggaaaggctccctgtcctagtcttgatctgttctgggccaggtcccagcttgagctgcctctgagatttgggctgtgcggatctctggagtgagctctgtttcggttgacccaggtcatggaatggaaacggtgaggccccagtggctgttctggaagaaacagatctcctggcaaaggccccagcatctccctcactgaaaccaggtggccggctcctcggactctgctttatgttgcggtgagaactctgcccaggtgtgcagggtttggcttgtgggctgcttgctgctcatctgatttttgtcccagtagtccctgcgttcttcattcaaccccttctgggacttcagctcagagagcaccatcccgggggtcagggcctccccacaggagccctgcagtgtggtagcgccatggctgtctcaaaccaagcaaaggaaggaccctgaggccttcasgctaaccmtcctcgagcaactgctgttggaaggcctccctgggcctggcccccaccctctgccacccagtcctcccagctgccatgtttcaaagacgacctttacctcctgcctttggattgactctgcatttgaccacggactccagtctgtgtgtagggagagagctgagtaggaggcctccactccggatcgaggcctgtatagggctcgtttccccacacatgcctatttctgaagaggcttctgtcttatttgaaggccagcccacacccagctactttaacaccaggtttatggaaaatgtcaggccttccccacaactcccgtctaactgctgtcgcccccctacttgctggctctcagaagcctaggggagtccctgtggtcctggaattctttccccaaagacgaccagcatttaaccaacctaagggcccaaaggccttggacaactgctgttgsaaggcctccctgggcctggcccccaccctctgccacccagtcctcccagctgccatgtttcaaagacgacctttacctcctgcctttggattgactctgcatttgaccacggactccagtctgtgtgtagggagagagctgagtaggaggcctccactccggatcgaggcctgtatagggctcgtttccccacacatgcctatttctgaagaggcttctgtcttatttgaaggccagcccamacccagctactttaacacctaagggcccaaaggccttggacaactgcatggagctgcactctaggagaaggaggggaaccagatgttagatcaggggagggagcaggagtgtccctcccgtcagtgcctacccacctgtgaggcagccttctgatggcctggcccaccttccccagaaccaggggaggcctgaggcttcagttttactctgctgcaaaatgaaggcgggcctgcaagccgactacacctacggaggctgttgaggacaatttcattccattaaattaaaaaatactgactggctggcaggcaggtgccatgtctgggaacagggacgggggagcttcacctttttgtcttggcttttctttgggctgtgggggggcatccatttccagggtcggggaggaaataccaaatgcattgttgttctgctcaatacatctcacttgtttctaataaagaaagcagctgaacaaaaaaaaaaaaaaaaaaaaaaaaaaaaaaaaaaaaaaaaaaa

SEQ ID NO: 1288 - DNA, 1187 bp, Homo sapiens
gcgagcgccgcacatgcgccggggtcgggccgggccgggccgggccgggggcgcgcgctctgcgagctggatgtccaggctgcgggcgctgctgggcctcgggctgctggttgcgggctcgcgcctgccgcggatcaaaagccagaccatcgcctgtcgctcgggacccacctggtggggaccgcagcggctgaactcgggtggccgctgggactcagaggtcatggcgagcacggtggtgaagtacctgagccaggaggaggcccaggccgtggaccaggagctatttaacgaataccagttcagcgtggaccaacttatggaactggccgggctgagctgtgctacagccatcgccaaggcatatccccccacgtccatgtccaggagcccccctactgtcctggtcatctgtggcccggggaataatggaggagatggtctggtctgtgctcgacacctcaaactctttggctacgagccaaccatctattaccccaaaaggcctaacaagcccctcttcactgcattggtgacccagtgtcagaaaatggacatccctttccttggggaaatgcccgcagagcccatgacgattgatgaactgtatgagctggtggtggatgccatctttggcttcagcttcaagggcgatgttcgggaaccgttccacagcatcctgagtgtcctgaagggactcactgtgcccattgccagcatcgacattccctcaggatgggacgtggagaagggaaatgctggagggatccagccagacttgctcatctccctcacagcccccaaaaaatctgcaacccagtttaccggtcgctaccattacctggggggtcgttttgtgccacctgctctggaaaagaagtaccagctgaacctgccaccctaccctgacactgagtgtgtctatcgtctgcagtgagggaaggtgggtgggtattctccccaataaagacttagagcccctctcttccagaactgtggattcctgggagctcctctggcaataaaagtcagtgaatggtggaagtcagagagcaaccctggggattgggtgccatctctctaggggtaacacaaagggcaagaggttgctatggtatttggaaacaatgaaaatggactgttagatgccaaaaaaaaaaaaaaaaaaaaaaaaaaaaaaaactcga

SEQ ID NO: 1289 - DNA, 787 bp, Homo sapiens
  misc_feature (15)..(15): n equals a,t,g, or c
  misc_feature (19)..(19): n equals a,t,g, or c
  misc_feature (754)..(754): n equals a,t,g, or c
  misc_feature (761)..(761): n equals a,t,g, or c
  misc_feature (768)..(768): n equals a,t,g, or c
  misc_feature (785)..(786): n equals a,t,g, or c
atggtaagacttccnattnggattttggttaacgaataccagytcagcgtggaccaacttatggaactggccgggctgagctgtgctacagccatcgccaaggcatatccccccacgtccatgtccaggagcccccctactgtcctggtcatctgtggcccggggaataatggagswgatggtctggtctgtgctcgacacctcaaactctttggytackagccaaccatctattaccccaaaaggcctaacaagcccctcttcactgcattggtgacccagtgtcagaaaatggacatccctttccttggggaaatgcccgcagagcccatgacgattgatgaactgtatgagctggtggtggatgccatctttggcttcagcttcaagggcgatgttcgggaaccgttccacagcatcctgagtgtcctgaagggactcactgtgcccattgccagcatcgacattccctcaggatgggacgtggagaagggaaatgctggagggatccagccagacttgctcatctccctcacagcccccaaaaaatctgcaacccagtttaccggtcgctaccattacctggggggtcgttttgtgccacctgctctggaaaagaagtaccagctgaacctgccaccctaccctgacactgagtgtgtctatcgtctgcagtgagggaaggtgggtgggtattctccccaataaagacttagagcccctctcttccaaaaaaaaaaaaaaaaaactcganggggggnccggtanccaattcgcctatatgnng

SEQ ID NO: 1290 - DNA, 1308 bp, Homo sapiens; identical to SEQ ID NO: 1047

SEQ ID NO: 1291 - DNA, 2054 bp, Homo sapiens
  misc_feature (1)..(1): n equals a,t,g, or c
ngggctcggcggctccaccacagttgcaacctgcagaggcccggagaacacaaccctcccgagaagcccaggtccagagccaaacccgtcactgaccccccagcccaggcgcccagccactccccaccgctaccatggccgaagacgcagacatgcgcaatgagctggaggagatgcagcgaagggctgaccagttggctgatgagtcgctggaaagcacccgtcgtatgctgcaactggttgaagagagtaaagatgctggtatcaggactttggttatgttggatgaacaaggagaacaactsgawcgyrtygargaaggsatgraccawatcaaccaagacatgaaggaggctgagaaaaatttaaaagatttagggaaatgctgtggccttttcatatgtccttgtaacaagcttaaatcaagtgatgcttacaaaaaagcctggggcaataatcaggacggagtggtggccagccagcctgctcgtgtagtggacgaacgggagcagatggccatcagtggcggcttcatccgcaggtaacaaatgatgcccgagaaaatgaaatggatgaaaacctagagcaggtgagcggcatcatcgggaacctccgtcacatggccctggatatgggcaatgagatcgatacacagaatcgccagatcgacaggatcatggagaaggctgattccaacaaaaccagaattgatgaggccaaccaacgtgcaacaaagatgctgggaagtggttaagtgtgcccacccgtgttctcctccaaatgctgtcgggcaagatagctccttcatgcttttctcatggtattatctagtaggtctgcacacataacacacatcagtccacccccattgtgaatgttgtcctgtgtcatctgtcagcttcccaacaatactttgtgtcttttgttctctcttggtctctttctttccaaaggttgtacatagtggtcatttggtggctctaactccttgakgtcttgagtttcatttttcattttctctcctcggtggcatttgctgaataacaacaatttaggaatgctcaatgtgctgttgattctttcaatccacagtattgttcttgtaaaactgtgacattccacagagttactgccacggtcctttgagtgtcaggctctgaatctctcaaaatgtgccgtctttggttcctcatggctgttatctgtctttatgatttcatgattagacaatgtggaattacataacaggcattgcactaaaagtgatgtgatttatgcatttatgcatgagaactaaatagatttttagattcctacttaaacaaaaactttccatgacagtagcatactgatgagacaacacacacacacacaaaacaacagcaacaacaacagaacaacaacaaagcatgctcagtattgagacactgtcaagattaagttataccagcaaaagtgcagtagtgtcacttttttcctgtcaatatatagagacttctaaatcataatcatccttttttaaaaaaaagaattttaaaaaagatggatttgacacactcaccatttaatcatttccagcaaaatatatgtttggctgaaattatgtcaaatggatgtaatatagggtttgtttgctgcttttgatggctacgttttggagagagcaatcttgctgtgaaacagtgtggatgtaaattttataaggctgactcttactaaccaccatttcccctgtggtttgttatcagtacaattctttgttgcttaatctagagctatgcacaccaaattgctgagatgtttagtagctgataaagaaaccttttaaaaaaataatataaatgaatgaaatataaactgtgagataaatatcattatagcatgtaatattaaattcctcctgtctcctctgtcagtttgtgaagtgattgacattttgtagctagtttaaaattattaaaaattatagactccaaaaaaaaaaaaaaaaaaaaaaaaaaaaaaaaaaaaaaaaaaaaaaaaaaaaaagtacctgcccgggcggccgctcgaaa

SEQ ID NO: 1292 - DNA, 2722 bp, Homo sapiens
gtctgctgccgagccacaccgctgcagaaaagtgaagtggtgaaattggtccgcagccatctccaggtgatgacccttgctattggtgatggtgccaatgatgttagcatgatacaagtggcagacattgggataggggtctcaggtcaagaaggcatgcaggctgtgatggccagtgactttgccgtttctcagttcaaacatctcagcaagctccttcttgtccatggacactggtgttatacacggctttccaacatgattctctattttttctataagaatgtggcctatgtgaacctccttttctggtaccagttcttttgtggattttcaggaacatccatgactgattactgggttttgatcttcttcaacctcctcttcacatctgcccctcctgtcatttatggtgttttggagaaagatgtgtctgcagagaccctcatgcaactgcctgaactttacagaagtggtcagaaatcagaggcatacttaccccataccttctggatcaccttattggatgctttttatcaaagcctggtctgcttctttgtgccttattttacctaccagggctcagatactgacatctttgcatttggaaaccccctgaacacagccgctctgttcatcrttctcctccatctggtcattgaaagcaagagtttgacttggattcacttgctggtcatcattggtagcatcttgtcttattttttatttgccatagtttttggagccatgtgtgtaacttgcaacccaccatccaacccttactggattatgcaggagcacatgctggatccagtattctacttagtttgtatcctcacgacgtccattgctcttctgcccaggtttgtatacagagttcttcagggatccctgtttccatctccaattctgagagctaagcactttgacagactaactccagaggagaggactaaagctctcaagaagtggagaggggctggaaagatgaatcaagtgacatcaaagtatgctaaccaatcagctggcaagtcaggaagaagacccatgcctggcccttctgctgtatttgcaatgaagtcagcaasttcctgtgctattgagcaaggaaacttatctctgtgtgaaactgctttagatcaaggctactctgaaactaaggcctttgagatggctggaccctccaaaggtaaagaaagctagataccctccttggagttgcaagtattctttcaaggttggaagagggattttgaagaggtatctctccaagcaagaatgacttgtttttccataagggacatgagcattttactaggcttggaagagctgacatgatgagcattattgtatgtttgtatatacatttgtgatagagggctagagtttgacctagagagagtttaaggaagtgaaatatttaattcagaaccaaatgcttttgtaaaactttttggattttgtaaaagcattttcattctcttagaaattcaagtattttcaaggggagtcatttgagatatatttattttactaggagatcttatattctagggaaatgctttaaatggtcaggctccartcggaatttttttaagaaaaaagtagtttttaatacattggttaggactcagaggaaatacggaaaaaacattgtagatggttaatttacagataaaatcccaagagccttttaaacaacaaggtacctaaaatagggtataattatactgcttaaaatacagttagtgcctattaatagctttttatttcctatgggragatgcttttggtcttctggctgaagatgtaggcatacctctcactcatttcaatgttttcctgaggtggagccttcattggaaaggggaaagagggattctagggtttcatcagggaccaggaatgcattcctctgtcaggttccaatcaagagaagaccttttatgagatctgcctctgtatagatgttgtcagttaggaaactgaagccataggtcaggcagacatcagctcagcctgtggcccattgggtgatttcctgtattttaaaactgacagtagcctgatcaaagtgatacaatcaatttcaaaacaatcttccagagaccacttgaaggttcatagtttttacaataccctgagacttttcaggtgttggagcctctaaaatatgagatataaacagaaactaatacaagttgttctctggaggtttctatgaggttcttagaaaaatttggttttaaaatcatttgaggacaggaatgtctatagcaagtttactcctattgcgaatcatgtatgctggctttagttgtaacaaacgattttattctaagtaaggccaggtgctactataaaatcatatattcctgttgaagttcttttgaagtcctatctctatttattatatttgaaagttgtcagccaccagtcatccagaatttccttcctgaatctccatgctcatatgcaatgtctacatcaaggtcttcttaatgactattattctcagggtttagttttctaccttctgcctactattttggtctgacatttttgtagccttctgttattattggaaatagtctcttacataagctgatttcgagaactttcaaaatctcacatagctaatggaagttgctttctgctttcttatgactgtttttataaataaactgtttcataaataatgtaaaaaaaaaaaaaaaaaaaa

SEQ ID NO: 1293 - DNA, 1965 bp, Homo sapiens
  misc_feature (3)..(3): n equals a,t,g, or c
  misc_feature (18)..(18): n equals a,t,g, or c
  misc_feature (21)..(21): n equals a,t,g, or c
  misc_feature (28)..(28): n equals a,t,g, or c
tcncgggacgggaatgcnacngccaacncaagttttatgtataaggcatttmctattccagtgacttagctaatgaaaacatttaaaaatatgtattaatttacttggcctgctactaaagtgcttaacataactaaatggatctatagtaacatgtctaaattttttaatggaaataagggactaaccataatccttttgagtcagcttggtgcttacaattattttgttaggaaatcttgatgctttcttctttctctttaaatttttgtaatcaagcaacagacttgatccagcagtgtcgaattccaagcaagttatgatgattcttattgtagttcaagtacagatgagtaagtggtgtgacttcagtttattatcttcttggtgacctactttagtatgtgttctgtagcgattcatattagttaagggacgttttcaatatgcttgaaataagaaatagcattttactctaaatacaagaaatgactgtacacaaatgctaatcagtgatttggggccttttaatgtctttaacagcaatcttttatttatttatttatttatttttgagacggagtcttgctgtgtcaccaggctggagcagtggcacgatctcgcctcactgcaacctccgcctcccaggttcaagctattctcctgcctcagcctcccaagtaactgggactgcaggcacatgccaccacatccagctaatttttgtatttttagtagagacggggtttcaccttgttggccaggatgatctcgatctcttgatctcgtgatctgcccgcattggcctcctgaagtgctgggattacaggcatgagccactgcgcccggcccaaatcttttattttttaacagccttagttatttataattcaaatgcactaaaatatcatcgctgtcatgaactttgctgtttacaggttctgtgtaattcagaatgctttgtacttagaaaataatttctaggcttatcttgttttgcagttttcatgttttgacaattgcccaccatttacaatactcaatttttgattatgaaatgaatagtaaaattcaaacatatctaataataatttgccttagtttgattaataaattatatcaaaaaacttggggatagaaagaggcttttttttccccctgtagtatttttaaaactttttagatgagctggatgaaaccttagtacattggagctggagttgtattgagtacagccccaactctgaagccttatattcatgtcttaagtaccattgattgttctgtgaattgttgttagtttcatatttgacattgtagtaatccaccttgcattttagtctttgcaaaaaggatattgctaggtatattcttatttctgattgagtattgaatttacatttttcagaatttcattctttgtcattataatccaaaaacaatgtccacatcagacttggaacttctcacttcaaaaatgaaatacagatttagcagtgttgtacataatgatgtccaagcatttttccacctgtttactgagttttccaaccatttactatgtgttgagattggtgggttttctggctgtttttctgaggtgaatgacttgttacagagcctcagtaagaaatttcaactaaaatcacaaaaacataaagtccaggaaaccaccagaagatggatttttagtgtttttgaaatcttgtatttccttttgatatcatttactcattttaattttacgactgccaacttgttacggtattaattatatgtatgtgtttatatgtatgcatataatatatgtatatgtatatgaagaataaagttaagatttggtcaaactatattttcccattcaagtacaaaaatgttttcaaggctgcaaaaagtgtacagttgttaaacaagttgtaaataaagacttgtataaaaattcaaaaaaaaaaaaaaaaaaaaaag

SEQ ID NO: 1294 - DNA, 1018 bp, Homo sapiens
ggatctgctactgaagtagacaacaattttagcaaaccacctccgtttttccctccaggagctcctcccactcaccttccacctcctccatttcttccacctcctccgactgtcagcactgctccacctctgattccaccaccgggtattccaataactgtaccacctccaggttttcctcctccaccaggcgctccacctccatctcttataccaacaatagaaagtggacattcctctggttatgatagtcgttctgcacgtgcatttccatatggcaatgttgcctttccccatcttcctggttctgctccttcgtggcctagtcttgtggacaccagcaagcagtgggactattatgccagaagagagaaagaccgagatagagagagagacagagacagagagcgagaccgtgatcgggacagagaaagagaacgcaccagagagagagagagggagcgtgatcacagtcctacaccaagtgttttcaacagcgatgaagaacgatacagatacagggaatatgcagaaagaggttatgagcgtcacagagcaagtcgagaaaaagaagaacgacatagagaaagacgacasagggagaaagaggaaaccagacataagtcttctcgaagtaatagtagacgtcgccatgaaagtgaagaaggagatagtcacaggagacacaaacacaaaaaatctaaaagaagcaaagaaggaaaagaagcgggcagtgagcctgcccctgaacaggagagcaccgaagctacacctgcagaataggcatggttttggccttttgtgtatattagtaccagaagtagatactataaatcttgttatttttctggataatgtttaagaaatttaccttaaatcttgttctgtttgttagtatgaaaagttaactttttttccaaaataaaagagtgaatttttcatgttaagttaaaaaaaaaaaaaaaaaaaaaaaaaaaaaaaaaaaaaaaaaaaaaaaaaaaaaaaaaaaaactcgtag

SEQ ID NO: 1295 - DNA, 1318 bp, Homo sapiens
  misc_feature (48)..(48): n equals a,t,g, or c
gcaaaatcatttaggtgacactatagaaggtacgcctgcaggtaccgntccggaattcccgggtcgacccacgcgtccggcgagagcgacctgtgaggccccagagacctgacccaacacccccgacggcctccaggaggggcctgggcagccccacagtcccattcctccactctgtatctatgcaaagcactctctgcagtcctccggggtgggtgggtgggcagggaggggctggggcaggctctctcctctctctctttgtgggttggccaggaggttcccccgaccaggttggggagacttggggccagcgcttctggtctggtaaatatgtatgatgtgttgtgcttttttaaccaaggaggggccagtggattcccacagcacaaccggtcccttccatgccctgggatgcctcaccacacccaggtctcttcctttgctctgaggtcccttcaaggcctccccaatccaggccaaagccccatgtgccttgtccaggaactgcctgggccatgcgaggggccagcagagggcgccaccaccacctgacggctggggacccacccagcccctctcccctctctgctccagactcacttgccattgccaggagatggccccaacaagcaccccgcttttgcagcagaggagctgagttggcagaccgggcccccctgaaccgcaccccatcccaccagccccggccttgctttgtctggcctcacgtgtctcagattttctaagaaccaaaaaaaaaaaaggaaaaaaaacacaaaacaacaaaaaccaaaaaaaaaaaaaatcacaaaaacaaaaaaactataaaaaagaaagaattaaaaactttcagagaattactatttactttattaacttacggatttattatataaatatatattcacctagcaacatatctctgccgtctctcctgctctcataatgaagacatagccgattctctgcccgggccccttgctgatgctcctccgggtctgcgtcgggcgtgggtctctggggaccctccagaggtggaggtgggctgatggcctggctgcctggtggttgatggttttgctccccctaccttttttttttgagtttattctgattgattttttttcttggtttctggataaaccaccctctggggacaggataataaaacatgtaatatttttaagaaggaaaaaaaaaaaaagttttggcccatagtgagtcctattaaaattgtcaagacggcgcgaatttgtaataatcgccccggataccgggcggtaaccataggggaacggggttcccctagtgatag

SEQ ID NO: 1296 - DNA, 663 bp, Homo sapiens
  misc_feature (551)..(551): n equals a,t,g, or c
  misc_feature (612)..(612): n equals a,t,g, or c
  misc_feature (615)..(615): n equals a,t,g, or c
  misc_feature (623)..(623): n equals a,t,g, or c
  misc_feature (633)..(633): n equals a,t,g, or c
  misc_feature (636)..(636): n equals a,t,g, or c
ggccgagtactgcatcgcccgcatggcgccataccagggccctgacgccgtgcccggtgccctcgactacaagtccttctccacggccttgtatggcgagagcgacctgtgaggccccagagacctgacccaacacccccgacggcctccaggaggggcctgggcagccccacagtcccattcctccactctgtatctatgcaaagcactctctgcagtcctccggggtgggtgggtgggcagggaggggctggggcaggctctctcctctctctctttgtgggttggccaggaggttcccccgaccaggttggggagacttggggccagcgcttctggtctggtaaatatgtatgatgtgttgtgcttttttaaccaaggaggggccagtggattcccacagcacaaccggtcccttccatgccctgggatgcctcaccacacccaggtctcttcctttgctctgaggtcccttcaaggcctycccaatccaggccaaagccccatgtgccttgtccaggaactgcctgggccatgccaggggccagcanagggcgccaccacacctgacggctggggacccacccaagcccttttcccttttggtcaganttnatttgcanttgccagganaanggccccaacaaggacccggtttttgaa

SEQ ID NO: 1297 - DNA, 913 bp, Homo sapiens; identical to SEQ ID NO: 989

SEQ ID NO: 1298 - DNA, 1012 bp, Homo sapiens
tggtacgcctgcccgtaccggtccggaattcccgggtcgacccacgcgtccgagccatttgaaccctctgggacccctcaccccactgcttcagggtgctaggctgagggatgtttttcctcccccttaccgcccatgcccttgaaagaaaagtcactttttgtggagggcatcattcattcctgattcacaaaccccaaaaacctctggtgggagataggaagatagggcgtgggcctgggccttaacctcaatcttgtgtctgcctcagtcttttctgactggccctgaagttgtcagtggctctttctgtccttcagcccctggaaggtgctccaggataacaaagaagggcaggttgaagcccctcatggaaggagctggctttgtggggctgcaaaggacttttaagtcctgcctgtactgaagttcacagcccacctgactgagcagactcttcctgttcctttctctaccacccttgccttcccaggactgcacggtttaacacagcagagtacagaagggtgaagaagtgagcagaggcttatgaagatattcagatactcttctatgccaggaagcacaaagactttgttgagatttgcctcagttcagtagatcttccttggcagccagccataggttgtttctttgtcttccgggtcctaaagagcacagagaaaatggaggtccccagtctaggtaggaagctgattggatgaggacttctttttttccgacagcaggatggggctcttgggctccacacaccagatgctttggttttctacaactgttgctatgtgtagagggtgctcagagcgtggcatgagagcaaggagaccatggctactctttgaaatggatggggaaaattagcttaaaaatttaatcacgagattgcgccactgcactccagcctgggcgacagagccagactccgtctcaaaaaaaaaaaaaaaaaaggcggccgtttaaggaccttagggccaagttaccggcatgcacg

SEQ ID NO: 1299 - DNA, 1707 bp, Homo sapiens
  misc_feature (16)..(16): n equals a,t,g, or c
  misc_feature (51)..(51): n equals a,t,g, or c
  misc_feature (76)..(76): n equals a,t,g, or c
  misc_feature (83)..(84): n equals a,t,g, or c
  misc_feature (1567)..(1567): n equals a,t,g, or c
  misc_feature (1570)..(1570): n equals a,t,g, or c
  misc_feature (1640)..(1640): n equals a,t,g, or c
  misc_feature (1660)..(1660): n equals a,t,g, or c
  misc_feature (1677)..(1677): n equals a,t,g, or c
  misc_feature (1693)..(1693): n equals a,t,g, or c
aggccagcgttaaggncaatcagttgtgccgtctcatggtgaaaagaaaanccaccctggggccaatacgcaaacngcttttnncggsgcgttggccgattcattaatgcagttggcacgcaggtttcccgactgaaaagcgggcagtgagcgcaacgcaattaatgtgagttagctcactcattaggcaccccaggctttacactttatgcttccggctcgtatgttgtgtggaattgtgagcggataacaatttcacacaggaaacagctatgaccatgattacgccaagctctaatacgactcactatagggaaagctggtacgcctgcaggtaccggtccggaattcccgggtcgacccacgcgtccgggtgaccacctcagctggaggcacaaacaatctatccgattcctatgctgcaggattcttatggttgaacactttaggaatgctggccaatcagggcattgatgtcgtgatacggcactcattttttgaccatggatacaatcacctcgtggaccagaattttaacccattaccagactactggctctctctcctctacaagcgcctgatcggccccaaagtcttggctgtgcatgtggctgggctccagcggaagccacggcctggccgagtgatccgggacaaactaaggatttatgctcactgcacaaaccaccacaaccacaactacgttcgtgggtccattacactttttatcatcaacttgcatcgatcaagaaagaaaatcaagctggctgggactctcagagacaagctggttcaccagtacctgctgcagccctatgggcaggagggcctaaagtccaagtcagtgcaactgaatggccagcccttagtgatggtggacgacgggaccctcccagaattgaagccccgcccccttcgggccggccggacattggtcatccctycagtcaccatgggcttttttgtggtcaagaatgkcaatgctttggcctgccgctaccgataagctatcctcacactcatggctaccagtgggcctgctgggctgcttccactcctccactccagtagtatcctctgttttcagacatcctagcaaccagcccctgctgccccatcctgctggaatcaacacagacttgctctccaaagagactaaatgtcatagcgtgatcttagcctaggtaggccacatccatcccaaaggaaaatgtagacatcacctgtacctatataaggataaaggcatgtgtatagagcagaatgtttcccttcatgtgcactatgaaaacgagctgacagcacactcccaggagaaatgtttccagacaactccccatgatcctgtcacacagcattataaccacaaatccaaaccttagcctgctgctgctgctgcctcagaggaagatgaggaaggaaaaaaactgggtggacctaaaaaaacccatcctctyccaaaaaaaaaaaaaaagggcggccgctytagaggatccaagcttacgtacgcgtgcatgcgamgtcatarctcttctatagkggcacctaaattcaattcactggccgncgntttacaacgtcgtgactgggaaaaccctggcggtacccaacttaatcgccttgcagacatcccctttcgncagctggcgtaatagcgaanaggcccggaccgatcgnctttccaacaagttgngcaacctgaatggc

SEQ ID NO: 1300 - DNA, 1930 bp, Homo sapiens
cagactggtaccgccaccatgagggtgctttgtgccttccctgaagccatgccctccagcaactcccgcccccccgcgtgcctagccccgggggctctctacttggctctgttgctccatctctccctttcctcccaggctggagacaggagacccttgcctgtagacagagctgcaggtttgaaggaaaagaccctgattctacttgatgtgagcaccaagaacccagtcaggacagtcaatgagaacttcctctctctgcagctggatccgtccatcattcatgatggctggctcgatttcctaagctccaagcgcttggtgaccctggcccggggactttcgcccgcctttctgcgcttcgggggcaaaaggaccgacttcctgcagttccagaacctgaggaacccggcgaaaagccgcgggggcccgggcccggattactatctcaaaaactatgaggatgagccaaataactatcggaccatgcatggccgggcagtaaatggcagccagttgggaaaggattacatccagctgaagagcctgttgcagcccatccggatttattccagagccagcttatatggccctaatattgggcggccgaggaagaatgtcatcgccctcctagatggattcatgaaggtggcaggaagtacagtagatgcagttacctggcaacattgctacattgatggccgggtggtcaaggtgatggacttcctgaaaactcgcctgttagacacactctctgaccagattaggaaaattcagaaagtggttaatacatacactccaggaaagaagatttggcttgaaggtgtggtgaccacctcagctggaggcacaaacaatctatccgattcctatgctgcaggattcttatggttgaacactttaggaatgctggccaatcagggcattgatgtcgtgatacggcactcattttttgaccatggatacaatcacctcgtggaccagaattttaacccattaccagactactggctctctctcctctacaagcgcctgatcggccccaaagtcttggctgtgcatgtggctgggctccagcggaagccacggcctggccgagtgatccgggacaaactaaggatttatgctcactgcacaaaccaccacaaccacaactacgttcgtgggtccattacactttttatcatcaacttgcatcgatcaagaaagaaaatcaagctggctgggactctcagagacaagctggttcaccagtacctgctgcagccctatgggcaggagggcctaaagtccaagtcagtgcaactgaatggccagcccttagtgatggtggacgacgggaccctcccagaattgaagccccgcccccttcgggccggccggacattggtcatccctccagtcaccatgggcttttttgtggtcaagaatgtcaatgctttggcctgccgctaccgataagstatcctcacactcatggctaccagtgggcctgctgggctgcttccactcctccactccagtagtatcctctgttttcagacatcctagcaaccagcccctgctgccccatcctgctggaatcaacacagacttgctctccaaagagactaaatgtcatagcgtgatcttagcctaggtaggccacatccatcccaaaggaaaatgtagacatcacctgtacctatataaggataaaggcatgtgtatagagcagaatgtttcccttcatgtgcactatgaaaacgagctgacagcacactcccaggagaaatgtttccagacaactccccatgatcctgtcacacagcattataaccacaaatccaaaccttagcctgctgctgctgctgccctcagaggaagatgaggaaggaaaaaaactgggtggacctaaaaaaacccatcctctcccaaaaaaaaaaaaaaa

SEQ ID NO: 1301 - DNA, 637 bp, Homo sapiens
taaagtttgtctagagacctggctgttaatatgagattactgtaagtattggagaattgctcctttagaagaaccagatgcatctgagctgccttctccctttggagctccagcataacatcagggtgctgggcaatcttgcagcctttctgtttatctaaggcaacatcacttcgaacaatgtcatcctcatagtttttgagatagtaatccgggcccgggcccccgcggcttttcgccgggttcctcaggttctggaactgcaggaagtcggtccttttgcccccgaagcgcagaaaggcgggcgaaagtccccgggccagggtcaccaagcgcttggagcttaggaaatcgagccagccatcatgaatgatggacggatccagctgcagagagaggaagttctcattgactgtcctgactgggttcttggtgctcacatcaagtagaatcagggtcttttccttcaaacctgcagctctgtctacaggcaagggtctcctgtctccagcctgggaggaaagggagagatggagcaacagagccaagtagagagcccccggggctaggcacgcgggggggcgggagttgctggagggcaggcttcagggaaggcacaaagcaccctcatggtggc

SEQ ID NO: 1302 - DNA, 614 bp, Homo sapiens
cccttagtgatggtggacgacgggaccctcccagaattgaagccccgcccccttcgggccggccggacattggtcatccctccagtcaccatgggcttttttgtggtcaagaatgtcaatgctttggcctgccgctaccgataagctatcctcacactcatggctaccagtgggcctgctgggctgcttccactcctccactccagtagtatcctctgttttcagacatcctagcaaccagcccctgctgccccatcctgctggaatcaacacagacttgctctccaaagagactaaatgtcatagcgtgatcttagcctaggtaggccacatccatcccaaaggaaaatgtagacatcacctgtacctatataaggataaaggcatgtgtatagagcagaatgtttcccttcatgtgcactatgaaaacgagctgacagcacactcccaggagaaatgtttccagacaactccccatgatcctgtcacacagcattataaccacaaatccaaaccttagcctgctgctgctgctgccctcagaggaagatgaggaaggaaaaaaactgggtggacctaaaaaaacccatcctctcccaaaaaaaaaaaaaaag

SEQ ID NO: 1303 - DNA, 1114 bp, Homo sapiens
ccacgcgtccgggtgaccacctcagctggaggcacaaacaatctatccgattcctatgctgcaggattcttatggttgaacactttaggaatgctggccaatcagggcattgatgtcgtgatacggcactcattttttgaccatggatacaatcacctcgtggaccagaattttaacccattaccagactactggctctctctcctctacaagcgcctgatcggccccaaagtcttggctgtgcatgtggctgggctccagcggaagccacggcctggccgagtgatccgggacaaactaaggatttatgctcactgcacaaaccaccacaaccacaactacgttcgtgggtccattacactttttatcatcaacttgcatcgatcaagaaagaaaatcaagctggctgggactctcagagacaagctggttcaccagtacctgctgcagccctatgggcaggagggcctaaagtccaagtcagtgcaactgaatggccagcccttagtgatggtggacgacgggaccctcccagaattgaagccccgcccccttcgggccggccggacattggtcatccctccagtcaccatgggcttttttgtggtcaagaatgtcaatgctttggcctgccgctaccgataagctatcctcacactcatggctaccagtgggcctgctgggctgcttccactcctccactccagtagtatcctctgttttcagacatcctagcaaccagcccctgctgccccatcctgctggaatcaacacagacttgctctccaaagagactaaatgtcatagcgtgatcttagcctaggtaggccacatccatcccaaaggaaaatgtagacatcacctgtacctatataaggataaaggcatgtgtatagagcagaatgtttcccttcatgtgcactatgaaaacgagctgacagcacactcccaggagaaatgtttccagacaactccccatgatcctgtcacacagcattataaccacaaatccaaaccttagcctgctgctgctgctgccctcagaggaagatgaggaaggaaaaaaactgggtggacctaaaaaaacccatcctctcccaaaaaaaaaaaaaaa

SEQ ID NO: 1304 - DNA, 498 bp, Homo sapiens
  misc_feature (485)..(485): n equals a,t,g, or c
  misc_feature (494)..(494): n equals a,t,g, or c
ttcggcacgagcccagctttagttgctggtgcccagatcatatcgtggaattgtacaggtgtaagttaaaaataaacttagagcaaatgattctcttttgattccctacccaatccacactcttccctgtcccctctatgtcattcctggcaggtggacatgaagctccaggtaagaggcaagcatccgtgttcaaatgaccattcccagtttgaatgactttgtttgcaggatcttacttctgcttaactaaatttgtaccccaccctctatgcacttaaaatccctttaaaattcgttgatccttagttacctccctggagctccttctatttatacacaataactggtttccaaatattgaaaatcaactcttgtagcccctctagtttttgtttacttacttgcttcattccccacgggctgaacactccagttccctggmcttttctcawatgatatgtactcgaagggggggccggtanccaattcgnccta

SEQ ID NO: 1305 - DNA, 481 bp, Homo sapiens
  misc_feature (102)..(102): n equals a,t,g, or c
  misc_feature (104)..(104): n equals a,t,g, or c
  misc_feature (106)..(106): n equals a,t,g, or c
aaataaaacagaattagaaatcaagaagtcatggttttaaagaattaaaggtgaatattaatcccattcaaacatgtaactctgagacttaaggataaagtnananataaatgcatttttttcaatgacaaggtttatatctcatatgaagagatggaaaaaaatttttttaatggtagctggggaaagggaggtataagtgtactgattttcttacctttattagcaaggagttaaaatagtcctgattattttcacaaatcaagaaatggaggcttacagatattaaatctatgaaggtagtaagagaataagatttataaaaaatcatcaaaaactattagatgggaaacacacacatacccataagagacaaagcccccaaagaaaaatataattaataatgtggaagaactgccttatcaacaaaatataaatgagataagctcatctattaaaaaaaaaaaaaaagggcggccgc

SEQ ID NO: 1306 - DNA, 1000 bp, Homo sapiens
  misc_feature (12)..(12): n equals a,t,g, or c
  misc_feature (958)..(958): n equals a,t,g, or c
  misc_feature (960)..(960): n equals a,t,g, or c
acactcattytngggtcsacccacgcgtccggatgaattagaagaaagaggtttggggactcagcggatactagttcttttaccttctgcttggtaacttagattaaactgagcattgtttttctgtcacaaatgttttccttatgacactggtttcgacatgtaaaatgtgtttgaaaacctgctttgtagatgcagagagaagctataggaaacccagtaccacccctggtctgttctgacgagacatcgttcataaggcacagcacatcgcaagatgaacagttgttaataaaagctgttgctggaaacttgctttaggaacagctcaagaaccttggagttcatatttcacaaatattaataaatataagtccaagagctgtcagcctaatctgtaggagcagaacctctgattgaccaaaaggcatatgggtttaggttggttttttgatgtcatatgtctctgatggggctgcaagtgctacctcgcgcttgtacactgctgctgtggggctccgcgcctgccggtgaagagctgcagatgccgagaagccagcaaacacagggcccactggaaaaaaatagttttttcattagtatttctcgggaggacccaaaagttaaggtcagcttgttcactgtaatttctggaagaagttcactcagaccttcctgaattcagatcatctcagaagtctggagggaaatctggcgaaaccttcgtttgagggactgatgtgagtgtatgtccacctcactggtggcaccgagaaacttacttccttgtattaagtgcacttcttgtatttctaataagatgactttccagaaagtgagatttgttatgttctggcttttaaaaggtaaaatataaataaatttcataacttaatctaaaaaaaaaaaaaaaaaaaaaaaaagggcggccgctctagaggatcccgcgaggggcccnanattacgcgtggaggcgttcccttaaagtcccccttaagtt

SEQ ID NO: 1307 - DNA, 2032 bp, Homo sapiens
  misc_feature (5)..(5): n equals a,t,g, or c
tcccnctcgaaataaccctactaaagggaacaaaagctggagctccaccgcggtggcggccgctctagaactagtggatcccccgggctgcaggaattcggcacgaggcaacgcgctgtccatgtcgcgggcctcgctgggactccctgggagatgaggccgcgaggtctcccgccgctcctggtggtgctcctgggctgctgggcctccgtgagcgcccagaccgatgccaccccggcggtgacgacagagggcctcaactccaccgaggcagccctggccaccttcggaactttcccgtcgaccaggccccccgggactcccagggctccagggccctcctccggccccaggcctaccccagtcacggacgttgctgttctctgtgtctgtgacttatccccagcacagtgtgacatcaactgctgctgtgatcccgactgcagctccgtggatttcagtgtcttttctgcctgctcagttccagttgtcacgggcgacagccagttttgtagtcaaaaagcagtcatctattcattgaattttacagcaaacccacctcaaagagtatttgaacttgttgaccagattaatccatctattttctgcattcatattacaaactataaacctgcattatcctttattaatccagaagtacctgatgaaaacaattttgatacattgatgaaaacatctgatggttttacattgaatgctgaatcatatgtttccttcacaaccaaactggatattcctactgctgctaaatatgagtatggggttcctctgcagacttcagattcgtttctgagatttccttcgtccctgacatcatctctgtgcactgataataaccctgcagcgtttctggtgaaccaggctgttaagtgcaccagaaaaataaatttagaacagtgtgaagaaattgaagccctcagcatggctttttacagcagcccggaaattctgagggtacctgattcaagaaaaaaggtccctatcactgttcagtccatcgtcattcagtctctaaataaaacgctcacccgacgggaggacactgatgtgctgcagccgactctcgtcaacgctggacactttagcctttgcgtgaatgttgttcttgaggtaaagtacagcctcacatacacagatgcaggtgaagtcaccaaagctgatctctcattcgttctggggacagttagcagcgtagtggtcccactgcagcaaaagtttgaaattcattttcttcaggaaaatacccagccagtccctctcagtggaaaccctggttatgtcgtggggctcccattagctgctggattccagcctcataaggggtctgggattattcagaccacaaatagatatggacagcttactattcttcatagcacaactgagcaagactgcttagcactggagggggtccggaccccagtattatttggttacactatgcaatctggctgtaaactaagactgactggagctctcccgtgtcagctcgtagcacagaaggtgaagagcctgctgtggggccagggcttcccagattacgtggccccttttggaaattcccaggcccaggacatgctggactgggtgcccatccacttcatcacccagtcattcaacaggaaggattcctgccagctcccaggggctttggttatagaagtgaagtggactaaatacggatccctgctgaatccacaggccaaaatagtcaatgtaactgcaaatctaatttcatcctcctttcctgaggccaactcaggaaatgaaaggacgattcttatttccactgcggttacttttgtggatgtgtctgcacctgcagaggcaggcttcagagctccaccagccatcaatgccaggctgccctttaacttcttcttcccgtttgtttgacaatgctcagatgcatcagttccttaatatacacgtgaaatttgaaaactgtacattcggtgagattaaattttatatacaactagcaaaaaaaaaaaaaaaaaaaggtcgacgc

SEQ ID NO: 1308 - DNA, 1157 bp, Homo sapiens
  misc_feature (5)..(5): n equals a,t,g, or c
  misc_feature (811)..(811): n equals a,t,g, or c
cgaanttgggattgggacgggcccccctcgagactactttttagctagttgtatataaaatttaatctcaccgaatgtacagttttcaaatttcacgtgtatattaaggaactgatgcatctgagcattctcaggaaaggaggatgaaattagatttgcagttacattgactattttggcctgtggattcagcagggatccgtatttagtccacttcacttctataaccaaagcccctgggagctggcaggaatcctcaagaacaacattcacgcaaaggctaaagtgtccagcgttgacgagagtcggctgcagcacatcagtgtcctcccgtcgggtgagcgttttatttagagactgaatgacgatggactgaacagtgatagggaccttttttcttgaatcaggtaccctcagaatttccgggctgctgtaaaaagccatgctgagggcttcaatttcttcacactgttctaaatttatttttctggtgcacttaacagcctggttcaccagaaacgctgcagggttattatcagtgcacagagatgatgtcagggacgaaggaaatctcagaaacgaatctgaagtctgcagaggaaccccatactcatatttagcagcagtaggaatatccagtttggttgtgaaggaaacatatgattcagcattcaatgtaaaaccatcagatgttttcatcaatgtatcaaaattgttttcatcaggkacttctggattaataaaggataatgcaggtttawagtttgtaatatgaatgcagaaaatagatggattaatctggtcaacaagnwcaaatacwctttgaggtgggtttgctgtaaaattcaatgaatagatgactgctttttgactacaaaactggctgtcgcccgtgacaactggaactgagcaggcagaaaagacactgaaatccacggagctgcagtcgggatcacagcagcagttgatgtcacactgtgctggggataagtcacagacacagagaacagcaacgtccgtgactggggtaggcctggggccggaggagggccctggagccctgggagtcccggggggcctggtcgacgggaaagttccgaaggtggccagggctgcctcggtggagtctgtctcttatacacatctcaaccatcgtc

SEQ ID NO: 1309 - DNA, 1006 bp, Homo sapiens
  misc_feature (994)..(994): n equals a,t,g, or c
cggcacgaggcatatgttcagctatatgttataaaaccagttttcaagtggttgtaccaatgtacactcccaccaacccagtatgcgagttctagtgctccacatacttgccaacatttggcattttccatcttttttactatagccattagtggtgggcatatagtgatatgtcagttttagttttcggttttattttcttgtcctccaaaccattgtagtatctccccaggatagatgagtgatggctgagacctgagacctaggcctgttcctcacatgactgcaccattttacattctatcaatgtatgaggtttccggttctccacatccttaccaactcttattattattagtcttttttattatagctatcctagtacatgtgaagttatattgtgatattaatttacactgccctaatgattaataatattgatcatcttttattgagaatctttgatgaagtgtctgtttaaatcttttgcccattatcagttgggttatttgggtttttttattgttgagcactgatagtttttaaaaatatattctgggtgtaacttcactatcagtccattatccttgcaaaggttttctcccagtctctggattgtcttttcattctcttaagagtgtcttttgaagaacagaactgcttattttgatgaagtccgttctttccatttgttcatttctgggttgtgctttgagtgctgtatctaagaaatccttgcctaaccaaagattacaatgattttttcctgtgttttcttctaaaggtttaagttttacatctagatctagcatgtattttgagttatatggtgtgaaatatggatccaagttcttttatgtttttgttttgttttgttttgtttttgcttatggatattcaaatgtttccacaccatttgtttaaaaatactaccctttctcaataaaaaaaaaaaaaaaagggcggccgctctagaggatccaagcttacgtangcgtgcatgcga

SEQ ID NO: 1310 - DNA, 1271 bp, Homo sapiens
  misc_feature (67)..(67): n equals a,t,g, or c
  misc_feature (152)..(152): n equals a,t,g, or c
  misc_feature (1264)..(1264): n equals a,t,g, or c
  misc_feature (1271)..(1271): n equals a,t,g, or c
gaggactttcaagccccatcccagacattctgaatctgaatctgcatttttgaaagatgcgtagatnactcgtaaattaaaatttgaaaagcactggtataagagatctcagagggtctcttagaagcaccccccgccccacattctacctngaattgaattgaggcctggcctttcccagggcttatgggtcagtacagtcattgatatttttttcttttttctttctctcccatgcttaccatagctgagaagaaatggctttggaaagaatggcttcttgcagagccgcagttccagtctgttctccccttggagaagcacttgcaaagcagagtttgaggactcagacaccgaaaccagtagcagtgaaacatcagatgacgatgcctggaagtaggcatataaatgctcacagttaaatctgacccagtaaactctgtgtgtttagggagtatacaaaagaaatcgttcttttccttttcttatgttgttgaatacttcattcacaagggaaataatcatatcccaaagagagagcaattggcttgttttgcttttgttattgttcttccctgttatctgctttatagagagaagtttgtgtggtgggacagattttttaaacacactcacacacacacacacatacacacccagtatatatggggcgatgcacaggtaggagctggcagtgcagggaagaggagacactggtctgcagcaacagcttctactaccagcccttggggcactcacccctgtgatcaagcaatcattgtcaatgacaaagtgactattgaagttataattgtattaaattaatgctaataatttggatattttattttatttttggctgctcgggtaactttagcccttaaccaagcatatgtgggtttttttggttgtttttttttgttttttttttctttttcctttttgggtacagctgtaaaatatttggatataggaaatgttgtgttattcttgcagccttgatattcagggtggattgtaaaatataaatttttgtgagatttcaaagattaagattattttgataacattatttacagatttaaaagatgtggttatcacaagtctcgagggggaaactactgcataaaataactaacttggaataaatattttgcatcagtttgaaaaaaaaaaaaaaaaaaaaaaaaaaaaaaaaaaaaaaaaaaaaaaaaaaaaaaaaaaaaaaaaaaaaaaaaaaaaaaaaaaaaaaaaaggggggggnccccccn

SEQ ID NO: 1311 - DNA, 2934 bp, Homo sapiens
  misc_feature (4)..(5): n equals a,t,g, or c
  misc_feature (8)..(8): n equals a,t,g, or c
  misc_feature (37)..(37): n equals a,t,g, or c
  misc_feature (44)..(44): n equals a,t,g, or c
  misc_feature (195)..(195): n equals a,t,g, or c
  misc_feature (2924)..(2924): n equals a,t,g, or c
catnntangtattagtcatcgctattaccatggtatncggtttngccagtacatcaatgggcgtggatagcggtttgactcacggggatttccaagtctccaccccattgacgtcaatgggagtttgttttggcaccaaaatcaacgggactttccaaaatgtcgtaacaactccgccccattgacgcaaatggncggtaggcgtgtacggtgggaggtctatataagcagagctcgtttagtgaaccgtcagatcgcctggagacgccatccacgctgttttgacctccatagaagacaccgggaccgatccagcctccggactctagcctaggccgcgggacggataacaatttcacacaggaamcagctatgaccactaggcttttgcaaaaagctatttaggtgacactatagaaggtacgcctgcaggtaccggtccggaattcccgggtcgacccacgcgtccggagcagcccgcgagggcggaagtgggagctgcgaccgcgctccctgtgaggtgggcaagcggcgaaatggcgccctccgggagtcttgcagttcccctggcagtcctggtgctgttgctttggggtgctccctggacgcacgggcggcggagcaacgttcgcgtcatcacggacgagaactggagagaactgctggaaggagactggatgatagaattttatgccccgtggtgccctgcttgtcaaaatcttcaaccggaatgggaaagttttgctgaatggggagaagatcttgaggttaatattgcgaaagtagatgtcacagagcagccaggactgagtggacggtttatcataactgctcttcctactatttatcattgtaaagatggtgaatttaggcgctatcagggtccaaggactaagaaggacttcataaactttataagtgataaagagtggaagagtattgagcccgtttcatcatggtttggtccaggttctgttctgatgagtagtatgtcagcactctttcagctatctatgtggatcaggacgtgccataactactttattgaagaccttggattgccagtgtggggatcatatactgtttttgctttagcaactctgttttccggactgttattaggactctgtatgatatttgtggcagattgcctttgtccttcaaaaaggcgcagaccacagccatacccatacccttcaaaaaaattattatcagaatctgcacaacctttgaaaaaagtggaggaggaacaagaggcggatgaagaagatgtttcagaagaagaagctgaaagtaaagaaggaacaaacaaagactttccacagaatgccataagacaacgctctctgggtccatcattggccacagataaatcctagttaaattttatagttatcttaatattatgattttgataaaaacagaagattgatcattttgtttggtttgaagtgaactgtgacttttttgaatattgcagggttcagtctagattgtcattaaattgaagagtctacattcagaacataaaagcactaggtatacaagtttgaaatatgatttaagcacagtatgatggtttaaatagttctctaatttttgaaaaatcgtgccaagcaataagatttatgtatatttgtttaataataacctatttcaagtctgagttttgaaaatttacatttcccaagtattgcattattgaggtatttaagaagattattttagagaaaaatatttctcatttgatataatttttctctgtttcactgtgtgaaaaaaagaagatatttcccataaatgggaagtttgcccattgtctcaagaaatgtgtatttcagtgacaatttcgtggtctttttagaggtatattccaaaatttccttgtatttttaggttatgcaactaataaaaactaccttacattaattaattacagttttctacacatggtaatacaggatatgctactgatttaggaagtttttaagttcatggtattctcttgattccaacaaagtttgattttctcttgtatttttcttacttactatgggttacattttttatttttcaaattggatgataatttcttggaaacattttttatgttttagtaaacagtatttttttgttgtttcaaactgaagtttactgagagatccatcaaattgaacaatctgttgtaatttaaaattttggccacttttttcagattttacatcattcttgctgaacttcaacttgaaattgttttttttttctttttggatgtgaaggtgaacattcctgatttttgtctgatgtgaaaaagccttggtattttacattttgaaaattcaaagaagcttaatataaaagtttgcattctactcaggaaaaagcatcttcttgtatatgtcttaaatgtatttttgtcctcatatacagaaagttcttaattgattttacagtctgtaatgcttgatgttttaaaataataacatttttatattttttaaaagacaaacttcatattatcctgtgttctttcctgactggtaatattgtgtgggatttcacaggtaaaagtcagtaggatggaacattttagtgtatttttactccttaaagagctagaatacatagttttcaccttaaaagaagggggaaaatcataaatacaatgaatcaactgaccattacgtagtagacaatttctgtaatgtccccttctttctaggctctgttgctgtgtgaatccattagatttacagtatcgtaatatacaagttttctttaaagccctctcctttagaatttaaaatattgtaccattgaagagtttggatgtgtaacttgtgatgccttagaaaaatatcctaagcacaaaataaacctttctaaccacttcawwaaagctgaagaccagtaattctgggtgntttttgaagg

SEQ ID NO: 1312 - DNA, 553 bp, Homo sapiens
agggacattttgatatacattgacccttgaacaacacaggggtttggggtggtgaccccccacacagtcaaaaatctctgtttaacttttgactccccgaaaacttagctactaatagcctaatgttgatcagaagccttactgataacataaacagttaatgaacagatattttatatgtattactgttttttgttttttgttttttgtttttttgagacggggtctcactctgtcacccaggctggagtgcagtggtgtgatctcggctcactgcaacctccgccctctgagttcaagtgattctcctgcctcagcttcccaagtagctgggattacaggcaccagccactgcaccaggctaattttttgtattttttcagtagagacgggttttcaccatcttggccaggctggtcttgaactcctgaccttgtgatccgcccgcctcagcctcccaaagtgctgggattacaggtgtgagccaccgcgcccggcctacatactgtattcttacaataaactagaaaaaaaaaaaaaaaaaaaaactcga

SEQ ID NO: 1313 - DNA, 553 bp, Homo sapiens
ggcacgaggacattttgatatacattgacccttgaacaacacaggggtttggggtggtgaccccccacacagtcaaaaatctctgtttaacttttgactccccgaaaacttagctactaatagcctaatgttgatcagaagccttactgataacataaacagttaatgaacagatattttatatgtattactgttttttgttttttgttttttgtttttttgagacggggtctcactctgtcacccaggctggagtgcagtggtgtgatctcggctcactgcaacctccgccctctgagttcaagtgattctcctgcctcagcttcccaagtagctgggattacaggcaccagccactgcaccaggctaattttttgtattttttcagtagagacgggttttcaccatcttggccaggctggtcttgaactcctgaccttgtgatccgcccgcctcagcctcccaaagtgctgggattacaggtgtgagccaccgcgcccggcctacatactgtattcttacaataaactagaaaaaaaaaaaaaaaaaaaaa

SEQ ID NO: 1314 - DNA, 1138 bp, Homo sapiens
cacgcgtccgtccacgcgttcggtttcctgggctactacgatggcgatgagtttcgagtggccgtggcagtatcgcttcccacccttctttacgttacaaccgaatgtggacactcggcagaagcagctggccgcctggtgctcgctggtcctgtccttctgccgcctgcacaaacagtccagcatgacggtgatggaagctcaggagagcccgctcttcaacaacgtcaagctacagcgaaagcttcctgtggagtcgatccagattgtattagaggaactgaggaagaaagggaacctcgagtggttggataagagcaagtccagcttcctgatcatgtggcggaggccagaagaatgggggaaactcatctatcagtgggtttccaggagtggccagaacaactccgtctttaccctgtatgaactgactaatggggaagacacagaggatgaggagttccacgggctggatgaagccactctactgcgggctctgcaggccctacagcaggagcacaaggccgagatcatcactgtcagcgatggccgaggcgtcaagttcttctagcagggacctgtctccctttacttcttacctcccacctttccagggctttcaaaaggagacagacccagtgtcccccaaagactggatctgtgactccaccagactcaaaaggactccagtcctgaaggctgggacctggggatgggtttctcacaccccatatgtctgtcccttggatagggtgaggctgaagcaccagggagaaaatatgtgcttcttctcgccctacctcctttcccatcctagactgtccttgagccagggtctgtaaacctgacactttatatgtgttcacacatgtaagtacatacacacatgcgcctgcagcacatgcttctgtctcctcctcctcccacccctttagctgctgttgcctcccttctcaggctggtgctggatccttcctaggggatgggggaagccctggctgcaggcagccttccaggcaatatgaagataggaggcccacgggcctggcagtgagaggtgtggccccacaccgatttatgatattaaaatctcaactcccaaaaaaaaaaaaaaaaaaaaaaaaaaaaaaaaaaaaaa

SEQ ID NO: 1315 - DNA, 2054 bp, Homo sapiens
  misc_feature (2054)..(2054): n equals a,t,g, or c
tttcgagcggccgcccgggcaggtacttttttttttttttttttttttttttttttttttttttttttttttttttttttggagtctataatttttaataattttaaactagctacaaaatgtcaatcacttcacaaactgacagaggagacaggaggaatttaatattacatgctataatgatatttatctcacagtttatatttcattcatttatattatttttttaaaaggtttctttatcagctactaaacatctcagcaatttggtgtgcatagctctagattaagcaacaaagaattgtactgataacaaaccacaggggaaatggtggttagtaagagtcagccttataaaatttacatccacactgtttcacagcaagattgctctctccaaaacgtagccatcaaaagcagcaaacaaaccctatattacatccatttgacataatttcagccaaacatatattttgctggaaatgattaaatggtgagtgtgtcaaatccatcttttttaaaattcttttttttaaaaaaggatgattatgatttagaagtctctatatattgacaggaaaaaagtgacactactgcacttttgctggtataacttaatcttgacagtgtctcaatactgagcatgctttgttgttgttctgttgttgttgctgttgttttgtgtgtgtgtgtgttgtctcatcagtatgctactgtcatggaaagtttttgtttaagtaggaatctaaaaatctatttagttctcatgcataaatgcataaatcacatcacttttagtgcaatgcctgttatgtaattccacattgtctaatcatgaaatcataaagacagataacagccatgaggaaccaaagacggcacattttgagagattcagagcctgacactcaaaggaccgtggcagtaactctgtggaatgtcacagttttacaagaacaatactgtggattgaaagaatcaacagcacattgagcattcctaaattgttgttattcagcaaatgccaccgaggagagaaaatgaaaaatgaaactcaagacmtcaaggagttagagccaccaaatgaccactatgtacaacctttggaaagaaagagaccaagagagaacaaaagacacaaagtattgttgggaagctgacagatgacacaggacaacattcacaatgggggtggactgatgtgtgttatgtgtgcagacctactagataataccatgagaaaagcatgaaggagctatcttgcccgacagcatttggaggagaacacgggtgggcacacttaaccacttcccagcatctttgttgcacgttggttggcctcatcaattctggttttgttggaatcagccttctccatgatcctgtcgatctggcgattctgtgtatcgatctcattgcccatatccagggccatgtgacggaggttcccgatgatgccgctcacctgctctaggttttcatccatttcattttctcgggcatcatttgttacctgcggatgaagccgccactgatggccatctgctcccgttcgtccactacacgagcaggctggctggccaccactccgtcctgattattgccccaggcttttttgtaagcatcacttgatttaagcttgttacaaggacatatgaaaaggccacagcatttccctaaatcttttaaatttttctcagcctccttcatgtcttggttgatwtggtycatsccttcytcrayrcgwtcsagttgttctccttgttcatccaacataaccaaagtcctgataccagcatctttactctcttcaaccagttgcagcatacgacgggtgctttccagcgactcatcagccaactggtcagcccttcgctgcatctcctccagctcattgcgcatgtctgcgtcttcggccatggtagcggtggggagtggctgggcgcctgggctggggggtcagtgacgggtttggctctggacctgggcttctcgggagggttgtgttctccgggcctctgcaggttgcaactgtggtggagccgccgagcccn

SEQ ID NO: 1316 - DNA, 1034 bp, Homo sapiens
tttttttttttttttttttgggagtctataatttttaataattttaaactagctacaaaatgtcaatcacttcacaaactgacagaggagacaggaggaatttaatattacatgctataatgatatttatctcacagtttatatttcattcatttatattatttttttaaaaggtttctttatcagctactaaacatctcagcaatttggtgtgcatagctctagattaagcaacaaagaattgtactgataacaaaccacaggggaaatggtggttagtaagagtcagccttataaaatttacatccacactgtttcacagcaagattgctctctccaaaacgtagccatcaaaagcagcaaacaaaccctatattacatccatttgacataatttcagccaaacatatattttgctggaaatgattaaatggtgagtgtgtcaaatccatcttttttaaaattctttttttttaaaaaaggatgattatgatttagaagtctctatatattgacaggaaaaaagtgacactactgcacttttgctggtataacttaatcttgacagtgtctcaatactgagcatgctttgttgttgttctgttgttgttgctgttgttttgtgtgtgtgtgtgttgtctcatcagtatgctactgtcatggaaagtttttgtttaagtaggaatctaaaaatctatttagttctcatgcataaatgcataaatcacatcacttttagtgcaatgcctgttatgtaattccacattgtctaatcatgaaatcataaagacagataacagccatgaggaaccaaagacggcacattttgagagattcagagcctgacactcaaaggaccgtggcagtaactctgtggaatgtcacagttttacaagaacaatactgtggattgaaagaatcaacagcacattgagcattcctaaattgttgttattcagcaaatgccaccgaggagagaaaatgaaaaatgaaactcaagacatcaaggagttagagcggcacgagctcgtgcc

SEQ ID NO: 1317 - DNA, 1616 bp, Homo sapiens
  misc_feature (1561)..(1561): n equals a,t,g, or c
ggaaggaccacaaacatcccaccccttccagcccagcatcgtcctatgaggatctgcccagtttgcgtggggcaggagtggggttggtggaaagggaatgggggatgtgctgtgtctgggcagagagggccaagtagaaggtgggccctgggcacttgttctttgcttgagcctgacctcccctccacccgtccagtgtgctctggcacctgtcagcccacccagttccgctgcagcaatggctgctgcatcgacagtttcctggagtgtgacgacacccccaactgccccgacgcctccgacgaggctgcctgtgaaaaatacacgagtggctttgacgagctccagcgcatccatttccccagtgacaaagggcactgcgtggacctgccagacacaggactctgcaaggagagcatcccgcgctggtactacaaccccttcagcgaacactgcgcccgctttacctatggtggttgttatggcaacaagaacaactttgaggaagagcagcagtgcctcgagtcttgtcgcggcatctccaagaaggatgtgtttggcctgaggcgggaaatccccattcccagcacaggctctgtggagatggctgtcgcagtgttcctggtcatctgcattgtggtggtggtagccatcttgggttactgcttcttcaagaaccagagaaaggacttccacggacaccaccaccacccaccacccacccctgccagctccactgtctccactaccgaggacacggagcacctggtctataaccacaccacccggcccctctgagcctgggtctcaccggctctcacctggccctgcttcctgcttgccaaggcagaggcctgggctgggaaaaactttggaaccagactcttgcctgtttcccaggcccactgtgcctcagagaccagggctccagcccctcttggagaagtctcagctaagctcacgtcctgagaaagctcaaaggtttggaaggagcagaaaacccttgggccagaagtaccagactagatggacctgcctgcataggagtttggaggaagttggagttttgtttcctctgttcaaagctgcctgtccctaccccatggtgctaggaagaggagtggggtggtgtcagaccctggaggccccaaccctgtcctcccgagctcctcttccatgctgtgcgcccagggctgggaggaaggacttccctgtgtagtttgtgctgtaaagagttgctttttgtttatttaatgctgtggcatgggtgaagaggaggggaagaggcctgtttggcctctctgtcctctcttcctcttcccccaagattgagctctctgcccttgatcagccccaccctggcctagaccagcagacagagccaggagaggctcagctgcattccgcagcccccacccccaaggttctccaacatcacagcccagcccacccactgggtaataaaagtggtttgtggaaaaaaaaaaaaaaaaaaaaaaaaaaaaaaaaaaaaaaaaaaaaaaaaaagggcggccgctctagaggatccctcgaggggccncaagttacgcgtgcatgcgacgtcatagctctctcccgtatagtgagtcgtatta

SEQ ID NO: 1318 - DNA, 775 bp, Homo sapiens
  misc_feature (15)..(15): n equals a,t,g, or c
  misc_feature (41)..(41): n equals a,t,g, or c
  misc_feature (167)..(167): n equals a,t,g, or c
  misc_feature (169)..(169): n equals a,t,g, or c
  misc_feature (174)..(175): n equals a,t,g, or c
  misc_feature (745)..(745): n equals a,t,g, or c
  misc_feature (754)..(755): n equals a,t,g, or c
  misc_feature (757)..(757): n equals a,t,g, or c
  misc_feature (769)..(769): n equals a,t,g, or c
ttgggggtgtcgtcncattccaaggaaacctgtcgatgcancagccattctgcagcggaactgggtagctgacaggtccagagcacactggacggtgaagggaagtcaggctcaagcaaagaccaagtgcccagggcccaccttctacttggccctctctgcccagncncagcnncatcccccwttccctttccaccaaccccactcctgccccacgcaaactgggcagatcctcataggacgatgctgggctggaaggggtgggatgtttgtggtccttccacaaactctgaggggaggaatggcttggtcaaaggcaggctgcttaggggcatagggatgatatgggctagagatgtggtggggatgggggatggggaggggagtaaagcccacctggatggcgcctttccatggaggggccctgggggaaagtcgcctgagccccagagctgcctctcaaaggcccaccttgcacaccccgacaggctagaatgcactcttcttcccgaaggtagttgttcttgttgcccaagcagcctccataaacgaaactcttgcagatctgctccgtggggtcatagtaccagcgtgggaaagagccccggcagcgacccaccttgttggatgcgaggcagtagtcttctgtctgcttggtggacagcacagtgactgtgacgttggccgtgtcctctgggtggtctgagctagtcactgtcagctggaacaggtaggtgccttccangagtccccnnangttcttcccgtngaaagc

SEQ ID NO: 1319 - DNA, 991 bp, Homo sapiens
  misc_feature (961)..(961): n equals a,t,g, or c
  misc_feature (965)..(965): n equals a,t,g, or c
  misc_feature (975)..(975): n equals a,t,g, or c
  misc_feature (990)..(991): n equals a,t,g, or c
agccatggagcggagcttgctggcggcgaggccgcggcgacaaggtagccacccccgcagcatgcctcgaccgcggtccgcagctgcaccgcctctccccgccccccagggtgcgctggtcccggtcgcgcgctcagacctccgcatcccgggcgtggtcggttaagtccccggccgtgacccaggcccggggagctagtctccgcccttcgctcttacggatcccctcggagtacgccgcaccatgcagctcaggctcttccggcgcctccttctcgccgctttgctgctggtgatcgtctggaccctcttcgggccttcggggttgggggaggagctgctgagcctctcactagcctccctgctcccagcccccgcctcaccggggccgcccctggccctgccccgcctcttgatccccaaccaggaagcttgcagtggtcccggggcccctcccttcctgctcatcctggtgtgcacggctccggagaacctgaaccagagaaacgccattcgggcttcgtggggcgggctgcgcgaggcccgggggytcagggtacagacgctattcttgctgggagagccgaacgcacagcaccccgtgtggggttcccaggggagtracctggcctcggagtcagcagcccagggggatatcttgcaggccgccttccaggactcctaccgcaacctcaccctaaagaccctcagcgggctgaactgggctgagaaacactgccccatggcccgatacgtcctcaagacggacgatgatgtgtatgtcaacgtccctgaactggtatcagagctggtcttgcgagggggccgttgggggcaatgggagagaagcacggaaccccagagagaggctgagcaggaaggaggccaggttttgcacagcgaggaagtgcctcttctgtactggggccgggtgcaaaagcgcgtgggaaagctttttccngttnagtccccccnttaagtattcccgtnn

SEQ ID NO: 1320 - DNA, 950 bp, Homo sapiens
  misc_feature (918)..(918): n equals a,t,g, or c
  misc_feature (935)..(935): n equals a,t,g, or c
  misc_feature (939)..(939): n equals a,t,g, or c
  misc_feature (943)..(943): n equals a,t,g, or c
  misc_feature (945)..(945): n equals a,t,g, or c
ttttttttttgaagtggagacaagtttattgaggagcttgacacccctcttctgccctagcttgagagaacaactgcagcatttttttctttttctcttcccgatgaccatcttttgggctggcgggccaggcccctgggtgtctcccatatcgctgtctttagtgagactgaggatctggtataaggaaacagatcagctgcagccagtgagggcccctgcgttgggcctgggagagagaaggtcctgttcctgcctttcctgtggccccaggcactctcagctctgaagccaggctattgctcgacaccgcaggatgcccaggactccctggaaccaggagcaaaagggcgcagtcctttccccgtcagagccacccaccagcttccaggcttcctgcatcttccaggggtccagcctgtgggacgtcagcaggaatttcccatagcagcaccggtctagcgggtagtgggtggcaccagccrgcttgacacactgtgttggggcgaggcctcctcgtcgggcacttacccccacaaagacatcctctaatgggagaaggggtgcccggctggccaccttgagaatgagctgcacagcagacgctgacagcacataccccgtgcctgaggcatagggtggaaaggggccccaggtgtgaggccactgctcctctgatacgcggtgcctgccccccggtgtccgagaggggttcacgcgccagtgcacccggcccaagtacagaagaggcacttcctcgctgtgcaaaacctggcctccttcctgctcagcctctctctggggttccgtgcttctctcccattgcccccaacggccccctcgcaagaccagctctgataccagttcagggacgttgacatacacatcatcgtccgtcttgaggacgtatcgggccangggggcagttcgaaacnaacnggtntngtctt

SEQ ID NO: 1321 - DNA, 3533 bp, Homo sapiens
tcgacccacgcgtccgcccacgcgtccgcccacgcgtccgaagcggtggctgggctgcgcttgggtccgtcgctgcttcggtgtccctgtcgggcttcccagcagcggcctagcgggaaaagtaaaagatgtctgaatatattcgggtaaccgaagatgagaacgatgagcccattgaaataccatcggaagacgatgggacggtgctgctctccacggttacagcccagtttccaggggcgtgtgggcttcgctacaggaatccagtgtctcagtgtatgagaggtgtccggctggtagaaggaattctgcatgccccagatgctggctggggaaatctggtgtatgttgtcaactatccaaaagataacaaaagaaaaatggatgagacagatgcttcatcagcagtgaaagtgaaaagagcagtccagaaaacatccgatttaatagtgttgggtctcccatggaaaacaaccgaacaggacctgaaagagtattttagtacctttggagaagttcttatggtgcaggtcaagaaagatcttaagactggtcattcaaaggggtttggctttgttcgttttacggaatatgaaacacaagtgaaagtaatgtcacagcgacatatgatagatggacgatggtgtgactgcaaacttcctaattctaagcaaagccaagatgagcctttgagaagcagaaaagtgtttgtggggcgctgtacagaggacatgactgaggatgagctgcgggagttcttctctcagtacggggatgtgatggatgtcttcatccccaagccattcagggcctttgcctttgttacatttgcagatgatcagattgcgcagtctctttgtggagaggacttgatcattaaaggaatcagcgttcatatatccaatgccgaacctaagcacaatagcaatagacagttagaaagaagtggaagatttggtggtaatccaggtggctttgggaatcagggtggatttggtaatagcagagggggtggagctggtttgggaaacaatcaaggtagtaatatgggtggtgggatgaactttggtgcgttcagcattaatccagccatgatggctgccgcccaggcagcactacagagcagttggggtatgatgggcatgttagccagccagcagaaccagtcaggcccatcgggtaataaccaaaaccaaggcaacatgcagagggagccaaaccaggccttcggttctggaaataactcttatagtggctctaattctggtgcagcaattggttggggatcagcatccaatgcagggtcgggcagtggttttaatggaggctttggctcaagcatggattctaagtcttctggctggggaatgtagacagtggggttgtggttggttggtatagaatggtgggaattcaaatttttctaaactcatggtaagtatattgtaaaatacatatgtactaagaattttcaaaattggtttgttcagtgtggagtatattcagcagtatttttgacatttttctttagaaaaaggaagagctaaaggaattttataagttttgttacatgaaaggttgaaatattgagtggttgaaagtgaactgctgtttgcctgattggtaaaccaacacactacaattgatatcaaaaggtttctcctgtaatattttatccctggacttgtcaagtgaattctttgcatgttcaaaacggaaaccattgattagaactacattctttaccccttgttttaatttgaaccccaccatatggatttttttccttaagaaaatctccttttaggagatcatggtgtcacagtgtttggttcttttgttttgttttttaacacttgtctcccctcatacacaaaagtacaatatgaagccttcatttaatctctgcagttcatctcatttcaaatgtttatggaagaagcacttcattgaaagtagtgctgtaaatattctgccataggaatactgtctacatgctttctcattcaagaattcgtcatcacgcatcacaggccgcgtctttgacggtgggtgtcccatttttatccgctactctttatttcatggagtcgtatcaacgctatgaacgcaaggctgtgatatggaaccagaaggctgtctgaacttttgaaaccttgtgtgggattgatggtggtgccgaggcatgaaaggctagtatgagcgagaaaaggagagagcgcgtgcagagacttggtggtgcataatggatattttttaacttggcgagatgtgtctctcaatcctgtggctttggtgagagagtgtgcagagagcaatgatagcaaataatgtacgaatgttttttgcattcaaaggacatccacatctgttggaagacttttaagtgagtttttgttcttagataacccacattagatgaatgtgttaagtgaaatgatacttgtactccccctacccctttgtcaactgctgtgaatgctgtatggtgtgtgttctcttctgttactgatatgtaagtgtggcaatgtgaactgaagctgatgggctgagaacatggactgagcttgtggtgtgctttgcaggaggacttgaagcagagttcaccagtgagctcaggtgtctcaaagaagggtggaagttctaatgtctgttagctacccataagaatgctgtttgctgcagttctgtgtcctgtgcttggatgctttttataagagttgtcattgttggaaattcttaaataaaactgatttaaataatatgtgtctttgttttgcagccctgaatgcaaagaattcatagcagttaattccccttttttgacccttttgagatggaactttcataaagtttcttggcagtagtttattttgcttcaaataaacttatttgaaaagttgtctcaagtcaaatggattcatcacctgtcatgcattgacacctgatacccagacttaattggtatttgtycttgcattggccaaagtgaaaatttttttttttcttttgaaatctagttttgaataagtctgggtgaccgcacctaaaatgcacttgcactattactcagcagcagtaacatggtaacacttaaaatggtactcggggacctccaaagactaaactgacaagccttcaaggagcccaggggtaagttaacttgtcaacggcatggtttaatcccttctttacacttgtgtaaatttcagttactggtcatagaaggctttcaatgttgagtggccttttattaacatgtttatggtactgcatagatacgggtatttattttaccctaagaagattttgaagtttaaaagtacttaaactatttggcaaagatttgtttttaaaaatctatttggtcaatctaaatgcattcattctaaaaaattttttgaaccagataaataaaatttttttttgacaccacagtttagtgtctggagtcttactggaaaaacacgatttctttttatatgtgatatacagatgctggaaagttmcctttaaaaattgagtctctaaag

SEQ ID NO: 1322 - DNA, 405 bp, Homo sapiens
ggcacgagctcaaccacagcactacacttgctgaactggctcctggggccatgaggctgtcactgccactgctgctgctgctgctgggagcctgggccatcccagggggcctcggggacagggcgccactcacagccacagccccacaactggatgatgaggagatgtactcagcccacatgcccgctcacctgcgctgtgatgcctgcagagctgtggcttaccagatgtggcaaaatctggcaaaggcagagaccaaacttcatacctcaaactctggggggcggcgggagytgagcgagttkgtytacaaggatgtcctkgaccggagytsttccggaactkgcaggaytasggakttcgagaagtkgaccaartgaaagtcttaacaaggcccaggcttag

SEQ ID NO: 1323 - DNA, 801 bp, Homo sapiens
  misc_feature (601)..(601): n equals a,t,g, or c
ctggcacgagctcaaccacagactacacttgctgaactggctcctggggccatgaggctgtcactgccactgctgctgctgctgctgggagcctgggccatcccagggggcctcggggacagggcgccactcacagccacagccccacaactggatgatgaggagatgtactcagcccacatgcccgctcacctgcgctgtgatgcctgcagagctgtggcttaccagatgtggcaaaatctggcaaaggcagagaccaaacttcatacctcaaactctggggggcggcgggagctgagcgagttggtctacacggatgtcctggaccggagctgctcccggaactggcaggacttagcgaggggccagagccaagcatcagcgtgatggtcacagggggcccctggcctaccaggctctccaggacatgtttgcactacttgggggagtttggagaagaccagatctatgaagcccaccaacaaggccgaggggctctggaggcattgctatgtgggggaccccagggggcctgctcagagaaggtgtcagccacaagagaagagctctagtcctggactctaccctyctctgaaagaanctggggcttgctctgacggtctccactcccgtctgcaggcagccaggagggcaggaagcccttgctctgkgctgccatcctgcctycctcctccagcctcagggcactcgggcctgggtgggagtcaacgccttcccctctggactcaaataaaacccagtgacctcaaaaaaaaaaaaaaaaaaaaaaaaaaactcgag

SEQ ID NO: 1324 - DNA, 819 bp, Homo sapiens
ctggctcctggggccatgaggctgtcactgccactgctgctgctgctgctgggagcctgggccatcccagggggcctcggggacagggcgccactcacagccacagccccacaactggatgatgaggagatgtactcagcccacatgcccgctcacctgcgctgtgatgcctgcagagctgtggcttaccagatgtggcaaaatctggcaaaggcagagaccaaacttcatacctcaaactctggggggcggcgggagctgagcgagttggtctacacggatgtcctggaccggagctgctcccggaactggcaggactacggagttcgagaagtggaccaagtgaaacgtctcacaggcccaggacttagcgaggggccagagccaagcatcagcgtgatggtcacagggggcccctggcctaccaggctctccaggacatgtttgcactacttgggggagtttggagaagaccagatctatgaagcccaccaacaaggccgaggggctctggaggcattgctatgtgggggaccccagggggcctgctcagagaaggtgtcagccacaagagaagagctctagtcctggactctaccctcctctgaaagaagctggggcttgctctgacggtctccactcccgtctgcaggcagccaggagggcaggaagcccttgctctgtgctgccatcctgcctccctcctccagcctcagggcactcgggcctgggtgggagtcaacgccttcccctctggactcaaataaaacccagtgacctcaaaaaaaaaaaaaaaaaaaaaaaaaaaaaaaaaaaaaa

SEQ ID NO: 1325 - DNA, 642 bp, Homo sapiens
acaagaacttctgtgaaaggagacccagtgctgaggcaccagcgcatccacaggcccgagaggccctttgcctgtggcgattgtgggaagggcttcatttacaagtctaagcttgcggagcacatcagagtacacacaaaatcctgtcctgctccaaatgaactggacattaagaaaaggctcagccaactgtttgcaatgatagaggccgattggagttgaggcagagtgggacatccaaagcgttgagcaggattggtattgcccaggaatccacagcaacagtagccagacccgctggtagacgggttttaggagcaggtatccttctttgagcaagagtgtcatgcaagttaggaatatgaagaaccacaaaggattttctcttcagaagcatcaccaattatatttctttcttttttttttttttttttccaagactccgtctcaaaaaaaaaaaaagtaaaatttattttttatattcattaataaatgctgttgtgcttggagatgatcactcatataacatgtcatttttttggttctgttttggtttggtttttgccaattattttgttatatttccaaaaaactaaataaaaatcatttttattttttaaaaaaaaaaaaaaaaaaaaaaac

SEQ ID NO: 1326 - DNA, 1490 bp, Homo sapiens
gaattcggcacgaggaagagtggtctgatggttctgtttgctgaagaaaaaaaaagtggttaaaggactagtgaaatcaaagaaggtgatttcaacctttccttttactgagtttgaattgttacgcgaatcctaaatagaaatgtcttgtcaagcaaacatctaggacagcattttaagatatttactaaataagtaaaagaagatatgggactattgaattgtagatatagtcatttctgtggatgtattagttgtctccctggagtcagaggaactcagagaatgaatgtagaaatgggataatatgctggtgctattgactcacttataggacagtgtgatcggtgcacacccctgaaagccctgctttttccaacagttccattgtgaacgtgcctggtgagtctactcttcgccgagatttcctgagactgcagcaggagaacaaggaacgttccgaggctcttcggagacaacagttactacaggagcaacagctccgggagcaggaagaatataaaaggcaactgctggcagagagacagaagcggattgagcagcagaaagaacagaggcgacggctagaagaggtagcaaaaggaaaatgtccaagttggttggtcttttctctttctgcatttacactggtagttagccactcagaggaatatcctctgtagcttcctggggtaatacttatcccctggcacagctgtttacataacttgtgaaagaaagcttacgctttggactggcaggccttcacattccttgaggccttagaaatgttttccttccttgtgaaaactttaaggatctgccccacagttactcatcaacatactgtgttagatgcagagcaagtgtcccaaagatggcatcagaccagttttgtgaagtctttttgcattatggtttaagttggcttgctcaggattgacctgattgcttttctactctcagcctctgggtcccagtttgtatgkgcatatttttctgaaacttcagactttttcacatgaaagtttttttttttctaaatgccttaaccttgggtatactcaagagtaggggatgcagatgaggacaaatggctaatgcagggcttaatacctaggtgacgggttgacaggtgcagcaaaccaccatggcacacgtttacctatgtaacaaaccacgttctgcagtgtatcccagaacttaaagtaaaataaaataaaataaaaaagataagatttggacatagaggcggaaacacgggaagagtgccgcgtggcaagggaggcaagatgggaatgatggtctacaagtcaaggaaggaccaatattgcctgcaaccacctaagctaggaagaggcaaagaaggacccttccctagagccttcacaccttgatatcagagttccagcatccagaactgtcagaaaataaatttttactggtttaagccaaaaaaaaaaawaaaaaaaaaaaaacctcgggggttt

SEQ ID NO: 1327 - DNA, 901 bp, Homo sapiens; identical to SEQ ID NO: 114
  misc_feature (8)..(8): n equals a,t,g, or c
  misc_feature (57)..(57): n equals a,t,g, or c
  misc_feature (68)..(68): n equals a,t,g, or c

SEQ ID NO: 1328 - DNA, 801 bp, Homo sapiens; identical to SEQ ID NO: 1323
  misc_feature (601)..(601): n equals a,t,g, or c

SEQ ID NO: 1329 - DNA, 2154 bp, Homo sapiens
  misc_feature (2147)..(2147): n equals a,t,g, or c
  misc_feature (2152)..(2152): n equals a,t,g, or c
  misc_feature (2154)..(2154): n equals a,t,g, or c
agtcgcaggctatgagcctggctacatcccgggctatgatactccgggctatgtgcctggctaccatggccccgggtacgcctgccgactaccccgctggtcggcctgtgcccggttaccgtggcctgtctacaacgttacgggagaggaggtctccttcagcttcagcaccagctccgcccctgctgtcctgctctacgtcaktwcctttgttcgtgactacatggctgtgctcatcaaggatgatgggacccttcagctgcgatatcagctgggcaccagtccctacgtgtaccagctaaccwckygmccagtgaccgatggccagccccatagcatcaatatcacccgtgtttaccggaacctcttcatccaggtggactacttccactgacagagcagaagttctcgctgttggtggacagccagttggactcacccaaggccttgtatttagggcgtgtgatggagacaggagtattgacccggagatccagcgctacaacaccccaggtttctcaggctgcctgtctggtgttcgattcaacaacgtggctcccctcaagacccacttccgaacccctcgacccatgactgctgagctagctgaggcccttcgagttcagggagaactgtccgaatctaattgcggasctatgccacgtcttgtttcagaggtgccacctgagcttgatccctggtatctgcccccagacttcccctactaccatgatgaaggatgggttgccatacttttaggctttttggtggcctttctgctgctggggctggtgggaatgttggtgctcttctatctgcaaaatcatcgctataagggctcctaccataccaatgagcccaaggctgcccacgagtaccatcctggcagcaaacctcccctacccacttcaggccctgcccaggtccccacccctacagcagctcccaaccaagctccagcctcagccccagccccagccccaactccagccccagcccctggcccccgggatcagaacctaccccagatcctggaggagtccaggtctgaatgagtcagaagggcttctgggaccaattccagctcctgacattcccccagtcctgcctctcccccatcctatcagggacatttggctcctcttagctggctctgctcatccagaggatattcccccatcccccccccatcaagtttggtgggcagagctacagatgggacccaagggagtggccgagcctcactgcctaaaccaatgcccttctcatccctgtttccccaggctcctggctgtttatctgccccaaaggagaagcctcatggggttgacataggtcctttctgccatctctgttccagctgctgtcagggattaacaacagagtgtaggggagattaactgcctcccttccaatagacactatcagcagggacagatgtgtgggagtgcagggctgcagagggtatggggggaggaggctgctaaaccctatcccccagcctcccccctgccctgaagatcttccatttgcttccactcagctggaggctcaagagggcttgatggctgtcccctgcccccctccttttgttttgtacacagagaccaagaggcctcagtttagcaccttagtacctccgctgcttcacttgctttagccaaagccataaaaaacctgcaacgtagagaaaataatgcagataccctgactagccagccctctactcctccaaccttttccaagatatgcaatggcctttgtgcctgcccaaaggcttcgccccctccagtgcatgaggaaccctctttcctccgctcagagatgctgcttcatttacccaggaggtcatattctttatatatattttttgttgcaaagtgtctctctagagaaactctatatattattcgaatttttaaattatttgtttatatataaaagaaaagctcaattggctgtgctgtcctgtgctgtgctgtgcccacagtctgtagtttgcctttcctgtgttggaagtgtcgtgagtcctgctggtcacccaccagcctggtccggcctccactctgaagcagggttgagcctgctgtgctctcagacgcggagccgttccaataaagcagagtggcagaaaaaaaaaaaaaaanaaaangn

SEQ ID NO: 1330 - DNA, 859 bp, Homo sapiens
tcctggggccatgaggctgtcactgccactgctgctgctgctgctgggagcctgggccatcccagggggcctcggggacagggcgccactcacagccacagccccacaactggatgatgaggagatgtactcagcccacatgcccgctcacctgcgctgtgatgcctgcagagctgtggcttaccagatgtggcaaaatctggcaaaggcagagaccaaacttcatacctcaaactctggggggcggcgggagctgagcgagttggtctacacggatgtcctggaccggagctgctcccggaactggcaggactacggagttcgagaagtggaccaagtgaaacgtctcacaggcccaggacttagcgaggggccagagccaagcatcagcgtgatggtcacagggggcccctggcctaccaggctctccaggacatgtttgcactacttgggggagtttggagaagaccagatctatgaagcccaccaacaaggccgaggggctctggaggcattgctatgtgggggaccccagggggcctgctcagagaaggtgtcagccacaagagaagagctctagtcctggactctaccctcctctgaaagaagctggggcttgctctgacggtctccactcccgtctgcaggcagccaggagggcaggaagcccttgctctgtgctgccatcctgcctccctcctccagcctcagggcactcgggcctgggtgggagtcaacgccttcccctctggactcaaataaaacccagtgacctcaaaaaaaaaaaaaaaaaaaaaaaaaaaaaaaaaaaaaaaaaaaaaaaaaaaaaaaaaaaaaaaaaaaaaaaaaaaaaaaaaaa

SEQ ID NO: 1331 - DNA, 819 bp, Homo sapiens; identical to SEQ ID NO: 1324

(The sequence listing continues in the following parts.)

What is claimed is:

1. A method of using a polypeptide for the preparation of a diagnostic or pharmaceutical composition for diagnosing or treating a medical condition, wherein said polypeptide comprises an amino acid sequence at least 95% identical to a sequence selected from the group consisting of:
(a) a full length polypeptide of SEQ ID NO:Y or a full length polypeptide encoded by the cDNA Clone ID in ATCC Deposit No:Z corresponding to SEQ ID NO:Y as referenced in Table 1A;
(b) a predicted secreted form of SEQ ID NO:Y or a secreted form of the polypeptide encoded by the cDNA Clone ID in ATCC Deposit No:Z corresponding to SEQ ID NO:Y as referenced in Table 1A;
(c) a polypeptide fragment of SEQ ID NO:Y or a polypeptide fragment encoded by the cDNA Clone ID in ATCC Deposit No:Z corresponding to SEQ ID NO:Y as referenced in Table 1A;
(d) a polypeptide fragment of SEQ ID NO:Y or a polypeptide fragment encoded by the cDNA Clone ID in ATCC Deposit No:Z corresponding to SEQ ID NO:Y as referenced in Table 1A, wherein said fragment has biological activity;
(e) a polypeptide domain of SEQ ID NO:Y as referenced in Table 1B;
(f) a polypeptide domain of SEQ ID NO:Y as referenced in Table 2; and
(g) a predicted epitope of SEQ ID NO:Y as referenced in Table 1B.

2. The method of claim 1, wherein said polypeptide comprises a heterologous amino acid sequence.

3. The method of using the polypeptide of claim 1, wherein said polypeptide comprises an amino acid sequence 100% identical to a sequence selected from the group consisting of:
(a) a full length polypeptide of SEQ ID NO:Y or a full length polypeptide encoded by the cDNA Clone ID in ATCC Deposit No:Z corresponding to SEQ ID NO:Y as referenced in Table 1A;
(b) a predicted secreted form of SEQ ID NO:Y or a secreted form of the polypeptide encoded by the cDNA Clone ID in ATCC Deposit No:Z corresponding to SEQ ID NO:Y as referenced in Table 1A;
(c) a polypeptide fragment of SEQ ID NO:Y or a polypeptide fragment encoded by the cDNA Clone ID in ATCC Deposit No:Z corresponding to SEQ ID NO:Y as referenced in Table 1A;
(d) a polypeptide fragment of SEQ ID NO:Y or a polypeptide fragment encoded by the cDNA Clone ID in ATCC Deposit No:Z corresponding to SEQ ID NO:Y as referenced in Table 1A, wherein said fragment has biological activity;
(e) a polypeptide domain of SEQ ID NO:Y as referenced in Table 1B;
(f) a polypeptide domain of SEQ ID NO:Y as referenced in Table 2; and
(g) a predicted epitope of SEQ ID NO:Y as referenced in Table 1B.

4. The method of claim 3, wherein said polypeptide comprises a heterologous amino acid sequence.

5. A method of using an antibody or fragment thereof for the preparation of a diagnostic or pharmaceutical composition for diagnosing or treating a medical condition, wherein said antibody or fragment thereof binds a polypeptide comprising an amino acid sequence at least 95% identical to a sequence selected from the group consisting of:
(a) a full length polypeptide of SEQ ID NO:Y or a full length polypeptide encoded by the cDNA Clone ID in ATCC Deposit No:Z corresponding to SEQ ID NO:Y as referenced in Table 1A;
(b) a predicted secreted form of SEQ ID NO:Y or a secreted form of the polypeptide encoded by the cDNA Clone ID in ATCC Deposit No:Z corresponding to SEQ ID NO:Y as referenced in Table 1A;
(c) a polypeptide fragment of SEQ ID NO:Y or a polypeptide fragment encoded by the cDNA Clone ID in ATCC Deposit No:Z corresponding to SEQ ID NO:Y as referenced in Table 1A;
(d) a polypeptide fragment of SEQ ID NO:Y or a polypeptide fragment encoded by the cDNA Clone ID in ATCC Deposit No:Z corresponding to SEQ ID NO:Y as referenced in Table 1A, wherein said fragment has biological activity;
(e) a polypeptide domain of SEQ ID NO:Y as referenced in Table 1B;
(f) a polypeptide domain of SEQ ID NO:Y as referenced in Table 2; and
(g) a predicted epitope of SEQ ID NO:Y as referenced in Table 1B.

6. The method of using an antibody or fragment thereof of claim 5, wherein said antibody or fragment thereof binds a polypeptide 100% identical to a sequence selected from the group consisting of:
(a) a full length polypeptide of SEQ ID NO:Y or a full length polypeptide encoded by the cDNA Clone ID in ATCC Deposit No:Z corresponding to SEQ ID NO:Y as referenced in Table 1A;
(b) a predicted secreted form of SEQ ID NO:Y or a secreted form of the polypeptide encoded by the cDNA Clone ID in ATCC Deposit No:Z corresponding to SEQ ID NO:Y as referenced in Table 1A;
(c) a polypeptide fragment of SEQ ID NO:Y or a polypeptide fragment encoded by the cDNA Clone ID in ATCC Deposit No:Z corresponding to SEQ ID NO:Y as referenced in Table 1A;
(d) a polypeptide fragment of SEQ ID NO:Y or a polypeptide fragment encoded by the cDNA Clone ID in ATCC Deposit No:Z corresponding to SEQ ID NO:Y as referenced in Table 1A, wherein said fragment has biological activity;
(e) a polypeptide domain of SEQ ID NO:Y as referenced in Table 1B;
(f) a polypeptide domain of SEQ ID NO:Y as referenced in Table 2; and
(g) a predicted epitope of SEQ ID NO:Y as referenced in Table 1B.

7. A method of using a nucleic acid molecule for the preparation of a diagnostic or pharmaceutical composition for diagnosing or treating a medical condition, wherein said nucleic acid molecule comprises a polynucleotide sequence at least 95% identical to a sequence selected from the group consisting of:
(a) a polynucleotide fragment of SEQ ID NO:X as referenced in Table 1A;
(b) a polynucleotide encoding a full length polypeptide of SEQ ID NO:Y or a full length polypeptide encoded by the cDNA Clone ID in ATCC Deposit No:Z corresponding to SEQ ID NO:Y as referenced in Table 1A;
(c) a polynucleotide encoding a predicted secreted form of SEQ ID NO:Y or a secreted form of the polypeptide encoded by the cDNA Clone ID in ATCC Deposit No:Z corresponding to SEQ ID NO:Y as referenced in Table 1A;
(d) a polynucleotide encoding a polypeptide fragment of SEQ ID NO:Y or a polypeptide fragment encoded by the cDNA Clone ID in ATCC Deposit No:Z corresponding to SEQ ID NO:Y as referenced in Table 1A;
(e) a polynucleotide encoding a polypeptide fragment of SEQ ID NO:Y or a polypeptide fragment encoded by the cDNA Clone ID in ATCC Deposit No:Z corresponding to SEQ ID NO:Y as referenced in Table 1A, wherein said fragment has biological activity;
(f) a polynucleotide encoding a polypeptide domain of SEQ ID NO:Y as referenced in Table 1B;
(g) a polynucleotide encoding a polypeptide domain of SEQ ID NO:Y as referenced in Table 2; and
(h) a polynucleotide encoding a predicted epitope of SEQ ID NO:Y as referenced in Table 1B.

8. The method of claim 7, wherein said nucleic acid molecule comprises a heterologous polynucleotide sequence.

9. The method of using the nucleic acid molecule of claim 7, wherein said nucleic acid molecule comprises a polynucleotide sequence 100% identical to a sequence selected from the group consisting of:
(a) a polynucleotide fragment of SEQ ID NO:X as referenced in Table 1A;
(b) a polynucleotide encoding a full length polypeptide of SEQ ID NO:Y or a full length polypeptide encoded by the cDNA Clone ID in ATCC Deposit No:Z corresponding to SEQ ID NO:Y as referenced in Table 1A;
(c) a polynucleotide encoding a predicted secreted form of SEQ ID NO:Y or a secreted form of the polypeptide encoded by the cDNA Clone ID in ATCC Deposit No:Z corresponding to SEQ ID NO:Y as referenced in Table 1A;
(d) a polynucleotide encoding a polypeptide fragment of SEQ ID NO:Y or a polypeptide fragment encoded by the cDNA Clone ID in ATCC Deposit No:Z corresponding to SEQ ID NO:Y as referenced in Table 1A;
(e) a polynucleotide encoding a polypeptide fragment of SEQ ID NO:Y or a polypeptide fragment encoded by the cDNA Clone ID in ATCC Deposit No:Z corresponding to SEQ ID NO:Y as referenced in Table 1A, wherein said fragment has biological activity;
(f) a polynucleotide encoding a polypeptide domain of SEQ ID NO:Y as referenced in Table 1B;
(g) a polynucleotide encoding a polypeptide domain of SEQ ID NO:Y as referenced in Table 2; and
(h) a polynucleotide encoding a predicted epitope of SEQ ID NO:Y as referenced in Table 1B.

10. The method of claim 9, wherein said nucleic acid molecule comprises a heterologous polynucleotide sequence.

11. A method of using an agonist or antagonist for the preparation of a pharmaceutical composition for treating a medical condition, wherein said agonist or antagonist binds a polypeptide comprising an amino acid sequence at least 95% identical to a sequence selected from the group consisting of:
(a) a full length polypeptide of SEQ ID NO:Y or a full length polypeptide encoded by the cDNA Clone ID in ATCC Deposit No:Z corresponding to SEQ ID NO:Y as referenced in Table 1A;
(b) a predicted secreted form of SEQ ID NO:Y or a secreted form of the polypeptide encoded by the cDNA Clone ID in ATCC Deposit No:Z corresponding to SEQ ID NO:Y as referenced in Table 1A;
(c) a polypeptide fragment of SEQ ID NO:Y or a polypeptide fragment encoded by the cDNA Clone ID in ATCC Deposit No:Z corresponding to SEQ ID NO:Y as referenced in Table 1A;
(d) a polypeptide fragment of SEQ ID NO:Y or a polypeptide fragment encoded by the cDNA Clone ID in ATCC Deposit No:Z corresponding to SEQ ID NO:Y as referenced in Table 1A, wherein said fragment has biological activity;
(e) a polypeptide domain of SEQ ID NO:Y as referenced in Table 1B;
(f) a polypeptide domain of SEQ ID NO:Y as referenced in Table 2; and
(g) a predicted epitope of SEQ ID NO:Y as referenced in Table 1B.

12. The method of using the agonist or antagonist of claim 11, wherein said agonist or antagonist binds a polypeptide comprising an amino acid sequence 100% identical to a sequence selected from the group consisting of:
(a) a full length polypeptide of SEQ ID NO:Y or a full length polypeptide encoded by the cDNA Clone ID in ATCC Deposit No:Z corresponding to SEQ ID NO:Y as referenced in Table 1A;
(b) a predicted secreted form of SEQ ID NO:Y or a secreted form of the polypeptide encoded by the cDNA Clone ID in ATCC Deposit No:Z corresponding to SEQ ID NO:Y as referenced in Table 1A;
(c) a polypeptide fragment of SEQ ID NO:Y or a polypeptide fragment encoded by the cDNA Clone ID in ATCC Deposit No:Z corresponding to SEQ ID NO:Y as referenced in Table 1A;
(d) a polypeptide fragment of SEQ ID NO:Y or a polypeptide fragment encoded by the cDNA Clone ID in ATCC Deposit No:Z corresponding to SEQ ID NO:Y as referenced in Table 1A, wherein said fragment has biological activity;
(e) a polypeptide domain of SEQ ID NO:Y as referenced in Table 1B;
(f) a polypeptide domain of SEQ ID NO:Y as referenced in Table 2; and
(g) a predicted epitope of SEQ ID NO:Y as referenced in Table 1B.

13. A polypeptide comprising an amino acid sequence at least 95% identical to a sequence selected from the group consisting of:
(a) a full length polypeptide of SEQ ID NO:Y or a full length polypeptide encoded by the cDNA Clone ID in ATCC Deposit No:Z corresponding to SEQ ID NO:Y as referenced in Table 1A;
(b) a predicted secreted form of SEQ ID NO:Y or a secreted form of the polypeptide encoded by the cDNA Clone ID in ATCC Deposit No:Z corresponding to SEQ ID NO:Y as referenced in Table 1A;
(c) a polypeptide fragment of SEQ ID NO:Y or a polypeptide fragment encoded by the cDNA Clone ID in ATCC Deposit No:Z corresponding to SEQ ID NO:Y as referenced in Table 1A;
(d) a polypeptide fragment of SEQ ID NO:Y or a polypeptide fragment encoded by the cDNA Clone ID in ATCC Deposit No:Z corresponding to SEQ ID NO:Y as referenced in Table 1A, wherein said fragment has biological activity;
(e) a polypeptide domain of SEQ ID NO:Y as referenced in Table 1B;
(f) a polypeptide domain of SEQ ID NO:Y as referenced in Table 2; and
(g) a predicted epitope of SEQ ID NO:Y as referenced in Table 1B.

14. The polypeptide of claim 13, wherein said polypeptide comprises a heterologous amino acid sequence.

15. A method of using the polypeptide of claim 13 for identifying a binding partner comprising:
(a) contacting the polypeptide of claim 13 with a binding partner; and
(b) determining whether the binding partner increases or decreases activity of the polypeptide.

16. The polypeptide of claim 13, comprising an amino acid sequence 100% identical to a sequence selected from the group consisting of:
(a) a full length polypeptide of SEQ ID NO:Y or a full length polypeptide encoded by the cDNA Clone ID in ATCC Deposit No:Z corresponding to SEQ ID NO:Y as referenced in Table 1A;
(b) a predicted secreted form of SEQ ID NO:Y or a secreted form of the polypeptide encoded by the cDNA Clone ID in ATCC Deposit No:Z corresponding to SEQ ID NO:Y as referenced in Table 1A;
(c) a polypeptide fragment of SEQ ID NO:Y or a polypeptide fragment encoded by the cDNA Clone ID in ATCC Deposit No:Z corresponding to SEQ ID NO:Y as referenced in Table 1A;
(d) a polypeptide fragment of SEQ ID NO:Y or a polypeptide fragment encoded by the cDNA Clone ID in ATCC Deposit No:Z corresponding to SEQ ID NO:Y as referenced in Table 1A, wherein said fragment has biological activity;
(e) a polypeptide domain of SEQ ID NO:Y as referenced in Table 1B;
(f) a polypeptide domain of SEQ ID NO:Y as referenced in Table 2; and
(g) a predicted epitope of SEQ ID NO:Y as referenced in Table 1B.

17. The polypeptide of claim 16, wherein said polypeptide comprises a heterologous polypeptide sequence.

18. A method of using the polypeptide of claim 16 for identifying a binding partner comprising:
(a) contacting the polypeptide of claim 16 with a binding partner; and
(b) determining whether the binding partner increases or decreases activity of the polypeptide.

19. An antibody or fragment thereof that binds a polypeptide comprising an amino acid sequence at least 95% identical to a sequence selected from the group consisting of:
(a) a full length polypeptide of SEQ ID NO:Y or a full length polypeptide encoded by the cDNA Clone ID in ATCC Deposit No:Z corresponding to SEQ ID NO:Y as referenced in Table 1A;
(b) a predicted secreted form of SEQ ID NO:Y or a secreted form of the polypeptide encoded by the cDNA Clone ID in ATCC Deposit No:Z corresponding to SEQ ID NO:Y as referenced in Table 1A;
(c) a polypeptide fragment of SEQ ID NO:Y or a polypeptide fragment encoded by the cDNA Clone ID in ATCC Deposit No:Z corresponding to SEQ ID NO:Y as referenced in Table 1A;
(d) a polypeptide fragment of SEQ ID NO:Y or a polypeptide fragment encoded by the cDNA Clone ID in ATCC Deposit No:Z corresponding to SEQ ID NO:Y as referenced in Table 1A, wherein said fragment has biological activity;
(e) a polypeptide domain of SEQ ID NO:Y as referenced in Table 1B;
(f) a polypeptide domain of SEQ ID NO:Y as referenced in Table 2; and
(g) a predicted epitope of SEQ ID NO:Y as referenced in Table 1B.

20. The antibody or fragment thereof of claim 19, that binds a polypeptide comprising an amino acid sequence 100% identical to a sequence selected from the group consisting of:
(a) a full length polypeptide of SEQ ID NO:Y or a full length polypeptide encoded by the cDNA Clone ID in ATCC Deposit No:Z corresponding to SEQ ID NO:Y as referenced in Table 1A;
(b) a predicted secreted form of SEQ ID NO:Y or a secreted form of the polypeptide encoded by the cDNA Clone ID in ATCC Deposit No:Z corresponding to SEQ ID NO:Y as referenced in Table 1A;
(c) a polypeptide fragment of SEQ ID NO:Y or a polypeptide fragment encoded by the cDNA Clone ID in ATCC Deposit No:Z corresponding to SEQ ID NO:Y as referenced in Table 1A;
(d) a polypeptide fragment of SEQ ID NO:Y or a polypeptide fragment encoded by the cDNA Clone ID in ATCC Deposit No:Z corresponding to SEQ ID NO:Y as referenced in Table 1A, wherein said fragment has biological activity;
(e) a polypeptide domain of SEQ ID NO:Y as referenced in Table 1B;
(f) a polypeptide domain of SEQ ID NO:Y as referenced in Table 2; and
(g) a predicted epitope of SEQ ID NO:Y as referenced in Table 1B.

21. A nucleic acid molecule comprising a polynucleotide sequence at least 95% identical to a sequence selected from the group consisting of:
(a) a polynucleotide fragment of SEQ ID NO:X as referenced in Table 1A;
(b) a polynucleotide encoding a full length polypeptide of SEQ ID NO:Y or a full length polypeptide encoded by the cDNA Clone ID in ATCC Deposit No:Z corresponding to SEQ ID NO:Y as referenced in Table 1A;
(c) a polynucleotide encoding a predicted secreted form of SEQ ID NO:Y or a secreted form of the polypeptide encoded by the cDNA Clone ID in ATCC Deposit No:Z corresponding to SEQ ID NO:Y as referenced in Table 1A;
(d) a polynucleotide encoding a polypeptide fragment of SEQ ID NO:Y or a polypeptide fragment encoded by the cDNA Clone ID in ATCC Deposit No:Z corresponding to SEQ ID NO:Y as referenced in Table 1A;
(e) a polynucleotide encoding a polypeptide fragment of SEQ ID NO:Y or a polypeptide fragment encoded by the cDNA Clone ID in ATCC Deposit No:Z corresponding to SEQ ID NO:Y as referenced in Table 1A, wherein said fragment has biological activity;
(f) a polynucleotide encoding a polypeptide domain of SEQ ID NO:Y as referenced in Table 1B;
(g) a polynucleotide encoding a polypeptide domain of SEQ ID NO:Y as referenced in Table 2; and
(h) a polynucleotide encoding a predicted epitope of SEQ ID NO:Y as referenced in Table 1B.

22. The nucleic acid molecule of claim 21, wherein said nucleic acid molecule comprises a heterologous polynucleotide sequence.

23. A recombinant vector comprising the nucleic acid molecule of claim 21.

24. A recombinant vector comprising the nucleic acid molecule of claim 22.

25. A recombinant host cell comprising the recombinant vector of claim 23.

26. A recombinant host cell comprising the recombinant vector of claim 24.

27. The nucleic acid molecule of claim 21, comprising a polynucleotide sequence 100% identical to a sequence selected from the group consisting of:
(a) a polynucleotide fragment of SEQ ID NO:X as referenced in Table 1A;
(b) a polynucleotide encoding a full length polypeptide of SEQ ID NO:Y or a full length polypeptide encoded by the cDNA Clone ID in ATCC Deposit No:Z corresponding to SEQ ID NO:Y as referenced in Table 1A;
(c) a polynucleotide encoding a predicted secreted form of SEQ ID NO:Y or a secreted form of the polypeptide encoded by the cDNA Clone ID in ATCC Deposit No:Z corresponding to SEQ ID NO:Y as referenced in Table 1A;
(d) a polynucleotide encoding a polypeptide fragment of SEQ ID NO:Y or a polypeptide fragment encoded by the cDNA Clone ID in ATCC Deposit No:Z corresponding to SEQ ID NO:Y as referenced in Table 1A;
(e) a polynucleotide encoding a polypeptide fragment of SEQ ID NO:Y or a polypeptide fragment encoded by the cDNA Clone ID in ATCC Deposit No:Z corresponding to SEQ ID NO:Y as referenced in Table 1A, wherein said fragment has biological activity;
(f) a polynucleotide encoding a polypeptide domain of SEQ ID NO:Y as referenced in Table 1B;
(g) a polynucleotide encoding a polypeptide domain of SEQ ID NO:Y as referenced in Table 2; and
(h) a polynucleotide encoding a predicted epitope of SEQ ID NO:Y as referenced in Table 1B.

28. The nucleic acid molecule of claim 27, wherein said nucleic acid molecule comprises a heterologous polynucleotide sequence.

29. A recombinant vector comprising the nucleic acid molecule of claim 27.

30. A recombinant vector comprising the nucleic acid molecule of claim 28.

31. A recombinant host cell comprising the recombinant vector of claim 29.

32. A recombinant host cell comprising the recombinant vector of claim 30.
